United States Patent Application Publication US 2026/0240958 A1 - sequence listing, part 7

SEQ ID NO: 6998 - RNA, 5797 nt, synthetic construct
  source 1..5797: mol_type = other RNA
aggaaataagagagaaaagaagagtaagaagaaatataagagccaccatggcccctaagaagaagcgtaaagtgagccggatggaacgcctcgtctacgaggtgcggcagaagtgcagaaacatcgaggacatctgcatctcctgcggatctctgaacgtgaccctggagcacccactgttcatcggcggcatgtgccagaactgtaaaaactgttttctggagtgtgcctatcaatacgacgatgacggctaccagagctactgcaccatctgttgcggcggaagagaggtgctgatgtgtggaaataacaactgctgccggtgcttctgcgtggaatgcgtggacctgctggtgggccccggcgccgcccaggccgctattaaggaagatccttggaactgctacatgtgcggccacaagggcacatacggcctgctgagacggagagaggactggcctagcagactgcagatgttcttcgccaataaccacgaccaggagttcgacccccctaaggtgtaccctcccgtccccgccgagaagagaaagcccatccgggtcctgagcctgttcgatggcatcgccaccggtctgctggtgctgaaggacctgggcatccaggtggataggtacattgcctccgaggtgtgcgaggactccatcaccgtgggaatggtgcgtcatcagggcaagatcatgtacgtgggcgacgtgcggagcgtgacacagaagcatatccaggagtggggccctttcgacctggtgatcggcggcagcccttgcaatgacctgagcatcgtgaacccagcccggaagggcctgtacgagggaaccggcagactgttcttcgagttttacagactgctgcacgacgcccggcctaaggaaggcgacgaccggcccttcttttggctgttcgagaatgtggtggccatgggagtcagcgacaagcgggatattagccggttcctggagagcaaccccgtgatgatcgatgccaaggaagtgagcgccgcccaccgggccagatacttctggggcaatctgcctggcatgaacagacccctggccagcaccgtgaacgacaagctggagctgcaggagtgcctggagcacggccggatcgccaagttcagcaaggtgagaaccatcaccacccgaagcaacagcatcaaacaaggcaaggaccagcactttcctgtgttcatgaacgagaaggaggacatcctgtggtgtaccgagatggagagagtgttcgggttcccagtccactacacagatgtcagcaacatgtctagactggccagacagagactgctgggaagaagctggtccgtccctgtgatcagacacctgttcgcccctctgaaggagtacttcgcctgcgtgagcagcggcaacagcaacgccaacagccggggccccagcttctctagcggcctggtgccactgtccctgagagggagccacatgggccccatggagatctacaaaaccgtgagcgcctggaagcggcagcctgtgcgcgtgctgagcctgtttcggaatatcgataaagtcctgaaaagcctgggattcctggagagcggctctggctccggcggtggcaccctgaagtacgtggaggatgtgacaaacgtggtcagacgggatgtggagaagtggggccccttcgatctggtgtacggcagcacccaacccctgggcagctcttgtgaccggtgccctggctggtacatgtttcagttccaccggatcctgcagtacgccctgccgagacaggagtcccagcggccattcttttggattttcatggacaacttgctgctgaccgaggatgaccaggaaactaccactcggttcctgcagaccgaagccgtgaccctgcaggacgtgagaggccgggactaccagaacgccatgcgggtgtggtccaacatccctggactgaaaagcaagcacgcacctctgacccctaaagaagaggagtacctgcaggcccaggtgcggagcagaagcaagctggacgcccctaaggtggatctgctggtgaagaattgcctcctgcccctgagagagtacttcaagtatttcagccagaatagtctgcccctgggcggcccaagcagcggcgcccctcctcccagcggcggcagcccagccggctccccaacctctaccgaggagggcacctctgagtccgccacccccgagagcggccctggcacctccaccgagcccagcgagggcagcgcacccggcagccctgccggcagccccacctccacagaggagggaaccagcaccgagcccagcgaaggcagcgccccaggcaccagcaccgagcctagtgagggcggctctggcggcggcagcgcccaggagattaaacggatcaacaagatcagaagaagacttgtgaaagacagcaacaccaagaaggccggcaagacaggccccatgaaaaccctgctggttagagtgatgacacccgatctgagagagcggctggaaaacctgagaaagaagcctgaaaatatcccccagcccatcagcaatacatctagagccaacctgaataagctgctgaccgattacaccgaaatgaagaaggcgatcctgcatgtgtactgggaagagttccagaaggaccctgtgggcctgatgagccgggtggcccagcctgccagcaagaagatcgatcagaacaagctgaaacctgagatggacgagaagggcaacctgaccaccgccggctttgcctgctctcagtgtggccagcccctgttcgtgtacaagctggagcaggtgtctgagaagggcaaggcttacaccaactacttcggacggtgcaatgtggccgagcacgaaaagctgatcctgctggcccagctgaagcccgagaaggatagcgacgaagccgtgacatatagcctgggaaagtttgggcagagggccctggatttctacagcattcatgtgaccaaggagtccacccaccccgtgaagcccctggcccagatcgccggaaacagatacgcctccggacctgtgggaaaggccctgagcgacgcatgtatgggcacaatcgcctccttcctgtctaagtaccaggacatcatcatcgaacaccagaaggtggtgaagggcaaccagaagagactggagagcctgcgggagctggccggcaaggaaaacctggaataccctagcgtgaccctgccacctcagcctcacaccaaggagggcgttgatgcctacaacgaagtgatcgcccgggtgcgaatgtgggtgaacctgaacctgtggcagaagctgaagctaagcagagatgatgccaagcctctgctgagactgaagggattcccttcctttcctctggtcgagagacaggccaacgaagtggactggtgggacatggtgtgtaacgtgaagaagctgatcaacgagaaaaaggaggatggcaaggtgttttggcagaatctggctggctacaagagacaggaagccctgagaccatacctgagcagcgaggaagatcggaagaagggaaagaaattcgctcggtaccagctgggcgacctgctgctgcacctggaaaagaagcacggcgaggactggggaaaggtgtacgacgaggcctgggagcggattgacaagaaagtggaaggcctgagcaagcacatcaagctggaagaggaacggagaagcgaggacgcccagagcaaggccgccctgaccgactggctgcgggctaaggccagcttcgtgatcgagggcctgaaggaggccgacaaggacgagttctgcagatgcgagctgaagctgcagaagtggtacggggacctgcggggaaagcccttcgccatcgaagccgagaacagcatcctggacatcagcggcttcagcaagcagtacaactgtgccttcatctggcagaaggacggcgtgaagaagctgaacctgtacctgatcatcaactacttcaagggcggcaagctgcggttcaagaagatcaaacctgaagccttcgaagccaacagattctacaccgtgatcaacaaaaagagcggcgagatcgtgcccatggaggtgaacttcaacttcgacgaccccaacctgatcatcctgcctctggcctttggcaagagacagggcagagaattcatctggaacgacctgctgtccctggaaaccggcagcctgaagctggccaacggaagagtgatcgagaagacactgtacaacagaagaacccggcaggatgagcctgccctgttcgtggccctgaccttcgagcggcgggaggtcctggactcctccaatatcaaaccaatgaacctgatcggcgtggcaagaggcgaaaacatccccgccgtgatcgccctgaccgaccccgagggctgcccactgagccggtttaaggatagcctgggaaacccaacccacatcctgagaatcggcgagagctataaggagaagcagcggaccatccaggccaagaaggaggtggagcagcggagagccggcggctacagccggaagtacgccagcaaagccaagaatctggcagacgatatggtgagaaacaccgctagagatctgctgtactacgccgtgacccaggatgccatgctgatcttcgccaacctgagccggggcttcggccggcagggcaagcggaccttcatggccgagagacagtacacacggatggaggactggctgaccgccaagctggcctacgagggcctgagcaagacctacctgtccaagacactggcccagtacacctccaagacatgcagcaactgtgggtttaccatcaccagcgccgactacgacagggtgctggagaagctgaagaagacagcaacaggctggatgaccacaattaacggcaaggagctgaaggtggagggccagattacctactacaacagatacaagagacagaacgtagtcaaggacctgtccgtcgagctggatagactgagcgaagaatctgtgaacaacgacatctcctcctggacaaagggcagaagcggagaagctctgagcctcctgaagaaaagattctcccatagacccgtgcaggagaagttcgtgtgcctgaactgcggcttcgagacacacgcagccgagcaagccgccctgaacatcgccagatcctggctgttcctgcggagccaggagtacaagaaataccagacaaacaagacaaccggcaacaccgataagagagccttcgtcgagacctggcagtccttttaccggaagaagcttaaggaggtgtggaaacctgccgtgcggtctggcggatctggcggaggctccacaagcagccagggcctggtgaccttcagggacgtggccctggacttcagccaggaggagtgggagtggctggaccccagccagaaggacctgtacagggacgtgatgctggagaactacaggaacctggtgtggctgggcctgagcatcagcaagcccaacatgatcagcctgctggagcagggcaaggagccctggatggtggagaaggagatgagcgacggccagtgcgccgactgggagagctggaccagccccaagaaaaagagaaaagtctaagctgccttctgcggggcttgccttctggccatgcccttcttctctcccttgcacctgtacctcttggtctttgaataaagcctgagtaggaaggctagcaaaaaaaaaaaaaaaaaaaaaaaaaaaaaaaaaaaaaaaaaaaaaaaaaaaaaaaaaaaaaaaaaaaaaaaaaaaaaaaa

SEQ ID NO: 6999 - RNA, 5797 nt, synthetic construct
  source 1..5797: mol_type = other RNA
aggaaataagagagaaaagaagagtaagaagaaatataagagccaccatggcccctaagaagaagcgtaaagtgagccggatggaacgcctcgtctacgaggtgcggcagaagtgcagaaacatcgaggacatctgcatctcctgcggatctctgaacgtgaccctggagcacccactgttcatcggcggcatgtgccagaactgtaaaaactgttttctggagtgtgcctatcaatacgacgatgacggctaccagagctactgcaccatctgttgcggcggaagagaggtgctgatgtgtggaaataacaactgctgccggtgcttctgcgtggaatgcgtggacctgctggtgggccccggcgccgcccaggccgctattaaggaagatccttggaactgctacatgtgcggccacaagggcacatacggcctgctgagacggagagaggactggcctagcagactgcagatgttcttcgccaataaccacgaccaggagttcgacccccctaaggtgtaccctcccgtccccgccgagaagagaaagcccatccgggtcctgagcctgttcgatggcatcgccaccggtctgctggtgctgaaggacctgggcatccaggtggataggtacattgcctccgaggtgtgcgaggactccatcaccgtgggaatggtgcgtcatcagggcaagatcatgtacgtgggcgacgtgcggagcgtgacacagaagcatatccaggagtggggccctttcgacctggtgatcggcggcagcccttgcaatgacctgagcatcgtgaacccagcccggaagggcctgtacgagggaaccggcagactgttcttcgagttttacagactgctgcacgacgcccggcctaaggaaggcgacgaccggcccttcttttggctgttcgagaatgtggtggccatgggagtcagcgacaagcgggatattagccggttcctggagagcaaccccgtgatgatcgatgccaaggaagtgagcgccgcccaccgggccagatacttctggggcaatctgcctggcatgaacagacccctggccagcaccgtgaacgacaagctggagctgcaggagtgcctggagcacggccggatcgccaagttcagcaaggtgagaaccatcaccacccgaagcaacagcatcaaacaaggcaaggaccagcactttcctgtgttcatgaacgagaaggaggacatcctgtggtgtaccgagatggagagagtgttcgggttcccagtccactacacagatgtcagcaacatgtctagactggccagacagagactgctgggaagaagctggtccgtccctgtgatcagacacctgttcgcccctctgaaggagtacttcgcctgcgtgagcagcggcaacagcaacgccaacagccggggccccagcttctctagcggcctggtgccactgtccctgagagggagccacatgggccccatggagatctacaaaaccgtgagcgcctggaagcggcagcctgtgcgcgtgctgagcctgtttcggaatatcgataaagtcctgaaaagcctgggattcctggagagcggctctggctccggcggtggcaccctgaagtacgtggaggatgtgacaaacgtggtcagacgggatgtggagaagtggggccccttcgatctggtgtacggcagcacccaacccctgggcagctcttgtgaccggtgccctggctggtacatgtttcagttccaccggatcctgcagtacgccctgccgagacaggagtcccagcggccattcttttggattttcatggacaacttgctgctgaccgaggatgaccaggaaactaccactcggttcctgcagaccgaagccgtgaccctgcaggacgtgagaggccgggactaccagaacgccatgcgggtgtggtccaacatccctggactgaaaagcaagcacgcacctctgacccctaaagaagaggagtacctgcaggcccaggtgcggagcagaagcaagctggacgcccctaaggtggatctgctggtgaagaattgcctcctgcccctgagagagtacttcaagtatttcagccagaatagtctgcccctgggcggcccaagcagcggcgcccctcctcccagcggcggcagcccagccggctccccaacctctaccgaggagggcacctctgagtccgccacccccgagagcggccctggcacctccaccgagcccagcgagggcagcgcacccggcagccctgccggcagccccacctccacagaggagggaaccagcaccgagcccagcgaaggcagcgccccaggcaccagcaccgagcctagtgagggcggctctggcggcggcagcgcccaggagattaaacggatcaacaagatcagaagaagacttgtgaaagacagcaacaccaagaaggccggcaagacaggccccatgaaaaccctgctggttagagtgatgacacccgatctgagagagcggctggaaaacctgagaaagaagcctgaaaatatcccccagcccatcagcaatacatctagagccaacctgaataagctgctgaccgattacaccgaaatgaagaaggcgatcctgcatgtgtactgggaagagttccagaaggaccctgtgggcctgatgagccgggtggcccagcctgccagcaagaagatcgatcagaacaagctgaaacctgagatggacgagaagggcaacctgaccaccgccggctttgcctgctctcagtgtggccagcccctgttcgtgtacaagctggagcaggtgtctgagaagggcaaggcttacaccaactacttcggacggtgcaatgtggccgagcacgaaaagctgatcctgctggcccagctgaagcccgagaaggatagcgacgaagccgtgacatatagcctgggaaagtttgggcagagggccctggatttctacagcattcatgtgaccaaggagtccacccaccccgtgaagcccctggcccagatcgccggaaacagatacgcctccggacctgtgggaaaggccctgagcgacgcatgtatgggcacaatcgcctccttcctgtctaagtaccaggacatcatcatcgaacaccagaaggtggtgaagggcaaccagaagagactggagagcctgcgggagctggccggcaaggaaaacctggaataccctagcgtgaccctgccacctcagcctcacaccaaggagggcgttgatgcctacaacgaagtgatcgcccgggtgcgaatgtgggtgaacctgaacctgtggcagaagctgaagctaagcagagatgatgccaagcctctgctgagactgaagggattcccttcctttcctctggtcgagagacaggccaacgaagtggactggtgggacatggtgtgtaacgtgaagaagctgatcaacgagaaaaaggaggatggcaaggtgttttggcagaatctggctggctacaagagacaggaagccctgagaccatacctgagcagcgaggaagatcggaagaagggaaagaaattcgctcggtaccagctgggcgacctgctgctgcacctggaaaagaagcacggcgaggactggggaaaggtgtacgacgaggcctgggagcggattgacaagaaagtggaaggcctgagcaagcacatcaagctggaagaggaacggagaagcgaggacgcccagagcaaggccgccctgaccgactggctgcgggctaaggccagcttcgtgatcgagggcctgaaggaggccgacaaggacgagttctgcagatgcgagctgaagctgcagaagtggtacggggacctgcggggaaagcccttcgccatcgaagccgagaacagcatcctggacatcagcggcttcagcaagcagtacaactgtgccttcatctggcagaaggacggcgtgaagaagctgaacctgtacctgatcatcaactacttcaagggcggcaagctgcggttcaagaagatcaaacctgaagccttcgaagccaacagattctacaccgtgatcaacaaaaagagcggcgagatcgtgcccatggaggtgaacttcaacttcgacgaccccaacctgatcatcctgcctctggcctttggcaagagacagggcagagaattcatctggaacgacctgctgtccctggaaaccggcagcctgaagctggccaacggaagagtgatcgagaagacactgtacaacagaagaacccggcaggatgagcctgccctgttcgtggccctgaccttcgagcggcgggaggtcctggactcctccaatatcaaaccaatgaacctgatcggcgtggcaagaggcgaaaacatccccgccgtgatcgccctgaccgaccccgagggctgcccactgagccggtttaaggatagcctgggaaacccaacccacatcctgagaatcggcgagagctataaggagaagcagcggaccatccaggccaagaaggaggtggagcagcggagagccggcggctacagccggaagtacgccagcaaagccaagaatctggcagacgatatggtgagaaacaccgctagagatctgctgtactacgccgtgacccaggatgccatgctgatcttcgccaacctgagccggggcttcggccggcagggcaagcggaccttcatggccgagagacagtacacacggatggaggactggctgaccgccaagctggcctacgagggcctgagcaagacctacctgtccaagacactggcccagtacacctccaagacatgcagcaactgtgggtttaccatcaccagcgccgactacgacagggtgctggagaagctgaagaagacagcaacaggctggatgaccacaattaacggcaaggagctgaaggtggagggccagattacctactacaacagatacaagagacagaacgtagtcaaggacctgtccgtcgagctggatagactgagcgaagaatctgtgaacaacgacatctcctcctggacaaagggcagaagcggagaagctctgagcctcctgaagaaaagattctcccatagacccgtgcaggagaagttcgtgtgcctgaactgcggcttcgagacacacgcagccgagcaagccgccctgaacatcgccagatcctggctgttcctgcggagccaggagtacaagaaataccagacaaacaagacaaccggcaacaccgataagagagccttcgtcgagacctggcagtccttttaccggaagaagcttaaggaggtgtggaaacctgccgtgcggtctggcggatctggcggaggctccacaagcatcggcagcgacctgttcagggacgtggccgtggtgttcagcagggaggagtgggagcagctgacccccgcccagagggacctgtacagggacgtgatgctggagatctacagcatcctgctgagcctgggccccgacctggccgtgagcaagcccgacgtgatcagcttcctggagcagggcaaggagccctggagggtggaggaggccgtgaccggcggcctgtgccccgtgctggagagcaccagccccaagaaaaagagaaaagtctaagctgccttctgcggggcttgccttctggccatgcccttcttctctcccttgcacctgtacctcttggtctttgaataaagcctgagtaggaaggctagcaaaaaaaaaaaaaaaaaaaaaaaaaaaaaaaaaaaaaaaaaaaaaaaaaaaaaaaaaaaaaaaaaaaaaaaaaaaaaaaa

SEQ ID NO: 7000 - RNA, 5797 nt, synthetic construct
  source 1..5797: mol_type = other RNA
aggaaataagagagaaaagaagagtaagaagaaatataagagccaccatggcccctaagaagaagcgtaaagtgagccggatggaacgcctcgtctacgaggtgcggcagaagtgcagaaacatcgaggacatctgcatctcctgcggatctctgaacgtgaccctggagcacccactgttcatcggcggcatgtgccagaactgtaaaaactgttttctggagtgtgcctatcaatacgacgatgacggctaccagagctactgcaccatctgttgcggcggaagagaggtgctgatgtgtggaaataacaactgctgccggtgcttctgcgtggaatgcgtggacctgctggtgggccccggcgccgcccaggccgctattaaggaagatccttggaactgctacatgtgcggccacaagggcacatacggcctgctgagacggagagaggactggcctagcagactgcagatgttcttcgccaataaccacgaccaggagttcgacccccctaaggtgtaccctcccgtccccgccgagaagagaaagcccatccgggtcctgagcctgttcgatggcatcgccaccggtctgctggtgctgaaggacctgggcatccaggtggataggtacattgcctccgaggtgtgcgaggactccatcaccgtgggaatggtgcgtcatcagggcaagatcatgtacgtgggcgacgtgcggagcgtgacacagaagcatatccaggagtggggccctttcgacctggtgatcggcggcagcccttgcaatgacctgagcatcgtgaacccagcccggaagggcctgtacgagggaaccggcagactgttcttcgagttttacagactgctgcacgacgcccggcctaaggaaggcgacgaccggcccttcttttggctgttcgagaatgtggtggccatgggagtcagcgacaagcgggatattagccggttcctggagagcaaccccgtgatgatcgatgccaaggaagtgagcgccgcccaccgggccagatacttctggggcaatctgcctggcatgaacagacccctggccagcaccgtgaacgacaagctggagctgcaggagtgcctggagcacggccggatcgccaagttcagcaaggtgagaaccatcaccacccgaagcaacagcatcaaacaaggcaaggaccagcactttcctgtgttcatgaacgagaaggaggacatcctgtggtgtaccgagatggagagagtgttcgggttcccagtccactacacagatgtcagcaacatgtctagactggccagacagagactgctgggaagaagctggtccgtccctgtgatcagacacctgttcgcccctctgaaggagtacttcgcctgcgtgagcagcggcaacagcaacgccaacagccggggccccagcttctctagcggcctggtgccactgtccctgagagggagccacatgggccccatggagatctacaaaaccgtgagcgcctggaagcggcagcctgtgcgcgtgctgagcctgtttcggaatatcgataaagtcctgaaaagcctgggattcctggagagcggctctggctccggcggtggcaccctgaagtacgtggaggatgtgacaaacgtggtcagacgggatgtggagaagtggggccccttcgatctggtgtacggcagcacccaacccctgggcagctcttgtgaccggtgccctggctggtacatgtttcagttccaccggatcctgcagtacgccctgccgagacaggagtcccagcggccattcttttggattttcatggacaacttgctgctgaccgaggatgaccaggaaactaccactcggttcctgcagaccgaagccgtgaccctgcaggacgtgagaggccgggactaccagaacgccatgcgggtgtggtccaacatccctggactgaaaagcaagcacgcacctctgacccctaaagaagaggagtacctgcaggcccaggtgcggagcagaagcaagctggacgcccctaaggtggatctgctggtgaagaattgcctcctgcccctgagagagtacttcaagtatttcagccagaatagtctgcccctgggcggcccaagcagcggcgcccctcctcccagcggcggcagcccagccggctccccaacctctaccgaggagggcacctctgagtccgccacccccgagagcggccctggcacctccaccgagcccagcgagggcagcgcacccggcagccctgccggcagccccacctccacagaggagggaaccagcaccgagcccagcgaaggcagcgccccaggcaccagcaccgagcctagtgagggcggctctggcggcggcagcgcccaggagattaaacggatcaacaagatcagaagaagacttgtgaaagacagcaacaccaagaaggccggcaagacaggccccatgaaaaccctgctggttagagtgatgacacccgatctgagagagcggctggaaaacctgagaaagaagcctgaaaatatcccccagcccatcagcaatacatctagagccaacctgaataagctgctgaccgattacaccgaaatgaagaaggcgatcctgcatgtgtactgggaagagttccagaaggaccctgtgggcctgatgagccgggtggcccagcctgccagcaagaagatcgatcagaacaagctgaaacctgagatggacgagaagggcaacctgaccaccgccggctttgcctgctctcagtgtggccagcccctgttcgtgtacaagctggagcaggtgtctgagaagggcaaggcttacaccaactacttcggacggtgcaatgtggccgagcacgaaaagctgatcctgctggcccagctgaagcccgagaaggatagcgacgaagccgtgacatatagcctgggaaagtttgggcagagggccctggatttctacagcattcatgtgaccaaggagtccacccaccccgtgaagcccctggcccagatcgccggaaacagatacgcctccggacctgtgggaaaggccctgagcgacgcatgtatgggcacaatcgcctccttcctgtctaagtaccaggacatcatcatcgaacaccagaaggtggtgaagggcaaccagaagagactggagagcctgcgggagctggccggcaaggaaaacctggaataccctagcgtgaccctgccacctcagcctcacaccaaggagggcgttgatgcctacaacgaagtgatcgcccgggtgcgaatgtgggtgaacctgaacctgtggcagaagctgaagctaagcagagatgatgccaagcctctgctgagactgaagggattcccttcctttcctctggtcgagagacaggccaacgaagtggactggtgggacatggtgtgtaacgtgaagaagctgatcaacgagaaaaaggaggatggcaaggtgttttggcagaatctggctggctacaagagacaggaagccctgagaccatacctgagcagcgaggaagatcggaagaagggaaagaaattcgctcggtaccagctgggcgacctgctgctgcacctggaaaagaagcacggcgaggactggggaaaggtgtacgacgaggcctgggagcggattgacaagaaagtggaaggcctgagcaagcacatcaagctggaagaggaacggagaagcgaggacgcccagagcaaggccgccctgaccgactggctgcgggctaaggccagcttcgtgatcgagggcctgaaggaggccgacaaggacgagttctgcagatgcgagctgaagctgcagaagtggtacggggacctgcggggaaagcccttcgccatcgaagccgagaacagcatcctggacatcagcggcttcagcaagcagtacaactgtgccttcatctggcagaaggacggcgtgaagaagctgaacctgtacctgatcatcaactacttcaagggcggcaagctgcggttcaagaagatcaaacctgaagccttcgaagccaacagattctacaccgtgatcaacaaaaagagcggcgagatcgtgcccatggaggtgaacttcaacttcgacgaccccaacctgatcatcctgcctctggcctttggcaagagacagggcagagaattcatctggaacgacctgctgtccctggaaaccggcagcctgaagctggccaacggaagagtgatcgagaagacactgtacaacagaagaacccggcaggatgagcctgccctgttcgtggccctgaccttcgagcggcgggaggtcctggactcctccaatatcaaaccaatgaacctgatcggcgtggcaagaggcgaaaacatccccgccgtgatcgccctgaccgaccccgagggctgcccactgagccggtttaaggatagcctgggaaacccaacccacatcctgagaatcggcgagagctataaggagaagcagcggaccatccaggccaagaaggaggtggagcagcggagagccggcggctacagccggaagtacgccagcaaagccaagaatctggcagacgatatggtgagaaacaccgctagagatctgctgtactacgccgtgacccaggatgccatgctgatcttcgccaacctgagccggggcttcggccggcagggcaagcggaccttcatggccgagagacagtacacacggatggaggactggctgaccgccaagctggcctacgagggcctgagcaagacctacctgtccaagacactggcccagtacacctccaagacatgcagcaactgtgggtttaccatcaccagcgccgactacgacagggtgctggagaagctgaagaagacagcaacaggctggatgaccacaattaacggcaaggagctgaaggtggagggccagattacctactacaacagatacaagagacagaacgtagtcaaggacctgtccgtcgagctggatagactgagcgaagaatctgtgaacaacgacatctcctcctggacaaagggcagaagcggagaagctctgagcctcctgaagaaaagattctcccatagacccgtgcaggagaagttcgtgtgcctgaactgcggcttcgagacacacgcagccgagcaagccgccctgaacatcgccagatcctggctgttcctgcggagccaggagtacaagaaataccagacaaacaagacaaccggcaacaccgataagagagccttcgtcgagacctggcagtccttttaccggaagaagcttaaggaggtgtggaaacctgccgtgcggtctggcggatctggcggaggctccacaagcatgatcaagagccaggagagcctgaccctggaggacgtggccgtggagttcacctgggaggagtggcagctgctgggccccgcccagaaggacctgtacagggacgtgatgctggagaactacagcaacctggtgagcgtgggctaccaggccagcaagcccgacgccctgttcaagctggagcagggcgagccctggaccgtggagaacgacagccacatctgccccgagatcaagaaggtgaccagccccaagaaaaagagaaaagtctaagctgccttctgcggggcttgccttctggccatgcccttcttctctcccttgcacctgtacctcttggtctttgaataaagcctgagtaggaaggctagcaaaaaaaaaaaaaaaaaaaaaaaaaaaaaaaaaaaaaaaaaaaaaaaaaaaaaaaaaaaaaaaaaaaaaaaaaaaaaaaa

SEQ ID NO: 7001 - RNA, 5797 nt, synthetic construct
  source 1..5797: mol_type = other RNA
aggaaataagagagaaaagaagagtaagaagaaatataagagccaccatggcccctaagaagaagcgtaaagtgagccggatggaacgcctcgtctacgaggtgcggcagaagtgcagaaacatcgaggacatctgcatctcctgcggatctctgaacgtgaccctggagcacccactgttcatcggcggcatgtgccagaactgtaaaaactgttttctggagtgtgcctatcaatacgacgatgacggctaccagagctactgcaccatctgttgcggcggaagagaggtgctgatgtgtggaaataacaactgctgccggtgcttctgcgtggaatgcgtggacctgctggtgggccccggcgccgcccaggccgctattaaggaagatccttggaactgctacatgtgcggccacaagggcacatacggcctgctgagacggagagaggactggcctagcagactgcagatgttcttcgccaataaccacgaccaggagttcgacccccctaaggtgtaccctcccgtccccgccgagaagagaaagcccatccgggtcctgagcctgttcgatggcatcgccaccggtctgctggtgctgaaggacctgggcatccaggtggataggtacattgcctccgaggtgtgcgaggactccatcaccgtgggaatggtgcgtcatcagggcaagatcatgtacgtgggcgacgtgcggagcgtgacacagaagcatatccaggagtggggccctttcgacctggtgatcggcggcagcccttgcaatgacctgagcatcgtgaacccagcccggaagggcctgtacgagggaaccggcagactgttcttcgagttttacagactgctgcacgacgcccggcctaaggaaggcgacgaccggcccttcttttggctgttcgagaatgtggtggccatgggagtcagcgacaagcgggatattagccggttcctggagagcaaccccgtgatgatcgatgccaaggaagtgagcgccgcccaccgggccagatacttctggggcaatctgcctggcatgaacagacccctggccagcaccgtgaacgacaagctggagctgcaggagtgcctggagcacggccggatcgccaagttcagcaaggtgagaaccatcaccacccgaagcaacagcatcaaacaaggcaaggaccagcactttcctgtgttcatgaacgagaaggaggacatcctgtggtgtaccgagatggagagagtgttcgggttcccagtccactacacagatgtcagcaacatgtctagactggccagacagagactgctgggaagaagctggtccgtccctgtgatcagacacctgttcgcccctctgaaggagtacttcgcctgcgtgagcagcggcaacagcaacgccaacagccggggccccagcttctctagcggcctggtgccactgtccctgagagggagccacatgggccccatggagatctacaaaaccgtgagcgcctggaagcggcagcctgtgcgcgtgctgagcctgtttcggaatatcgataaagtcctgaaaagcctgggattcctggagagcggctctggctccggcggtggcaccctgaagtacgtggaggatgtgacaaacgtggtcagacgggatgtggagaagtggggccccttcgatctggtgtacggcagcacccaacccctgggcagctcttgtgaccggtgccctggctggtacatgtttcagttccaccggatcctgcagtacgccctgccgagacaggagtcccagcggccattcttttggattttcatggacaacttgctgctgaccgaggatgaccaggaaactaccactcggttcctgcagaccgaagccgtgaccctgcaggacgtgagaggccgggactaccagaacgccatgcgggtgtggtccaacatccctggactgaaaagcaagcacgcacctctgacccctaaagaagaggagtacctgcaggcccaggtgcggagcagaagcaagctggacgcccctaaggtggatctgctggtgaagaattgcctcctgcccctgagagagtacttcaagtatttcagccagaatagtctgcccctgggcggcccaagcagcggcgcccctcctcccagcggcggcagcccagccggctccccaacctctaccgaggagggcacctctgagtccgccacccccgagagcggccctggcacctccaccgagcccagcgagggcagcgcacccggcagccctgccggcagccccacctccacagaggagggaaccagcaccgagcccagcgaaggcagcgccccaggcaccagcaccgagcctagtgagggcggctctggcggcggcagcgcccaggagattaaacggatcaacaagatcagaagaagacttgtgaaagacagcaacaccaagaaggccggcaagacaggccccatgaaaaccctgctggttagagtgatgacacccgatctgagagagcggctggaaaacctgagaaagaagcctgaaaatatcccccagcccatcagcaatacatctagagccaacctgaataagctgctgaccgattacaccgaaatgaagaaggcgatcctgcatgtgtactgggaagagttccagaaggaccctgtgggcctgatgagccgggtggcccagcctgccagcaagaagatcgatcagaacaagctgaaacctgagatggacgagaagggcaacctgaccaccgccggctttgcctgctctcagtgtggccagcccctgttcgtgtacaagctggagcaggtgtctgagaagggcaaggcttacaccaactacttcggacggtgcaatgtggccgagcacgaaaagctgatcctgctggcccagctgaagcccgagaaggatagcgacgaagccgtgacatatagcctgggaaagtttgggcagagggccctggatttctacagcattcatgtgaccaaggagtccacccaccccgtgaagcccctggcccagatcgccggaaacagatacgcctccggacctgtgggaaaggccctgagcgacgcatgtatgggcacaatcgcctccttcctgtctaagtaccaggacatcatcatcgaacaccagaaggtggtgaagggcaaccagaagagactggagagcctgcgggagctggccggcaaggaaaacctggaataccctagcgtgaccctgccacctcagcctcacaccaaggagggcgttgatgcctacaacgaagtgatcgcccgggtgcgaatgtgggtgaacctgaacctgtggcagaagctgaagctaagcagagatgatgccaagcctctgctgagactgaagggattcccttcctttcctctggtcgagagacaggccaacgaagtggactggtgggacatggtgtgtaacgtgaagaagctgatcaacgagaaaaaggaggatggcaaggtgttttggcagaatctggctggctacaagagacaggaagccctgagaccatacctgagcagcgaggaagatcggaagaagggaaagaaattcgctcggtaccagctgggcgacctgctgctgcacctggaaaagaagcacggcgaggactggggaaaggtgtacgacgaggcctgggagcggattgacaagaaagtggaaggcctgagcaagcacatcaagctggaagaggaacggagaagcgaggacgcccagagcaaggccgccctgaccgactggctgcgggctaaggccagcttcgtgatcgagggcctgaaggaggccgacaaggacgagttctgcagatgcgagctgaagctgcagaagtggtacggggacctgcggggaaagcccttcgccatcgaagccgagaacagcatcctggacatcagcggcttcagcaagcagtacaactgtgccttcatctggcagaaggacggcgtgaagaagctgaacctgtacctgatcatcaactacttcaagggcggcaagctgcggttcaagaagatcaaacctgaagccttcgaagccaacagattctacaccgtgatcaacaaaaagagcggcgagatcgtgcccatggaggtgaacttcaacttcgacgaccccaacctgatcatcctgcctctggcctttggcaagagacagggcagagaattcatctggaacgacctgctgtccctggaaaccggcagcctgaagctggccaacggaagagtgatcgagaagacactgtacaacagaagaacccggcaggatgagcctgccctgttcgtggccctgaccttcgagcggcgggaggtcctggactcctccaatatcaaaccaatgaacctgatcggcgtggcaagaggcgaaaacatccccgccgtgatcgccctgaccgaccccgagggctgcccactgagccggtttaaggatagcctgggaaacccaacccacatcctgagaatcggcgagagctataaggagaagcagcggaccatccaggccaagaaggaggtggagcagcggagagccggcggctacagccggaagtacgccagcaaagccaagaatctggcagacgatatggtgagaaacaccgctagagatctgctgtactacgccgtgacccaggatgccatgctgatcttcgccaacctgagccggggcttcggccggcagggcaagcggaccttcatggccgagagacagtacacacggatggaggactggctgaccgccaagctggcctacgagggcctgagcaagacctacctgtccaagacactggcccagtacacctccaagacatgcagcaactgtgggtttaccatcaccagcgccgactacgacagggtgctggagaagctgaagaagacagcaacaggctggatgaccacaattaacggcaaggagctgaaggtggagggccagattacctactacaacagatacaagagacagaacgtagtcaaggacctgtccgtcgagctggatagactgagcgaagaatctgtgaacaacgacatctcctcctggacaaagggcagaagcggagaagctctgagcctcctgaagaaaagattctcccatagacccgtgcaggagaagttcgtgtgcctgaactgcggcttcgagacacacgcagccgagcaagccgccctgaacatcgccagatcctggctgttcctgcggagccaggagtacaagaaataccagacaaacaagacaaccggcaacaccgataagagagccttcgtcgagacctggcagtccttttaccggaagaagcttaaggaggtgtggaaacctgccgtgcggtctggcggatctggcggaggctccacaagcatgttccaggtgaccttcagcgacgtggccatcgacttcagccacgaggagtggggctggctggacagcgcccagagggacctgtacaaggacgtgatggtgcagaactacgagaacctggtgagcctgggcctgagcatccccaagcccaacgtgatcgccctgctggaggagggcaaggacccctggatggtggagaggaagctgagcaccggcatgttccccgactgggacagcaggtggaccagccccaagaaaaagagaaaagtctaagctgccttctgcggggcttgccttctggccatgcccttcttctctcccttgcacctgtacctcttggtctttgaataaagcctgagtaggaaggctagcaaaaaaaaaaaaaaaaaaaaaaaaaaaaaaaaaaaaaaaaaaaaaaaaaaaaaaaaaaaaaaaaaaaaaaaaaaaaaaaa

SEQ ID NO: 7002 - RNA, 5797 nt, synthetic construct
  source 1..5797: mol_type = other RNA
aggaaataagagagaaaagaagagtaagaagaaatataagagccaccatggcccctaagaagaagcgtaaagtgagccggatggaacgcctcgtctacgaggtgcggcagaagtgcagaaacatcgaggacatctgcatctcctgcggatctctgaacgtgaccctggagcacccactgttcatcggcggcatgtgccagaactgtaaaaactgttttctggagtgtgcctatcaatacgacgatgacggctaccagagctactgcaccatctgttgcggcggaagagaggtgctgatgtgtggaaataacaactgctgccggtgcttctgcgtggaatgcgtggacctgctggtgggccccggcgccgcccaggccgctattaaggaagatccttggaactgctacatgtgcggccacaagggcacatacggcctgctgagacggagagaggactggcctagcagactgcagatgttcttcgccaataaccacgaccaggagttcgacccccctaaggtgtaccctcccgtccccgccgagaagagaaagcccatccgggtcctgagcctgttcgatggcatcgccaccggtctgctggtgctgaaggacctgggcatccaggtggataggtacattgcctccgaggtgtgcgaggactccatcaccgtgggaatggtgcgtcatcagggcaagatcatgtacgtgggcgacgtgcggagcgtgacacagaagcatatccaggagtggggccctttcgacctggtgatcggcggcagcccttgcaatgacctgagcatcgtgaacccagcccggaagggcctgtacgagggaaccggcagactgttcttcgagttttacagactgctgcacgacgcccggcctaaggaaggcgacgaccggcccttcttttggctgttcgagaatgtggtggccatgggagtcagcgacaagcgggatattagccggttcctggagagcaaccccgtgatgatcgatgccaaggaagtgagcgccgcccaccgggccagatacttctggggcaatctgcctggcatgaacagacccctggccagcaccgtgaacgacaagctggagctgcaggagtgcctggagcacggccggatcgccaagttcagcaaggtgagaaccatcaccacccgaagcaacagcatcaaacaaggcaaggaccagcactttcctgtgttcatgaacgagaaggaggacatcctgtggtgtaccgagatggagagagtgttcgggttcccagtccactacacagatgtcagcaacatgtctagactggccagacagagactgctgggaagaagctggtccgtccctgtgatcagacacctgttcgcccctctgaaggagtacttcgcctgcgtgagcagcggcaacagcaacgccaacagccggggccccagcttctctagcggcctggtgccactgtccctgagagggagccacatgggccccatggagatctacaaaaccgtgagcgcctggaagcggcagcctgtgcgcgtgctgagcctgtttcggaatatcgataaagtcctgaaaagcctgggattcctggagagcggctctggctccggcggtggcaccctgaagtacgtggaggatgtgacaaacgtggtcagacgggatgtggagaagtggggccccttcgatctggtgtacggcagcacccaacccctgggcagctcttgtgaccggtgccctggctggtacatgtttcagttccaccggatcctgcagtacgccctgccgagacaggagtcccagcggccattcttttggattttcatggacaacttgctgctgaccgaggatgaccaggaaactaccactcggttcctgcagaccgaagccgtgaccctgcaggacgtgagaggccgggactaccagaacgccatgcgggtgtggtccaacatccctggactgaaaagcaagcacgcacctctgacccctaaagaagaggagtacctgcaggcccaggtgcggagcagaagcaagctggacgcccctaaggtggatctgctggtgaagaattgcctcctgcccctgagagagtacttcaagtatttcagccagaatagtctgcccctgggcggcccaagcagcggcgcccctcctcccagcggcggcagcccagccggctccccaacctctaccgaggagggcacctctgagtccgccacccccgagagcggccctggcacctccaccgagcccagcgagggcagcgcacccggcagccctgccggcagccccacctccacagaggagggaaccagcaccgagcccagcgaaggcagcgccccaggcaccagcaccgagcctagtgagggcggctctggcggcggcagcgcccaggagattaaacggatcaacaagatcagaagaagacttgtgaaagacagcaacaccaagaaggccggcaagacaggccccatgaaaaccctgctggttagagtgatgacacccgatctgagagagcggctggaaaacctgagaaagaagcctgaaaatatcccccagcccatcagcaatacatctagagccaacctgaataagctgctgaccgattacaccgaaatgaagaaggcgatcctgcatgtgtactgggaagagttccagaaggaccctgtgggcctgatgagccgggtggcccagcctgccagcaagaagatcgatcagaacaagctgaaacctgagatggacgagaagggcaacctgaccaccgccggctttgcctgctctcagtgtggccagcccctgttcgtgtacaagctggagcaggtgtctgagaagggcaaggcttacaccaactacttcggacggtgcaatgtggccgagcacgaaaagctgatcctgctggcccagctgaagcccgagaaggatagcgacgaagccgtgacatatagcctgggaaagtttgggcagagggccctggatttctacagcattcatgtgaccaaggagtccacccaccccgtgaagcccctggcccagatcgccggaaacagatacgcctccggacctgtgggaaaggccctgagcgacgcatgtatgggcacaatcgcctccttcctgtctaagtaccaggacatcatcatcgaacaccagaaggtggtgaagggcaaccagaagagactggagagcctgcgggagctggccggcaaggaaaacctggaataccctagcgtgaccctgccacctcagcctcacaccaaggagggcgttgatgcctacaacgaagtgatcgcccgggtgcgaatgtgggtgaacctgaacctgtggcagaagctgaagctaagcagagatgatgccaagcctctgctgagactgaagggattcccttcctttcctctggtcgagagacaggccaacgaagtggactggtgggacatggtgtgtaacgtgaagaagctgatcaacgagaaaaaggaggatggcaaggtgttttggcagaatctggctggctacaagagacaggaagccctgagaccatacctgagcagcgaggaagatcggaagaagggaaagaaattcgctcggtaccagctgggcgacctgctgctgcacctggaaaagaagcacggcgaggactggggaaaggtgtacgacgaggcctgggagcggattgacaagaaagtggaaggcctgagcaagcacatcaagctggaagaggaacggagaagcgaggacgcccagagcaaggccgccctgaccgactggctgcgggctaaggccagcttcgtgatcgagggcctgaaggaggccgacaaggacgagttctgcagatgcgagctgaagctgcagaagtggtacggggacctgcggggaaagcccttcgccatcgaagccgagaacagcatcctggacatcagcggcttcagcaagcagtacaactgtgccttcatctggcagaaggacggcgtgaagaagctgaacctgtacctgatcatcaactacttcaagggcggcaagctgcggttcaagaagatcaaacctgaagccttcgaagccaacagattctacaccgtgatcaacaaaaagagcggcgagatcgtgcccatggaggtgaacttcaacttcgacgaccccaacctgatcatcctgcctctggcctttggcaagagacagggcagagaattcatctggaacgacctgctgtccctggaaaccggcagcctgaagctggccaacggaagagtgatcgagaagacactgtacaacagaagaacccggcaggatgagcctgccctgttcgtggccctgaccttcgagcggcgggaggtcctggactcctccaatatcaaaccaatgaacctgatcggcgtggcaagaggcgaaaacatccccgccgtgatcgccctgaccgaccccgagggctgcccactgagccggtttaaggatagcctgggaaacccaacccacatcctgagaatcggcgagagctataaggagaagcagcggaccatccaggccaagaaggaggtggagcagcggagagccggcggctacagccggaagtacgccagcaaagccaagaatctggcagacgatatggtgagaaacaccgctagagatctgctgtactacgccgtgacccaggatgccatgctgatcttcgccaacctgagccggggcttcggccggcagggcaagcggaccttcatggccgagagacagtacacacggatggaggactggctgaccgccaagctggcctacgagggcctgagcaagacctacctgtccaagacactggcccagtacacctccaagacatgcagcaactgtgggtttaccatcaccagcgccgactacgacagggtgctggagaagctgaagaagacagcaacaggctggatgaccacaattaacggcaaggagctgaaggtggagggccagattacctactacaacagatacaagagacagaacgtagtcaaggacctgtccgtcgagctggatagactgagcgaagaatctgtgaacaacgacatctcctcctggacaaagggcagaagcggagaagctctgagcctcctgaagaaaagattctcccatagacccgtgcaggagaagttcgtgtgcctgaactgcggcttcgagacacacgcagccgagcaagccgccctgaacatcgccagatcctggctgttcctgcggagccaggagtacaagaaataccagacaaacaagacaaccggcaacaccgataagagagccttcgtcgagacctggcagtccttttaccggaagaagcttaaggaggtgtggaaacctgccgtgcggtctggcggatctggcggaggctccacaagcccccaggagcccgtgaccttcgccgacgtggccgtgctgttcacccccgaggagtggctgttcctggacagcagccagaagagcctgtacagggacgtgatgctggagaactacaggaacgtggccagcgtgggcgaccagctgtgcaagaccaggatgagcagccacctggagcagagggaggagctgtgcgtgaccgagaggggcatcttccccggcgcccacctgggcccccacctgcagaccagccccaagaaaaagagaaaagtctaagctgccttctgcggggcttgccttctggccatgcccttcttctctcccttgcacctgtacctcttggtctttgaataaagcctgagtaggaaggctagcaaaaaaaaaaaaaaaaaaaaaaaaaaaaaaaaaaaaaaaaaaaaaaaaaaaaaaaaaaaaaaaaaaaaaaaaaaaaaaaa

SEQ ID NO: 7003 - RNA, 5797 nt, synthetic construct
  source 1..5797: mol_type = other RNA
aggaaataagagagaaaagaagagtaagaagaaatataagagccaccatggcccctaagaagaagcgtaaagtgagccggatggaacgcctcgtctacgaggtgcggcagaagtgcagaaacatcgaggacatctgcatctcctgcggatctctgaacgtgaccctggagcacccactgttcatcggcggcatgtgccagaactgtaaaaactgttttctggagtgtgcctatcaatacgacgatgacggctaccagagctactgcaccatctgttgcggcggaagagaggtgctgatgtgtggaaataacaactgctgccggtgcttctgcgtggaatgcgtggacctgctggtgggccccggcgccgcccaggccgctattaaggaagatccttggaactgctacatgtgcggccacaagggcacatacggcctgctgagacggagagaggactggcctagcagactgcagatgttcttcgccaataaccacgaccaggagttcgacccccctaaggtgtaccctcccgtccccgccgagaagagaaagcccatccgggtcctgagcctgttcgatggcatcgccaccggtctgctggtgctgaaggacctgggcatccaggtggataggtacattgcctccgaggtgtgcgaggactccatcaccgtgggaatggtgcgtcatcagggcaagatcatgtacgtgggcgacgtgcggagcgtgacacagaagcatatccaggagtggggccctttcgacctggtgatcggcggcagcccttgcaatgacctgagcatcgtgaacccagcccggaagggcctgtacgagggaaccggcagactgttcttcgagttttacagactgctgcacgacgcccggcctaaggaaggcgacgaccggcccttcttttggctgttcgagaatgtggtggccatgggagtcagcgacaagcgggatattagccggttcctggagagcaaccccgtgatgatcgatgccaaggaagtgagcgccgcccaccgggccagatacttctggggcaatctgcctggcatgaacagacccctggccagcaccgtgaacgacaagctggagctgcaggagtgcctggagcacggccggatcgccaagttcagcaaggtgagaaccatcaccacccgaagcaacagcatcaaacaaggcaaggaccagcactttcctgtgttcatgaacgagaaggaggacatcctgtggtgtaccgagatggagagagtgttcgggttcccagtccactacacagatgtcagcaacatgtctagactggccagacagagactgctgggaagaagctggtccgtccctgtgatcagacacctgttcgcccctctgaaggagtacttcgcctgcgtgagcagcggcaacagcaacgccaacagccggggccccagcttctctagcggcctggtgccactgtccctgagagggagccacatgggccccatggagatctacaaaaccgtgagcgcctggaagcggcagcctgtgcgcgtgctgagcctgtttcggaatatcgataaagtcctgaaaagcctgggattcctggagagcggctctggctccggcggtggcaccctgaagtacgtggaggatgtgacaaacgtggtcagacgggatgtggagaagtggggccccttcgatctggtgtacggcagcacccaacccctgggcagctcttgtgaccggtgccctggctggtacatgtttcagttccaccggatcctgcagtacgccctgccgagacaggagtcccagcggccattcttttggattttcatggacaacttgctgctgaccgaggatgaccaggaaactaccactcggttcctgcagaccgaagccgtgaccctgcaggacgtgagaggccgggactaccagaacgccatgcgggtgtggtccaacatccctggactgaaaagcaagcacgcacctctgacccctaaagaagaggagtacctgcaggcccaggtgcggagcagaagcaagctggacgcccctaaggtggatctgctggtgaagaattgcctcctgcccctgagagagtacttcaagtatttcagccagaatagtctgcccctgggcggcccaagcagcggcgcccctcctcccagcggcggcagcccagccggctccccaacctctaccgaggagggcacctctgagtccgccacccccgagagcggccctggcacctccaccgagcccagcgagggcagcgcacccggcagccctgccggcagccccacctccacagaggagggaaccagcaccgagcccagcgaaggcagcgccccaggcaccagcaccgagcctagtgagggcggctctggcggcggcagcgcccaggagattaaacggatcaacaagatcagaagaagacttgtgaaagacagcaacaccaagaaggccggcaagacaggccccatgaaaaccctgctggttagagtgatgacacccgatctgagagagcggctggaaaacctgagaaagaagcctgaaaatatcccccagcccatcagcaatacatctagagccaacctgaataagctgctgaccgattacaccgaaatgaagaaggcgatcctgcatgtgtactgggaagagttccagaaggaccctgtgggcctgatgagccgggtggcccagcctgccagcaagaagatcgatcagaacaagctgaaacctgagatggacgagaagggcaacctgaccaccgccggctttgcctgctctcagtgtggccagcccctgttcgtgtacaagctggagcaggtgtctgagaagggcaaggcttacaccaactacttcggacggtgcaatgtggccgagcacgaaaagctgatcctgctggcccagctgaagcccgagaaggatagcgacgaagccgtgacatatagcctgggaaagtttgggcagagggccctggatttctacagcattcatgtgaccaaggagtccacccaccccgtgaagcccctggcccagatcgccggaaacagatacgcctccggacctgtgggaaaggccctgagcgacgcatgtatgggcacaatcgcctccttcctgtctaagtaccaggacatcatcatcgaacaccagaaggtggtgaagggcaaccagaagagactggagagcctgcgggagctggccggcaaggaaaacctggaataccctagcgtgaccctgccacctcagcctcacaccaaggagggcgttgatgcctacaacgaagtgatcgcccgggtgcgaatgtgggtgaacctgaacctgtggcagaagctgaagctaagcagagatgatgccaagcctctgctgagactgaagggattcccttcctttcctctggtcgagagacaggccaacgaagtggactggtgggacatggtgtgtaacgtgaagaagctgatcaacgagaaaaaggaggatggcaaggtgttttggcagaatctggctggctacaagagacaggaagccctgagaccatacctgagcagcgaggaagatcggaagaagggaaagaaattcgctcggtaccagctgggcgacctgctgctgcacctggaaaagaagcacggcgaggactggggaaaggtgtacgacgaggcctgggagcggattgacaagaaagtggaaggcctgagcaagcacatcaagctggaagaggaacggagaagcgaggacgcccagagcaaggccgccctgaccgactggctgcgggctaaggccagcttcgtgatcgagggcctgaaggaggccgacaaggacgagttctgcagatgcgagctgaagctgcagaagtggtacggggacctgcggggaaagcccttcgccatcgaagccgagaacagcatcctggacatcagcggcttcagcaagcagtacaactgtgccttcatctggcagaaggacggcgtgaagaagctgaacctgtacctgatcatcaactacttcaagggcggcaagctgcggttcaagaagatcaaacctgaagccttcgaagccaacagattctacaccgtgatcaacaaaaagagcggcgagatcgtgcccatggaggtgaacttcaacttcgacgaccccaacctgatcatcctgcctctggcctttggcaagagacagggcagagaattcatctggaacgacctgctgtccctggaaaccggcagcctgaagctggccaacggaagagtgatcgagaagacactgtacaacagaagaacccggcaggatgagcctgccctgttcgtggccctgaccttcgagcggcgggaggtcctggactcctccaatatcaaaccaatgaacctgatcggcgtggcaagaggcgaaaacatccccgccgtgatcgccctgaccgaccccgagggctgcccactgagccggtttaaggatagcctgggaaacccaacccacatcctgagaatcggcgagagctataaggagaagcagcggaccatccaggccaagaaggaggtggagcagcggagagccggcggctacagccggaagtacgccagcaaagccaagaatctggcagacgatatggtgagaaacaccgctagagatctgctgtactacgccgtgacccaggatgccatgctgatcttcgccaacctgagccggggcttcggccggcagggcaagcggaccttcatggccgagagacagtacacacggatggaggactggctgaccgccaagctggcctacgagggcctgagcaagacctacctgtccaagacactggcccagtacacctccaagacatgcagcaactgtgggtttaccatcaccagcgccgactacgacagggtgctggagaagctgaagaagacagcaacaggctggatgaccacaattaacggcaaggagctgaaggtggagggccagattacctactacaacagatacaagagacagaacgtagtcaaggacctgtccgtcgagctggatagactgagcgaagaatctgtgaacaacgacatctcctcctggacaaagggcagaagcggagaagctctgagcctcctgaagaaaagattctcccatagacccgtgcaggagaagttcgtgtgcctgaactgcggcttcgagacacacgcagccgagcaagccgccctgaacatcgccagatcctggctgttcctgcggagccaggagtacaagaaataccagacaaacaagacaaccggcaacaccgataagagagccttcgtcgagacctggcagtccttttaccggaagaagcttaaggaggtgtggaaacctgccgtgcggtctggcggatctggcggaggctccacaagcatgatcaacgcccaggagctgctgaccctggaggacgtgaccgtggagttcacctgggaggagtggcagctgctggaccccttccagaaggacctgtacagggacgtgaccctggagatctacagcaacctggtgagcatgggctaccaggtgagcaagcccgacgccctgagcaagctggagcagggcgaggagccctggaccatggaggacgagaggcacagcaggatctgccccggcaccaccagccccaagaaaaagagaaaagtctaagctgccttctgcggggcttgccttctggccatgcccttcttctctcccttgcacctgtacctcttggtctttgaataaagcctgagtaggaaggctagcaaaaaaaaaaaaaaaaaaaaaaaaaaaaaaaaaaaaaaaaaaaaaaaaaaaaaaaaaaaaaaaaaaaaaaaaaaaaaaaa

SEQ ID NO: 7004 - RNA, 5797 nt, synthetic construct
  source 1..5797: mol_type = other RNA
aggaaataagagagaaaagaagagtaagaagaaatataagagccaccatggcccctaagaagaagcgtaaagtgagccggatggaacgcctcgtctacgaggtgcggcagaagtgcagaaacatcgaggacatctgcatctcctgcggatctctgaacgtgaccctggagcacccactgttcatcggcggcatgtgccagaactgtaaaaactgttttctggagtgtgcctatcaatacgacgatgacggctaccagagctactgcaccatctgttgcggcggaagagaggtgctgatgtgtggaaataacaactgctgccggtgcttctgcgtggaatgcgtggacctgctggtgggccccggcgccgcccaggccgctattaaggaagatccttggaactgctacatgtgcggccacaagggcacatacggcctgctgagacggagagaggactggcctagcagactgcagatgttcttcgccaataaccacgaccaggagttcgacccccctaaggtgtaccctcccgtccccgccgagaagagaaagcccatccgggtcctgagcctgttcgatggcatcgccaccggtctgctggtgctgaaggacctgggcatccaggtggataggtacattgcctccgaggtgtgcgaggactccatcaccgtgggaatggtgcgtcatcagggcaagatcatgtacgtgggcgacgtgcggagcgtgacacagaagcatatccaggagtggggccctttcgacctggtgatcggcggcagcccttgcaatgacctgagcatcgtgaacccagcccggaagggcctgtacgagggaaccggcagactgttcttcgagttttacagactgctgcacgacgcccggcctaaggaaggcgacgaccggcccttcttttggctgttcgagaatgtggtggccatgggagtcagcgacaagcgggatattagccggttcctggagagcaaccccgtgatgatcgatgccaaggaagtgagcgccgcccaccgggccagatacttctggggcaatctgcctggcatgaacagacccctggccagcaccgtgaacgacaagctggagctgcaggagtgcctggagcacggccggatcgccaagttcagcaaggtgagaaccatcaccacccgaagcaacagcatcaaacaaggcaaggaccagcactttcctgtgttcatgaacgagaaggaggacatcctgtggtgtaccgagatggagagagtgttcgggttcccagtccactacacagatgtcagcaacatgtctagactggccagacagagactgctgggaagaagctggtccgtccctgtgatcagacacctgttcgcccctctgaaggagtacttcgcctgcgtgagcagcggcaacagcaacgccaacagccggggccccagcttctctagcggcctggtgccactgtccctgagagggagccacatgggccccatggagatctacaaaaccgtgagcgcctggaagcggcagcctgtgcgcgtgctgagcctgtttcggaatatcgataaagtcctgaaaagcctgggattcctggagagcggctctggctccggcggtggcaccctgaagtacgtggaggatgtgacaaacgtggtcagacgggatgtggagaagtggggccccttcgatctggtgtacggcagcacccaacccctgggcagctcttgtgaccggtgccctggctggtacatgtttcagttccaccggatcctgcagtacgccctgccgagacaggagtcccagcggccattcttttggattttcatggacaacttgctgctgaccgaggatgaccaggaaactaccactcggttcctgcagaccgaagccgtgaccctgcaggacgtgagaggccgggactaccagaacgccatgcgggtgtggtccaacatccctggactgaaaagcaagcacgcacctctgacccctaaagaagaggagtacctgcaggcccaggtgcggagcagaagcaagctggacgcccctaaggtggatctgctggtgaagaattgcctcctgcccctgagagagtacttcaagtatttcagccagaatagtctgcccctgggcggcccaagcagcggcgcccctcctcccagcggcggcagcccagccggctccccaacctctaccgaggagggcacctctgagtccgccacccccgagagcggccctggcacctccaccgagcccagcgagggcagcgcacccggcagccctgccggcagccccacctccacagaggagggaaccagcaccgagcccagcgaaggcagcgccccaggcaccagcaccgagcctagtgagggcggctctggcggcggcagcgcccaggagattaaacggatcaacaagatcagaagaagacttgtgaaagacagcaacaccaagaaggccggcaagacaggccccatgaaaaccctgctggttagagtgatgacacccgatctgagagagcggctggaaaacctgagaaagaagcctgaaaatatcccccagcccatcagcaatacatctagagccaacctgaataagctgctgaccgattacaccgaaatgaagaaggcgatcctgcatgtgtactgggaagagttccagaaggaccctgtgggcctgatgagccgggtggcccagcctgccagcaagaagatcgatcagaacaagctgaaacctgagatggacgagaagggcaacctgaccaccgccggctttgcctgctctcagtgtggccagcccctgttcgtgtacaagctggagcaggtgtctgagaagggcaaggcttacaccaactacttcggacggtgcaatgtggccgagcacgaaaagctgatcctgctggcccagctgaagcccgagaaggatagcgacgaagccgtgacatatagcctgggaaagtttgggcagagggccctggatttctacagcattcatgtgaccaaggagtccacccaccccgtgaagcccctggcccagatcgccggaaacagatacgcctccggacctgtgggaaaggccctgagcgacgcatgtatgggcacaatcgcctccttcctgtctaagtaccaggacatcatcatcgaacaccagaaggtggtgaagggcaaccagaagagactggagagcctgcgggagctggccggcaaggaaaacctggaataccctagcgtgaccctgccacctcagcctcacaccaaggagggcgttgatgcctacaacgaagtgatcgcccgggtgcgaatgtgggtgaacctgaacctgtggcagaagctgaagctaagcagagatgatgccaagcctctgctgagactgaagggattcccttcctttcctctggtcgagagacaggccaacgaagtggactggtgggacatggtgtgtaacgtgaagaagctgatcaacgagaaaaaggaggatggcaaggtgttttggcagaatctggctggctacaagagacaggaagccctgagaccatacctgagcagcgaggaagatcggaagaagggaaagaaattcgctcggtaccagctgggcgacctgctgctgcacctggaaaagaagcacggcgaggactggggaaaggtgtacgacgaggcctgggagcggattgacaagaaagtggaaggcctgagcaagcacatcaagctggaagaggaacggagaagcgaggacgcccagagcaaggccgccctgaccgactggctgcgggctaaggccagcttcgtgatcgagggcctgaaggaggccgacaaggacgagttctgcagatgcgagctgaagctgcagaagtggtacggggacctgcggggaaagcccttcgccatcgaagccgagaacagcatcctggacatcagcggcttcagcaagcagtacaactgtgccttcatctggcagaaggacggcgtgaagaagctgaacctgtacctgatcatcaactacttcaagggcggcaagctgcggttcaagaagatcaaacctgaagccttcgaagccaacagattctacaccgtgatcaacaaaaagagcggcgagatcgtgcccatggaggtgaacttcaacttcgacgaccccaacctgatcatcctgcctctggcctttggcaagagacagggcagagaattcatctggaacgacctgctgtccctggaaaccggcagcctgaagctggccaacggaagagtgatcgagaagacactgtacaacagaagaacccggcaggatgagcctgccctgttcgtggccctgaccttcgagcggcgggaggtcctggactcctccaatatcaaaccaatgaacctgatcggcgtggcaagaggcgaaaacatccccgccgtgatcgccctgaccgaccccgagggctgcccactgagccggtttaaggatagcctgggaaacccaacccacatcctgagaatcggcgagagctataaggagaagcagcggaccatccaggccaagaaggaggtggagcagcggagagccggcggctacagccggaagtacgccagcaaagccaagaatctggcagacgatatggtgagaaacaccgctagagatctgctgtactacgccgtgacccaggatgccatgctgatcttcgccaacctgagccggggcttcggccggcagggcaagcggaccttcatggccgagagacagtacacacggatggaggactggctgaccgccaagctggcctacgagggcctgagcaagacctacctgtccaagacactggcccagtacacctccaagacatgcagcaactgtgggtttaccatcaccagcgccgactacgacagggtgctggagaagctgaagaagacagcaacaggctggatgaccacaattaacggcaaggagctgaaggtggagggccagattacctactacaacagatacaagagacagaacgtagtcaaggacctgtccgtcgagctggatagactgagcgaagaatctgtgaacaacgacatctcctcctggacaaagggcagaagcggagaagctctgagcctcctgaagaaaagattctcccatagacccgtgcaggagaagttcgtgtgcctgaactgcggcttcgagacacacgcagccgagcaagccgccctgaacatcgccagatcctggctgttcctgcggagccaggagtacaagaaataccagacaaacaagacaaccggcaacaccgataagagagccttcgtcgagacctggcagtccttttaccggaagaagcttaaggaggtgtggaaacctgccgtgcggtctggcggatctggcggaggctccacaagcccccagggcctggtgaccttcagggacgtggccgtggacttcaccagggaggagtggaggctgctgagccccaggcagaaggagctgtacaaggaggtgatgctggagaacgccggcaacctgctgagcctgggcctgcccgtgcccagggaggacgtgatcagctacttcgagcagaaggacgtgccctggatgctggagcagaaggccctgaggagcttctgccccggcggccccgtgaagaccagccccaagaaaaagagaaaagtctaagctgccttctgcggggcttgccttctggccatgcccttcttctctcccttgcacctgtacctcttggtctttgaataaagcctgagtaggaaggctagcaaaaaaaaaaaaaaaaaaaaaaaaaaaaaaaaaaaaaaaaaaaaaaaaaaaaaaaaaaaaaaaaaaaaaaaaaaaaaaaa

SEQ ID NO: 7005 - RNA, 5797 nt, synthetic construct
  source 1..5797: mol_type = other RNA
aggaaataagagagaaaagaagagtaagaagaaatataagagccaccatggcccctaagaagaagcgtaaagtgagccggatggaacgcctcgtctacgaggtgcggcagaagtgcagaaacatcgaggacatctgcatctcctgcggatctctgaacgtgaccctggagcacccactgttcatcggcggcatgtgccagaactgtaaaaactgttttctggagtgtgcctatcaatacgacgatgacggctaccagagctactgcaccatctgttgcggcggaagagaggtgctgatgtgtggaaataacaactgctgccggtgcttctgcgtggaatgcgtggacctgctggtgggccccggcgccgcccaggccgctattaaggaagatccttggaactgctacatgtgcggccacaagggcacatacggcctgctgagacggagagaggactggcctagcagactgcagatgttcttcgccaataaccacgaccaggagttcgacccccctaaggtgtaccctcccgtccccgccgagaagagaaagcccatccgggtcctgagcctgttcgatggcatcgccaccggtctgctggtgctgaaggacctgggcatccaggtggataggtacattgcctccgaggtgtgcgaggactccatcaccgtgggaatggtgcgtcatcagggcaagatcatgtacgtgggcgacgtgcggagcgtgacacagaagcatatccaggagtggggccctttcgacctggtgatcggcggcagcccttgcaatgacctgagcatcgtgaacccagcccggaagggcctgtacgagggaaccggcagactgttcttcgagttttacagactgctgcacgacgcccggcctaaggaaggcgacgaccggcccttcttttggctgttcgagaatgtggtggccatgggagtcagcgacaagcgggatattagccggttcctggagagcaaccccgtgatgatcgatgccaaggaagtgagcgccgcccaccgggccagatacttctggggcaatctgcctggcatgaacagacccctggccagcaccgtgaacgacaagctggagctgcaggagtgcctggagcacggccggatcgccaagttcagcaaggtgagaaccatcaccacccgaagcaacagcatcaaacaaggcaaggaccagcactttcctgtgttcatgaacgagaaggaggacatcctgtggtgtaccgagatggagagagtgttcgggttcccagtccactacacagatgtcagcaacatgtctagactggccagacagagactgctgggaagaagctggtccgtccctgtgatcagacacctgttcgcccctctgaaggagtacttcgcctgcgtgagcagcggcaacagcaacgccaacagccggggccccagcttctctagcggcctggtgccactgtccctgagagggagccacatgggccccatggagatctacaaaaccgtgagcgcctggaagcggcagcctgtgcgcgtgctgagcctgtttcggaatatcgataaagtcctgaaaagcctgggattcctggagagcggctctggctccggcggtggcaccctgaagtacgtggaggatgtgacaaacgtggtcagacgggatgtggagaagtggggccccttcgatctggtgtacggcagcacccaacccctgggcagctcttgtgaccggtgccctggctggtacatgtttcagttccaccggatcctgcagtacgccctgccgagacaggagtcccagcggccattcttttggattttcatggacaacttgctgctgaccgaggatgaccaggaaactaccactcggttcctgcagaccgaagccgtgaccctgcaggacgtgagaggccgggactaccagaacgccatgcgggtgtggtccaacatccctggactgaaaagcaagcacgcacctctgacccctaaagaagaggagtacctgcaggcccaggtgcggagcagaagcaagctggacgcccctaaggtggatctgctggtgaagaattgcctcctgcccctgagagagtacttcaagtatttcagccagaatagtctgcccctgggcggcccaagcagcggcgcccctcctcccagcggcggcagcccagccggctccccaacctctaccgaggagggcacctctgagtccgccacccccgagagcggccctggcacctccaccgagcccagcgagggcagcgcacccggcagccctgccggcagccccacctccacagaggagggaaccagcaccgagcccagcgaaggcagcgccccaggcaccagcaccgagcctagtgagggcggctctggcggcggcagcgcccaggagattaaacggatcaacaagatcagaagaagacttgtgaaagacagcaacaccaagaaggccggcaagacaggccccatgaaaaccctgctggttagagtgatgacacccgatctgagagagcggctggaaaacctgagaaagaagcctgaaaatatcccccagcccatcagcaatacatctagagccaacctgaataagctgctgaccgattacaccgaaatgaagaaggcgatcctgcatgtgtactgggaagagttccagaaggaccctgtgggcctgatgagccgggtggcccagcctgccagcaagaagatcgatcagaacaagctgaaacctgagatggacgagaagggcaacctgaccaccgccggctttgcctgctctcagtgtggccagcccctgttcgtgtacaagctggagcaggtgtctgagaagggcaaggcttacaccaactacttcggacggtgcaatgtggccgagcacgaaaagctgatcctgctggcccagctgaagcccgagaaggatagcgacgaagccgtgacatatagcctgggaaagtttgggcagagggccctggatttctacagcattcatgtgaccaaggagtccacccaccccgtgaagcccctggcccagatcgccggaaacagatacgcctccggacctgtgggaaaggccctgagcgacgcatgtatgggcacaatcgcctccttcctgtctaagtaccaggacatcatcatcgaacaccagaaggtggtgaagggcaaccagaagagactggagagcctgcgggagctggccggcaaggaaaacctggaataccctagcgtgaccctgccacctcagcctcacaccaaggagggcgttgatgcctacaacgaagtgatcgcccgggtgcgaatgtgggtgaacctgaacctgtggcagaagctgaagctaagcagagatgatgccaagcctctgctgagactgaagggattcccttcctttcctctggtcgagagacaggccaacgaagtggactggtgggacatggtgtgtaacgtgaagaagctgatcaacgagaaaaaggaggatggcaaggtgttttggcagaatctggctggctacaagagacaggaagccctgagaccatacctgagcagcgaggaagatcggaagaagggaaagaaattcgctcggtaccagctgggcgacctgctgctgcacctggaaaagaagcacggcgaggactggggaaaggtgtacgacgaggcctgggagcggattgacaagaaagtggaaggcctgagcaagcacatcaagctggaagaggaacggagaagcgaggacgcccagagcaaggccgccctgaccgactggctgcgggctaaggccagcttcgtgatcgagggcctgaaggaggccgacaaggacgagttctgcagatgcgagctgaagctgcagaagtggtacggggacctgcggggaaagcccttcgccatcgaagccgagaacagcatcctggacatcagcggcttcagcaagcagtacaactgtgccttcatctggcagaaggacggcgtgaagaagctgaacctgtacctgatcatcaactacttcaagggcggcaagctgcggttcaagaagatcaaacctgaagccttcgaagccaacagattctacaccgtgatcaacaaaaagagcggcgagatcgtgcccatggaggtgaacttcaacttcgacgaccccaacctgatcatcctgcctctggcctttggcaagagacagggcagagaattcatctggaacgacctgctgtccctggaaaccggcagcctgaagctggccaacggaagagtgatcgagaagacactgtacaacagaagaacccggcaggatgagcctgccctgttcgtggccctgaccttcgagcggcgggaggtcctggactcctccaatatcaaaccaatgaacctgatcggcgtggcaagaggcgaaaacatccccgccgtgatcgccctgaccgaccccgagggctgcccactgagccggtttaaggatagcctgggaaacccaacccacatcctgagaatcggcgagagctataaggagaagcagcggaccatccaggccaagaaggaggtggagcagcggagagccggcggctacagccggaagtacgccagcaaagccaagaatctggcagacgatatggtgagaaacaccgctagagatctgctgtactacgccgtgacccaggatgccatgctgatcttcgccaacctgagccggggcttcggccggcagggcaagcggaccttcatggccgagagacagtacacacggatggaggactggctgaccgccaagctggcctacgagggcctgagcaagacctacctgtccaagacactggcccagtacacctccaagacatgcagcaactgtgggtttaccatcaccagcgccgactacgacagggtgctggagaagctgaagaagacagcaacaggctggatgaccacaattaacggcaaggagctgaaggtggagggccagattacctactacaacagatacaagagacagaacgtagtcaaggacctgtccgtcgagctggatagactgagcgaagaatctgtgaacaacgacatctcctcctggacaaagggcagaagcggagaagctctgagcctcctgaagaaaagattctcccatagacccgtgcaggagaagttcgtgtgcctgaactgcggcttcgagacacacgcagccgagcaagccgccctgaacatcgccagatcctggctgttcctgcggagccaggagtacaagaaataccagacaaacaagacaaccggcaacaccgataagagagccttcgtcgagacctggcagtccttttaccggaagaagcttaaggaggtgtggaaacctgccgtgcggtctggcggatctggcggaggctccacaagcatgttccagaccgcctggaggcaggagcccgtgaccttcgaggacgtggccgtgtacttcacccagaacgagtgggccagcctggacagcgtgcagagggccctgtacagggaggtgatgctggagaactacgccaacgtggccagcctggccttccccttcaccacccccgtgctggtgagccagctggagcagggcgagctgccctggggcctggacccctgggagcccatgggcagggagaccagccccaagaaaaagagaaaagtctaagctgccttctgcggggcttgccttctggccatgcccttcttctctcccttgcacctgtacctcttggtctttgaataaagcctgagtaggaaggctagcaaaaaaaaaaaaaaaaaaaaaaaaaaaaaaaaaaaaaaaaaaaaaaaaaaaaaaaaaaaaaaaaaaaaaaaaaaaaaaaa

SEQ ID NO: 7006 - RNA, 5797 nt, synthetic construct
  source 1..5797: mol_type = other RNA
aggaaataagagagaaaagaagagtaagaagaaatataagagccaccatggcccctaagaagaagcgtaaagtgagccggatggaacgcctcgtctacgaggtgcggcagaagtgcagaaacatcgaggacatctgcatctcctgcggatctctgaacgtgaccctggagcacccactgttcatcggcggcatgtgccagaactgtaaaaactgttttctggagtgtgcctatcaatacgacgatgacggctaccagagctactgcaccatctgttgcggcggaagagaggtgctgatgtgtggaaataacaactgctgccggtgcttctgcgtggaatgcgtggacctgctggtgggccccggcgccgcccaggccgctattaaggaagatccttggaactgctacatgtgcggccacaagggcacatacggcctgctgagacggagagaggactggcctagcagactgcagatgttcttcgccaataaccacgaccaggagttcgacccccctaaggtgtaccctcccgtccccgccgagaagagaaagcccatccgggtcctgagcctgttcgatggcatcgccaccggtctgctggtgctgaaggacctgggcatccaggtggataggtacattgcctccgaggtgtgcgaggactccatcaccgtgggaatggtgcgtcatcagggcaagatcatgtacgtgggcgacgtgcggagcgtgacacagaagcatatccaggagtggggccctttcgacctggtgatcggcggcagcccttgcaatgacctgagcatcgtgaacccagcccggaagggcctgtacgagggaaccggcagactgttcttcgagttttacagactgctgcacgacgcccggcctaaggaaggcgacgaccggcccttcttttggctgttcgagaatgtggtggccatgggagtcagcgacaagcgggatattagccggttcctggagagcaaccccgtgatgatcgatgccaaggaagtgagcgccgcccaccgggccagatacttctggggcaatctgcctggcatgaacagacccctggccagcaccgtgaacgacaagctggagctgcaggagtgcctggagcacggccggatcgccaagttcagcaaggtgagaaccatcaccacccgaagcaacagcatcaaacaaggcaaggaccagcactttcctgtgttcatgaacgagaaggaggacatcctgtggtgtaccgagatggagagagtgttcgggttcccagtccactacacagatgtcagcaacatgtctagactggccagacagagactgctgggaagaagctggtccgtccctgtgatcagacacctgttcgcccctctgaaggagtacttcgcctgcgtgagcagcggcaacagcaacgccaacagccggggccccagcttctctagcggcctggtgccactgtccctgagagggagccacatgggccccatggagatctacaaaaccgtgagcgcctggaagcggcagcctgtgcgcgtgctgagcctgtttcggaatatcgataaagtcctgaaaagcctgggattcctggagagcggctctggctccggcggtggcaccctgaagtacgtggaggatgtgacaaacgtggtcagacgggatgtggagaagtggggccccttcgatctggtgtacggcagcacccaacccctgggcagctcttgtgaccggtgccctggctggtacatgtttcagttccaccggatcctgcagtacgccctgccgagacaggagtcccagcggccattcttttggattttcatggacaacttgctgctgaccgaggatgaccaggaaactaccactcggttcctgcagaccgaagccgtgaccctgcaggacgtgagaggccgggactaccagaacgccatgcgggtgtggtccaacatccctggactgaaaagcaagcacgcacctctgacccctaaagaagaggagtacctgcaggcccaggtgcggagcagaagcaagctggacgcccctaaggtggatctgctggtgaagaattgcctcctgcccctgagagagtacttcaagtatttcagccagaatagtctgcccctgggcggcccaagcagcggcgcccctcctcccagcggcggcagcccagccggctccccaacctctaccgaggagggcacctctgagtccgccacccccgagagcggccctggcacctccaccgagcccagcgagggcagcgcacccggcagccctgccggcagccccacctccacagaggagggaaccagcaccgagcccagcgaaggcagcgccccaggcaccagcaccgagcctagtgagggcggctctggcggcggcagcgcccaggagattaaacggatcaacaagatcagaagaagacttgtgaaagacagcaacaccaagaaggccggcaagacaggccccatgaaaaccctgctggttagagtgatgacacccgatctgagagagcggctggaaaacctgagaaagaagcctgaaaatatcccccagcccatcagcaatacatctagagccaacctgaataagctgctgaccgattacaccgaaatgaagaaggcgatcctgcatgtgtactgggaagagttccagaaggaccctgtgggcctgatgagccgggtggcccagcctgccagcaagaagatcgatcagaacaagctgaaacctgagatggacgagaagggcaacctgaccaccgccggctttgcctgctctcagtgtggccagcccctgttcgtgtacaagctggagcaggtgtctgagaagggcaaggcttacaccaactacttcggacggtgcaatgtggccgagcacgaaaagctgatcctgctggcccagctgaagcccgagaaggatagcgacgaagccgtgacatatagcctgggaaagtttgggcagagggccctggatttctacagcattcatgtgaccaaggagtccacccaccccgtgaagcccctggcccagatcgccggaaacagatacgcctccggacctgtgggaaaggccctgagcgacgcatgtatgggcacaatcgcctccttcctgtctaagtaccaggacatcatcatcgaacaccagaaggtggtgaagggcaaccagaagagactggagagcctgcgggagctggccggcaaggaaaacctggaataccctagcgtgaccctgccacctcagcctcacaccaaggagggcgttgatgcctacaacgaagtgatcgcccgggtgcgaatgtgggtgaacctgaacctgtggcagaagctgaagctaagcagagatgatgccaagcctctgctgagactgaagggattcccttcctttcctctggtcgagagacaggccaacgaagtggactggtgggacatggtgtgtaacgtgaagaagctgatcaacgagaaaaaggaggatggcaaggtgttttggcagaatctggctggctacaagagacaggaagccctgagaccatacctgagcagcgaggaagatcggaagaagggaaagaaattcgctcggtaccagctgggcgacctgctgctgcacctggaaaagaagcacggcgaggactggggaaaggtgtacgacgaggcctgggagcggattgacaagaaagtggaaggcctgagcaagcacatcaagctggaagaggaacggagaagcgaggacgcccagagcaaggccgccctgaccgactggctgcgggctaaggccagcttcgtgatcgagggcctgaaggaggccgacaaggacgagttctgcagatgcgagctgaagctgcagaagtggtacggggacctgcggggaaagcccttcgccatcgaagccgagaacagcatcctggacatcagcggcttcagcaagcagtacaactgtgccttcatctggcagaaggacggcgtgaagaagctgaacctgtacctgatcatcaactacttcaagggcggcaagctgcggttcaagaagatcaaacctgaagccttcgaagccaacagattctacaccgtgatcaacaaaaagagcggcgagatcgtgcccatggaggtgaacttcaacttcgacgaccccaacctgatcatcctgcctctggcctttggcaagagacagggcagagaattcatctggaacgacctgctgtccctggaaaccggcagcctgaagctggccaacggaagagtgatcgagaagacactgtacaacagaagaacccggcaggatgagcctgccctgttcgtggccctgaccttcgagcggcgggaggtcctggactcctccaatatcaaaccaatgaacctgatcggcgtggcaagaggcgaaaacatccccgccgtgatcgccctgaccgaccccgagggctgcccactgagccggtttaaggatagcctgggaaacccaacccacatcctgagaatcggcgagagctataaggagaagcagcggaccatccaggccaagaaggaggtggagcagcggagagccggcggctacagccggaagtacgccagcaaagccaagaatctggcagacgatatggtgagaaacaccgctagagatctgctgtactacgccgtgacccaggatgccatgctgatcttcgccaacctgagccggggcttcggccggcagggcaagcggaccttcatggccgagagacagtacacacggatggaggactggctgaccgccaagctggcctacgagggcctgagcaagacctacctgtccaagacactggcccagtacacctccaagacatgcagcaactgtgggtttaccatcaccagcgccgactacgacagggtgctggagaagctgaagaagacagcaacaggctggatgaccacaattaacggcaaggagctgaaggtggagggccagattacctactacaacagatacaagagacagaacgtagtcaaggacctgtccgtcgagctggatagactgagcgaagaatctgtgaacaacgacatctcctcctggacaaagggcagaagcggagaagctctgagcctcctgaagaaaagattctcccatagacccgtgcaggagaagttcgtgtgcctgaactgcggcttcgagacacacgcagccgagcaagccgccctgaacatcgccagatcctggctgttcctgcggagccaggagtacaagaaataccagacaaacaagacaaccggcaacaccgataagagagccttcgtcgagacctggcagtccttttaccggaagaagcttaaggaggtgtggaaacctgccgtgcggtctggcggatctggcggaggctccacaagcatgttccaggtgaccttcagcgacgtggccatcgacttcagccacgaggagtggggctggctggacagcgcccagagggacctgtacaaggacgtgatggtgcagaactacgagaacctggtgagcctgggcctgagcatccccaagcccaacgtgatcgccctgctggaggagggcaaggacccctggatggtggagaggaagctgagcaccgactgggacagcaggtgggagaacaaggagaccagccccaagaaaaagagaaaagtctaagctgccttctgcggggcttgccttctggccatgcccttcttctctcccttgcacctgtacctcttggtctttgaataaagcctgagtaggaaggctagcaaaaaaaaaaaaaaaaaaaaaaaaaaaaaaaaaaaaaaaaaaaaaaaaaaaaaaaaaaaaaaaaaaaaaaaaaaaaaaaa

SEQ ID NO: 7007 - RNA, 5797 nt, synthetic construct
  source 1..5797: mol_type = other RNA
aggaaataagagagaaaagaagagtaagaagaaatataagagccaccatggcccctaagaagaagcgtaaagtgagccggatggaacgcctcgtctacgaggtgcggcagaagtgcagaaacatcgaggacatctgcatctcctgcggatctctgaacgtgaccctggagcacccactgttcatcggcggcatgtgccagaactgtaaaaactgttttctggagtgtgcctatcaatacgacgatgacggctaccagagctactgcaccatctgttgcggcggaagagaggtgctgatgtgtggaaataacaactgctgccggtgcttctgcgtggaatgcgtggacctgctggtgggccccggcgccgcccaggccgctattaaggaagatccttggaactgctacatgtgcggccacaagggcacatacggcctgctgagacggagagaggactggcctagcagactgcagatgttcttcgccaataaccacgaccaggagttcgacccccctaaggtgtaccctcccgtccccgccgagaagagaaagcccatccgggtcctgagcctgttcgatggcatcgccaccggtctgctggtgctgaaggacctgggcatccaggtggataggtacattgcctccgaggtgtgcgaggactccatcaccgtgggaatggtgcgtcatcagggcaagatcatgtacgtgggcgacgtgcggagcgtgacacagaagcatatccaggagtggggccctttcgacctggtgatcggcggcagcccttgcaatgacctgagcatcgtgaacccagcccggaagggcctgtacgagggaaccggcagactgttcttcgagttttacagactgctgcacgacgcccggcctaaggaaggcgacgaccggcccttcttttggctgttcgagaatgtggtggccatgggagtcagcgacaagcgggatattagccggttcctggagagcaaccccgtgatgatcgatgccaaggaagtgagcgccgcccaccgggccagatacttctggggcaatctgcctggcatgaacagacccctggccagcaccgtgaacgacaagctggagctgcaggagtgcctggagcacggccggatcgccaagttcagcaaggtgagaaccatcaccacccgaagcaacagcatcaaacaaggcaaggaccagcactttcctgtgttcatgaacgagaaggaggacatcctgtggtgtaccgagatggagagagtgttcgggttcccagtccactacacagatgtcagcaacatgtctagactggccagacagagactgctgggaagaagctggtccgtccctgtgatcagacacctgttcgcccctctgaaggagtacttcgcctgcgtgagcagcggcaacagcaacgccaacagccggggccccagcttctctagcggcctggtgccactgtccctgagagggagccacatgggccccatggagatctacaaaaccgtgagcgcctggaagcggcagcctgtgcgcgtgctgagcctgtttcggaatatcgataaagtcctgaaaagcctgggattcctggagagcggctctggctccggcggtggcaccctgaagtacgtggaggatgtgacaaacgtggtcagacgggatgtggagaagtggggccccttcgatctggtgtacggcagcacccaacccctgggcagctcttgtgaccggtgccctggctggtacatgtttcagttccaccggatcctgcagtacgccctgccgagacaggagtcccagcggccattcttttggattttcatggacaacttgctgctgaccgaggatgaccaggaaactaccactcggttcctgcagaccgaagccgtgaccctgcaggacgtgagaggccgggactaccagaacgccatgcgggtgtggtccaacatccctggactgaaaagcaagcacgcacctctgacccctaaagaagaggagtacctgcaggcccaggtgcggagcagaagcaagctggacgcccctaaggtggatctgctggtgaagaattgcctcctgcccctgagagagtacttcaagtatttcagccagaatagtctgcccctgggcggcccaagcagcggcgcccctcctcccagcggcggcagcccagccggctccccaacctctaccgaggagggcacctctgagtccgccacccccgagagcggccctggcacctccaccgagcccagcgagggcagcgcacccggcagccctgccggcagccccacctccacagaggagggaaccagcaccgagcccagcgaaggcagcgccccaggcaccagcaccgagcctagtgagggcggctctggcggcggcagcgcccaggagattaaacggatcaacaagatcagaagaagacttgtgaaagacagcaacaccaagaaggccggcaagacaggccccatgaaaaccctgctggttagagtgatgacacccgatctgagagagcggctggaaaacctgagaaagaagcctgaaaatatcccccagcccatcagcaatacatctagagccaacctgaataagctgctgaccgattacaccgaaatgaagaaggcgatcctgcatgtgtactgggaagagttccagaaggaccctgtgggcctgatgagccgggtggcccagcctgccagcaagaagatcgatcagaacaagctgaaacctgagatggacgagaagggcaacctgaccaccgccggctttgcctgctctcagtgtggccagcccctgttcgtgtacaagctggagcaggtgtctgagaagggcaaggcttacaccaactacttcggacggtgcaatgtggccgagcacgaaaagctgatcctgctggcccagctgaagcccgagaaggatagcgacgaagccgtgacatatagcctgggaaagtttgggcagagggccctggatttctacagcattcatgtgaccaaggagtccacccaccccgtgaagcccctggcccagatcgccggaaacagatacgcctccggacctgtgggaaaggccctgagcgacgcatgtatgggcacaatcgcctccttcctgtctaagtaccaggacatcatcatcgaacaccagaaggtggtgaagggcaaccagaagagactggagagcctgcgggagctggccggcaaggaaaacctggaataccctagcgtgaccctgccacctcagcctcacaccaaggagggcgttgatgcctacaacgaagtgatcgcccgggtgcgaatgtgggtgaacctgaacctgtggcagaagctgaagctaagcagagatgatgccaagcctctgctgagactgaagggattcccttcctttcctctggtcgagagacaggccaacgaagtggactggtgggacatggtgtgtaacgtgaagaagctgatcaacgagaaaaaggaggatggcaaggtgttttggcagaatctggctggctacaagagacaggaagccctgagaccatacctgagcagcgaggaagatcggaagaagggaaagaaattcgctcggtaccagctgggcgacctgctgctgcacctggaaaagaagcacggcgaggactggggaaaggtgtacgacgaggcctgggagcggattgacaagaaagtggaaggcctgagcaagcacatcaagctggaagaggaacggagaagcgaggacgcccagagcaaggccgccctgaccgactggctgcgggctaaggccagcttcgtgatcgagggcctgaaggaggccgacaaggacgagttctgcagatgcgagctgaagctgcagaagtggtacggggacctgcggggaaagcccttcgccatcgaagccgagaacagcatcctggacatcagcggcttcagcaagcagtacaactgtgccttcatctggcagaaggacggcgtgaagaagctgaacctgtacctgatcatcaactacttcaagggcggcaagctgcggttcaagaagatcaaacctgaagccttcgaagccaacagattctacaccgtgatcaacaaaaagagcggcgagatcgtgcccatggaggtgaacttcaacttcgacgaccccaacctgatcatcctgcctctggcctttggcaagagacagggcagagaattcatctggaacgacctgctgtccctggaaaccggcagcctgaagctggccaacggaagagtgatcgagaagacactgtacaacagaagaacccggcaggatgagcctgccctgttcgtggccctgaccttcgagcggcgggaggtcctggactcctccaatatcaaaccaatgaacctgatcggcgtggcaagaggcgaaaacatccccgccgtgatcgccctgaccgaccccgagggctgcccactgagccggtttaaggatagcctgggaaacccaacccacatcctgagaatcggcgagagctataaggagaagcagcggaccatccaggccaagaaggaggtggagcagcggagagccggcggctacagccggaagtacgccagcaaagccaagaatctggcagacgatatggtgagaaacaccgctagagatctgctgtactacgccgtgacccaggatgccatgctgatcttcgccaacctgagccggggcttcggccggcagggcaagcggaccttcatggccgagagacagtacacacggatggaggactggctgaccgccaagctggcctacgagggcctgagcaagacctacctgtccaagacactggcccagtacacctccaagacatgcagcaactgtgggtttaccatcaccagcgccgactacgacagggtgctggagaagctgaagaagacagcaacaggctggatgaccacaattaacggcaaggagctgaaggtggagggccagattacctactacaacagatacaagagacagaacgtagtcaaggacctgtccgtcgagctggatagactgagcgaagaatctgtgaacaacgacatctcctcctggacaaagggcagaagcggagaagctctgagcctcctgaagaaaagattctcccatagacccgtgcaggagaagttcgtgtgcctgaactgcggcttcgagacacacgcagccgagcaagccgccctgaacatcgccagatcctggctgttcctgcggagccaggagtacaagaaataccagacaaacaagacaaccggcaacaccgataagagagccttcgtcgagacctggcagtccttttaccggaagaagcttaaggaggtgtggaaacctgccgtgcggtctggcggatctggcggaggctccacaagcatgatcaccgcccagggccccgtgagcttcagggacgtgaccgtgggcttcacccaggaggagtggcagcacctggaccccgcccagaggaccctgtacagggacgtgatgatcgagaactacagccacctggtgagcgtgggctactgcatccccaagcccgaggtgatcctgaagctggagaagggcgaggagccctggatcagcgaggagaagttccccagccagagccacctggagctgaccagccccaagaaaaagagaaaagtctaagctgccttctgcggggcttgccttctggccatgcccttcttctctcccttgcacctgtacctcttggtctttgaataaagcctgagtaggaaggctagcaaaaaaaaaaaaaaaaaaaaaaaaaaaaaaaaaaaaaaaaaaaaaaaaaaaaaaaaaaaaaaaaaaaaaaaaaaaaaaaa

SEQ ID NO: 7008 - RNA, 5797 nt, synthetic construct
  source 1..5797: mol_type = other RNA
aggaaataagagagaaaagaagagtaagaagaaatataagagccaccatggcccctaagaagaagcgtaaagtgagccggatggaacgcctcgtctacgaggtgcggcagaagtgcagaaacatcgaggacatctgcatctcctgcggatctctgaacgtgaccctggagcacccactgttcatcggcggcatgtgccagaactgtaaaaactgttttctggagtgtgcctatcaatacgacgatgacggctaccagagctactgcaccatctgttgcggcggaagagaggtgctgatgtgtggaaataacaactgctgccggtgcttctgcgtggaatgcgtggacctgctggtgggccccggcgccgcccaggccgctattaaggaagatccttggaactgctacatgtgcggccacaagggcacatacggcctgctgagacggagagaggactggcctagcagactgcagatgttcttcgccaataaccacgaccaggagttcgacccccctaaggtgtaccctcccgtccccgccgagaagagaaagcccatccgggtcctgagcctgttcgatggcatcgccaccggtctgctggtgctgaaggacctgggcatccaggtggataggtacattgcctccgaggtgtgcgaggactccatcaccgtgggaatggtgcgtcatcagggcaagatcatgtacgtgggcgacgtgcggagcgtgacacagaagcatatccaggagtggggccctttcgacctggtgatcggcggcagcccttgcaatgacctgagcatcgtgaacccagcccggaagggcctgtacgagggaaccggcagactgttcttcgagttttacagactgctgcacgacgcccggcctaaggaaggcgacgaccggcccttcttttggctgttcgagaatgtggtggccatgggagtcagcgacaagcgggatattagccggttcctggagagcaaccccgtgatgatcgatgccaaggaagtgagcgccgcccaccgggccagatacttctggggcaatctgcctggcatgaacagacccctggccagcaccgtgaacgacaagctggagctgcaggagtgcctggagcacggccggatcgccaagttcagcaaggtgagaaccatcaccacccgaagcaacagcatcaaacaaggcaaggaccagcactttcctgtgttcatgaacgagaaggaggacatcctgtggtgtaccgagatggagagagtgttcgggttcccagtccactacacagatgtcagcaacatgtctagactggccagacagagactgctgggaagaagctggtccgtccctgtgatcagacacctgttcgcccctctgaaggagtacttcgcctgcgtgagcagcggcaacagcaacgccaacagccggggccccagcttctctagcggcctggtgccactgtccctgagagggagccacatgggccccatggagatctacaaaaccgtgagcgcctggaagcggcagcctgtgcgcgtgctgagcctgtttcggaatatcgataaagtcctgaaaagcctgggattcctggagagcggctctggctccggcggtggcaccctgaagtacgtggaggatgtgacaaacgtggtcagacgggatgtggagaagtggggccccttcgatctggtgtacggcagcacccaacccctgggcagctcttgtgaccggtgccctggctggtacatgtttcagttccaccggatcctgcagtacgccctgccgagacaggagtcccagcggccattcttttggattttcatggacaacttgctgctgaccgaggatgaccaggaaactaccactcggttcctgcagaccgaagccgtgaccctgcaggacgtgagaggccgggactaccagaacgccatgcgggtgtggtccaacatccctggactgaaaagcaagcacgcacctctgacccctaaagaagaggagtacctgcaggcccaggtgcggagcagaagcaagctggacgcccctaaggtggatctgctggtgaagaattgcctcctgcccctgagagagtacttcaagtatttcagccagaatagtctgcccctgggcggcccaagcagcggcgcccctcctcccagcggcggcagcccagccggctccccaacctctaccgaggagggcacctctgagtccgccacccccgagagcggccctggcacctccaccgagcccagcgagggcagcgcacccggcagccctgccggcagccccacctccacagaggagggaaccagcaccgagcccagcgaaggcagcgccccaggcaccagcaccgagcctagtgagggcggctctggcggcggcagcgcccaggagattaaacggatcaacaagatcagaagaagacttgtgaaagacagcaacaccaagaaggccggcaagacaggccccatgaaaaccctgctggttagagtgatgacacccgatctgagagagcggctggaaaacctgagaaagaagcctgaaaatatcccccagcccatcagcaatacatctagagccaacctgaataagctgctgaccgattacaccgaaatgaagaaggcgatcctgcatgtgtactgggaagagttccagaaggaccctgtgggcctgatgagccgggtggcccagcctgccagcaagaagatcgatcagaacaagctgaaacctgagatggacgagaagggcaacctgaccaccgccggctttgcctgctctcagtgtggccagcccctgttcgtgtacaagctggagcaggtgtctgagaagggcaaggcttacaccaactacttcggacggtgcaatgtggccgagcacgaaaagctgatcctgctggcccagctgaagcccgagaaggatagcgacgaagccgtgacatatagcctgggaaagtttgggcagagggccctggatttctacagcattcatgtgaccaaggagtccacccaccccgtgaagcccctggcccagatcgccggaaacagatacgcctccggacctgtgggaaaggccctgagcgacgcatgtatgggcacaatcgcctccttcctgtctaagtaccaggacatcatcatcgaacaccagaaggtggtgaagggcaaccagaagagactggagagcctgcgggagctggccggcaaggaaaacctggaataccctagcgtgaccctgccacctcagcctcacaccaaggagggcgttgatgcctacaacgaagtgatcgcccgggtgcgaatgtgggtgaacctgaacctgtggcagaagctgaagctaagcagagatgatgccaagcctctgctgagactgaagggattcccttcctttcctctggtcgagagacaggccaacgaagtggactggtgggacatggtgtgtaacgtgaagaagctgatcaacgagaaaaaggaggatggcaaggtgttttggcagaatctggctggctacaagagacaggaagccctgagaccatacctgagcagcgaggaagatcggaagaagggaaagaaattcgctcggtaccagctgggcgacctgctgctgcacctggaaaagaagcacggcgaggactggggaaaggtgtacgacgaggcctgggagcggattgacaagaaagtggaaggcctgagcaagcacatcaagctggaagaggaacggagaagcgaggacgcccagagcaaggccgccctgaccgactggctgcgggctaaggccagcttcgtgatcgagggcctgaaggaggccgacaaggacgagttctgcagatgcgagctgaagctgcagaagtggtacggggacctgcggggaaagcccttcgccatcgaagccgagaacagcatcctggacatcagcggcttcagcaagcagtacaactgtgccttcatctggcagaaggacggcgtgaagaagctgaacctgtacctgatcatcaactacttcaagggcggcaagctgcggttcaagaagatcaaacctgaagccttcgaagccaacagattctacaccgtgatcaacaaaaagagcggcgagatcgtgcccatggaggtgaacttcaacttcgacgaccccaacctgatcatcctgcctctggcctttggcaagagacagggcagagaattcatctggaacgacctgctgtccctggaaaccggcagcctgaagctggccaacggaagagtgatcgagaagacactgtacaacagaagaacccggcaggatgagcctgccctgttcgtggccctgaccttcgagcggcgggaggtcctggactcctccaatatcaaaccaatgaacctgatcggcgtggcaagaggcgaaaacatccccgccgtgatcgccctgaccgaccccgagggctgcccactgagccggtttaaggatagcctgggaaacccaacccacatcctgagaatcggcgagagctataaggagaagcagcggaccatccaggccaagaaggaggtggagcagcggagagccggcggctacagccggaagtacgccagcaaagccaagaatctggcagacgatatggtgagaaacaccgctagagatctgctgtactacgccgtgacccaggatgccatgctgatcttcgccaacctgagccggggcttcggccggcagggcaagcggaccttcatggccgagagacagtacacacggatggaggactggctgaccgccaagctggcctacgagggcctgagcaagacctacctgtccaagacactggcccagtacacctccaagacatgcagcaactgtgggtttaccatcaccagcgccgactacgacagggtgctggagaagctgaagaagacagcaacaggctggatgaccacaattaacggcaaggagctgaaggtggagggccagattacctactacaacagatacaagagacagaacgtagtcaaggacctgtccgtcgagctggatagactgagcgaagaatctgtgaacaacgacatctcctcctggacaaagggcagaagcggagaagctctgagcctcctgaagaaaagattctcccatagacccgtgcaggagaagttcgtgtgcctgaactgcggcttcgagacacacgcagccgagcaagccgccctgaacatcgccagatcctggctgttcctgcggagccaggagtacaagaaataccagacaaacaagacaaccggcaacaccgataagagagccttcgtcgagacctggcagtccttttaccggaagaagcttaaggaggtgtggaaacctgccgtgcggtctggcggatctggcggaggctccacaagcccccaggacctgatgaccttcgaggacgtggccgtggagttcacctggtgggagtggggccagctggaccccgcccagaaggacctgtacagggaggtgatgctggagaacttcaagaacctggccagcctgggcttccccgtgagcaagccctacatgatctgccagctggaggagggcgaggagccctgcatcctggagagggagatcagcaccggcgtgcacagcgactgggagaggaggaccagccccaagaaaaagagaaaagtctaagctgccttctgcggggcttgccttctggccatgcccttcttctctcccttgcacctgtacctcttggtctttgaataaagcctgagtaggaaggctagcaaaaaaaaaaaaaaaaaaaaaaaaaaaaaaaaaaaaaaaaaaaaaaaaaaaaaaaaaaaaaaaaaaaaaaaaaaaaaaaa

SEQ ID NO: 7009 - RNA, 5797 nt, synthetic construct
  source 1..5797: mol_type = other RNA
aggaaataagagagaaaagaagagtaagaagaaatataagagccaccatggcccctaagaagaagcgtaaagtgagccggatggaacgcctcgtctacgaggtgcggcagaagtgcagaaacatcgaggacatctgcatctcctgcggatctctgaacgtgaccctggagcacccactgttcatcggcggcatgtgccagaactgtaaaaactgttttctggagtgtgcctatcaatacgacgatgacggctaccagagctactgcaccatctgttgcggcggaagagaggtgctgatgtgtggaaataacaactgctgccggtgcttctgcgtggaatgcgtggacctgctggtgggccccggcgccgcccaggccgctattaaggaagatccttggaactgctacatgtgcggccacaagggcacatacggcctgctgagacggagagaggactggcctagcagactgcagatgttcttcgccaataaccacgaccaggagttcgacccccctaaggtgtaccctcccgtccccgccgagaagagaaagcccatccgggtcctgagcctgttcgatggcatcgccaccggtctgctggtgctgaaggacctgggcatccaggtggataggtacattgcctccgaggtgtgcgaggactccatcaccgtgggaatggtgcgtcatcagggcaagatcatgtacgtgggcgacgtgcggagcgtgacacagaagcatatccaggagtggggccctttcgacctggtgatcggcggcagcccttgcaatgacctgagcatcgtgaacccagcccggaagggcctgtacgagggaaccggcagactgttcttcgagttttacagactgctgcacgacgcccggcctaaggaaggcgacgaccggcccttcttttggctgttcgagaatgtggtggccatgggagtcagcgacaagcgggatattagccggttcctggagagcaaccccgtgatgatcgatgccaaggaagtgagcgccgcccaccgggccagatacttctggggcaatctgcctggcatgaacagacccctggccagcaccgtgaacgacaagctggagctgcaggagtgcctggagcacggccggatcgccaagttcagcaaggtgagaaccatcaccacccgaagcaacagcatcaaacaaggcaaggaccagcactttcctgtgttcatgaacgagaaggaggacatcctgtggtgtaccgagatggagagagtgttcgggttcccagtccactacacagatgtcagcaacatgtctagactggccagacagagactgctgggaagaagctggtccgtccctgtgatcagacacctgttcgcccctctgaaggagtacttcgcctgcgtgagcagcggcaacagcaacgccaacagccggggccccagcttctctagcggcctggtgccactgtccctgagagggagccacatgggccccatggagatctacaaaaccgtgagcgcctggaagcggcagcctgtgcgcgtgctgagcctgtttcggaatatcgataaagtcctgaaaagcctgggattcctggagagcggctctggctccggcggtggcaccctgaagtacgtggaggatgtgacaaacgtggtcagacgggatgtggagaagtggggccccttcgatctggtgtacggcagcacccaacccctgggcagctcttgtgaccggtgccctggctggtacatgtttcagttccaccggatcctgcagtacgccctgccgagacaggagtcccagcggccattcttttggattttcatggacaacttgctgctgaccgaggatgaccaggaaactaccactcggttcctgcagaccgaagccgtgaccctgcaggacgtgagaggccgggactaccagaacgccatgcgggtgtggtccaacatccctggactgaaaagcaagcacgcacctctgacccctaaagaagaggagtacctgcaggcccaggtgcggagcagaagcaagctggacgcccctaaggtggatctgctggtgaagaattgcctcctgcccctgagagagtacttcaagtatttcagccagaatagtctgcccctgggcggcccaagcagcggcgcccctcctcccagcggcggcagcccagccggctccccaacctctaccgaggagggcacctctgagtccgccacccccgagagcggccctggcacctccaccgagcccagcgagggcagcgcacccggcagccctgccggcagccccacctccacagaggagggaaccagcaccgagcccagcgaaggcagcgccccaggcaccagcaccgagcctagtgagggcggctctggcggcggcagcgcccaggagattaaacggatcaacaagatcagaagaagacttgtgaaagacagcaacaccaagaaggccggcaagacaggccccatgaaaaccctgctggttagagtgatgacacccgatctgagagagcggctggaaaacctgagaaagaagcctgaaaatatcccccagcccatcagcaatacatctagagccaacctgaataagctgctgaccgattacaccgaaatgaagaaggcgatcctgcatgtgtactgggaagagttccagaaggaccctgtgggcctgatgagccgggtggcccagcctgccagcaagaagatcgatcagaacaagctgaaacctgagatggacgagaagggcaacctgaccaccgccggctttgcctgctctcagtgtggccagcccctgttcgtgtacaagctggagcaggtgtctgagaagggcaaggcttacaccaactacttcggacggtgcaatgtggccgagcacgaaaagctgatcctgctggcccagctgaagcccgagaaggatagcgacgaagccgtgacatatagcctgggaaagtttgggcagagggccctggatttctacagcattcatgtgaccaaggagtccacccaccccgtgaagcccctggcccagatcgccggaaacagatacgcctccggacctgtgggaaaggccctgagcgacgcatgtatgggcacaatcgcctccttcctgtctaagtaccaggacatcatcatcgaacaccagaaggtggtgaagggcaaccagaagagactggagagcctgcgggagctggccggcaaggaaaacctggaataccctagcgtgaccctgccacctcagcctcacaccaaggagggcgttgatgcctacaacgaagtgatcgcccgggtgcgaatgtgggtgaacctgaacctgtggcagaagctgaagctaagcagagatgatgccaagcctctgctgagactgaagggattcccttcctttcctctggtcgagagacaggccaacgaagtggactggtgggacatggtgtgtaacgtgaagaagctgatcaacgagaaaaaggaggatggcaaggtgttttggcagaatctggctggctacaagagacaggaagccctgagaccatacctgagcagcgaggaagatcggaagaagggaaagaaattcgctcggtaccagctgggcgacctgctgctgcacctggaaaagaagcacggcgaggactggggaaaggtgtacgacgaggcctgggagcggattgacaagaaagtggaaggcctgagcaagcacatcaagctggaagaggaacggagaagcgaggacgcccagagcaaggccgccctgaccgactggctgcgggctaaggccagcttcgtgatcgagggcctgaaggaggccgacaaggacgagttctgcagatgcgagctgaagctgcagaagtggtacggggacctgcggggaaagcccttcgccatcgaagccgagaacagcatcctggacatcagcggcttcagcaagcagtacaactgtgccttcatctggcagaaggacggcgtgaagaagctgaacctgtacctgatcatcaactacttcaagggcggcaagctgcggttcaagaagatcaaacctgaagccttcgaagccaacagattctacaccgtgatcaacaaaaagagcggcgagatcgtgcccatggaggtgaacttcaacttcgacgaccccaacctgatcatcctgcctctggcctttggcaagagacagggcagagaattcatctggaacgacctgctgtccctggaaaccggcagcctgaagctggccaacggaagagtgatcgagaagacactgtacaacagaagaacccggcaggatgagcctgccctgttcgtggccctgaccttcgagcggcgggaggtcctggactcctccaatatcaaaccaatgaacctgatcggcgtggcaagaggcgaaaacatccccgccgtgatcgccctgaccgaccccgagggctgcccactgagccggtttaaggatagcctgggaaacccaacccacatcctgagaatcggcgagagctataaggagaagcagcggaccatccaggccaagaaggaggtggagcagcggagagccggcggctacagccggaagtacgccagcaaagccaagaatctggcagacgatatggtgagaaacaccgctagagatctgctgtactacgccgtgacccaggatgccatgctgatcttcgccaacctgagccggggcttcggccggcagggcaagcggaccttcatggccgagagacagtacacacggatggaggactggctgaccgccaagctggcctacgagggcctgagcaagacctacctgtccaagacactggcccagtacacctccaagacatgcagcaactgtgggtttaccatcaccagcgccgactacgacagggtgctggagaagctgaagaagacagcaacaggctggatgaccacaattaacggcaaggagctgaaggtggagggccagattacctactacaacagatacaagagacagaacgtagtcaaggacctgtccgtcgagctggatagactgagcgaagaatctgtgaacaacgacatctcctcctggacaaagggcagaagcggagaagctctgagcctcctgaagaaaagattctcccatagacccgtgcaggagaagttcgtgtgcctgaactgcggcttcgagacacacgcagccgagcaagccgccctgaacatcgccagatcctggctgttcctgcggagccaggagtacaagaaataccagacaaacaagacaaccggcaacaccgataagagagccttcgtcgagacctggcagtccttttaccggaagaagcttaaggaggtgtggaaacctgccgtgcggtctggcggatctggcggaggctccacaagcatggtgaccttcgaggacgtggccgtgcacttcaccaagaccgagtggaccggcctgagccccgcccagagggccctgtacaggagcgtgatgctggagaacttcggcaacctgaccgccctgggctaccccgtgcccaagcccgccctgatcagcctgctggagggcggcgacatggcctggggcctggaggcccaggacgaccccctggccgagaggaccaagaacatctgcaagggcgtgaccagccccaagaaaaagagaaaagtctaagctgccttctgcggggcttgccttctggccatgcccttcttctctcccttgcacctgtacctcttggtctttgaataaagcctgagtaggaaggctagcaaaaaaaaaaaaaaaaaaaaaaaaaaaaaaaaaaaaaaaaaaaaaaaaaaaaaaaaaaaaaaaaaaaaaaaaaaaaaaaa

SEQ ID NO: 7010 - RNA, 5797 nt, synthetic construct
  source 1..5797: mol_type = other RNA
aggaaataagagagaaaagaagagtaagaagaaatataagagccaccatggcccctaagaagaagcgtaaagtgagccggatggaacgcctcgtctacgaggtgcggcagaagtgcagaaacatcgaggacatctgcatctcctgcggatctctgaacgtgaccctggagcacccactgttcatcggcggcatgtgccagaactgtaaaaactgttttctggagtgtgcctatcaatacgacgatgacggctaccagagctactgcaccatctgttgcggcggaagagaggtgctgatgtgtggaaataacaactgctgccggtgcttctgcgtggaatgcgtggacctgctggtgggccccggcgccgcccaggccgctattaaggaagatccttggaactgctacatgtgcggccacaagggcacatacggcctgctgagacggagagaggactggcctagcagactgcagatgttcttcgccaataaccacgaccaggagttcgacccccctaaggtgtaccctcccgtccccgccgagaagagaaagcccatccgggtcctgagcctgttcgatggcatcgccaccggtctgctggtgctgaaggacctgggcatccaggtggataggtacattgcctccgaggtgtgcgaggactccatcaccgtgggaatggtgcgtcatcagggcaagatcatgtacgtgggcgacgtgcggagcgtgacacagaagcatatccaggagtggggccctttcgacctggtgatcggcggcagcccttgcaatgacctgagcatcgtgaacccagcccggaagggcctgtacgagggaaccggcagactgttcttcgagttttacagactgctgcacgacgcccggcctaaggaaggcgacgaccggcccttcttttggctgttcgagaatgtggtggccatgggagtcagcgacaagcgggatattagccggttcctggagagcaaccccgtgatgatcgatgccaaggaagtgagcgccgcccaccgggccagatacttctggggcaatctgcctggcatgaacagacccctggccagcaccgtgaacgacaagctggagctgcaggagtgcctggagcacggccggatcgccaagttcagcaaggtgagaaccatcaccacccgaagcaacagcatcaaacaaggcaaggaccagcactttcctgtgttcatgaacgagaaggaggacatcctgtggtgtaccgagatggagagagtgttcgggttcccagtccactacacagatgtcagcaacatgtctagactggccagacagagactgctgggaagaagctggtccgtccctgtgatcagacacctgttcgcccctctgaaggagtacttcgcctgcgtgagcagcggcaacagcaacgccaacagccggggccccagcttctctagcggcctggtgccactgtccctgagagggagccacatgggccccatggagatctacaaaaccgtgagcgcctggaagcggcagcctgtgcgcgtgctgagcctgtttcggaatatcgataaagtcctgaaaagcctgggattcctggagagcggctctggctccggcggtggcaccctgaagtacgtggaggatgtgacaaacgtggtcagacgggatgtggagaagtggggccccttcgatctggtgtacggcagcacccaacccctgggcagctcttgtgaccggtgccctggctggtacatgtttcagttccaccggatcctgcagtacgccctgccgagacaggagtcccagcggccattcttttggattttcatggacaacttgctgctgaccgaggatgaccaggaaactaccactcggttcctgcagaccgaagccgtgaccctgcaggacgtgagaggccgggactaccagaacgccatgcgggtgtggtccaacatccctggactgaaaagcaagcacgcacctctgacccctaaagaagaggagtacctgcaggcccaggtgcggagcagaagcaagctggacgcccctaaggtggatctgctggtgaagaattgcctcctgcccctgagagagtacttcaagtatttcagccagaatagtctgcccctgggcggcccaagcagcggcgcccctcctcccagcggcggcagcccagccggctccccaacctctaccgaggagggcacctctgagtccgccacccccgagagcggccctggcacctccaccgagcccagcgagggcagcgcacccggcagccctgccggcagccccacctccacagaggagggaaccagcaccgagcccagcgaaggcagcgccccaggcaccagcaccgagcctagtgagggcggctctggcggcggcagcgcccaggagattaaacggatcaacaagatcagaagaagacttgtgaaagacagcaacaccaagaaggccggcaagacaggccccatgaaaaccctgctggttagagtgatgacacccgatctgagagagcggctggaaaacctgagaaagaagcctgaaaatatcccccagcccatcagcaatacatctagagccaacctgaataagctgctgaccgattacaccgaaatgaagaaggcgatcctgcatgtgtactgggaagagttccagaaggaccctgtgggcctgatgagccgggtggcccagcctgccagcaagaagatcgatcagaacaagctgaaacctgagatggacgagaagggcaacctgaccaccgccggctttgcctgctctcagtgtggccagcccctgttcgtgtacaagctggagcaggtgtctgagaagggcaaggcttacaccaactacttcggacggtgcaatgtggccgagcacgaaaagctgatcctgctggcccagctgaagcccgagaaggatagcgacgaagccgtgacatatagcctgggaaagtttgggcagagggccctggatttctacagcattcatgtgaccaaggagtccacccaccccgtgaagcccctggcccagatcgccggaaacagatacgcctccggacctgtgggaaaggccctgagcgacgcatgtatgggcacaatcgcctccttcctgtctaagtaccaggacatcatcatcgaacaccagaaggtggtgaagggcaaccagaagagactggagagcctgcgggagctggccggcaaggaaaacctggaataccctagcgtgaccctgccacctcagcctcacaccaaggagggcgttgatgcctacaacgaagtgatcgcccgggtgcgaatgtgggtgaacctgaacctgtggcagaagctgaagctaagcagagatgatgccaagcctctgctgagactgaagggattcccttcctttcctctggtcgagagacaggccaacgaagtggactggtgggacatggtgtgtaacgtgaagaagctgatcaacgagaaaaaggaggatggcaaggtgttttggcagaatctggctggctacaagagacaggaagccctgagaccatacctgagcagcgaggaagatcggaagaagggaaagaaattcgctcggtaccagctgggcgacctgctgctgcacctggaaaagaagcacggcgaggactggggaaaggtgtacgacgaggcctgggagcggattgacaagaaagtggaaggcctgagcaagcacatcaagctggaagaggaacggagaagcgaggacgcccagagcaaggccgccctgaccgactggctgcgggctaaggccagcttcgtgatcgagggcctgaaggaggccgacaaggacgagttctgcagatgcgagctgaagctgcagaagtggtacggggacctgcggggaaagcccttcgccatcgaagccgagaacagcatcctggacatcagcggcttcagcaagcagtacaactgtgccttcatctggcagaaggacggcgtgaagaagctgaacctgtacctgatcatcaactacttcaagggcggcaagctgcggttcaagaagatcaaacctgaagccttcgaagccaacagattctacaccgtgatcaacaaaaagagcggcgagatcgtgcccatggaggtgaacttcaacttcgacgaccccaacctgatcatcctgcctctggcctttggcaagagacagggcagagaattcatctggaacgacctgctgtccctggaaaccggcagcctgaagctggccaacggaagagtgatcgagaagacactgtacaacagaagaacccggcaggatgagcctgccctgttcgtggccctgaccttcgagcggcgggaggtcctggactcctccaatatcaaaccaatgaacctgatcggcgtggcaagaggcgaaaacatccccgccgtgatcgccctgaccgaccccgagggctgcccactgagccggtttaaggatagcctgggaaacccaacccacatcctgagaatcggcgagagctataaggagaagcagcggaccatccaggccaagaaggaggtggagcagcggagagccggcggctacagccggaagtacgccagcaaagccaagaatctggcagacgatatggtgagaaacaccgctagagatctgctgtactacgccgtgacccaggatgccatgctgatcttcgccaacctgagccggggcttcggccggcagggcaagcggaccttcatggccgagagacagtacacacggatggaggactggctgaccgccaagctggcctacgagggcctgagcaagacctacctgtccaagacactggcccagtacacctccaagacatgcagcaactgtgggtttaccatcaccagcgccgactacgacagggtgctggagaagctgaagaagacagcaacaggctggatgaccacaattaacggcaaggagctgaaggtggagggccagattacctactacaacagatacaagagacagaacgtagtcaaggacctgtccgtcgagctggatagactgagcgaagaatctgtgaacaacgacatctcctcctggacaaagggcagaagcggagaagctctgagcctcctgaagaaaagattctcccatagacccgtgcaggagaagttcgtgtgcctgaactgcggcttcgagacacacgcagccgagcaagccgccctgaacatcgccagatcctggctgttcctgcggagccaggagtacaagaaataccagacaaacaagacaaccggcaacaccgataagagagccttcgtcgagacctggcagtccttttaccggaagaagcttaaggaggtgtggaaacctgccgtgcggtctggcggatctggcggaggctccacaagccccgcccagggccccggcaaggccaggcccagcaggaagaggggcaggaggcccagggccctgaagttcgtggacgtggccgtgtacttcagccccgaggagtggggctgcctgaggcccgcccagagggccctgtacagggacgtgatgagggagacctacggccacctgggcgccctgggctgcgccggccccaagcccgccctgatcagctggctggagaggaacaccgacgactgggagaccagccccaagaaaaagagaaaagtctaagctgccttctgcggggcttgccttctggccatgcccttcttctctcccttgcacctgtacctcttggtctttgaataaagcctgagtaggaaggctagcaaaaaaaaaaaaaaaaaaaaaaaaaaaaaaaaaaaaaaaaaaaaaaaaaaaaaaaaaaaaaaaaaaaaaaaaaaaaaaaa

SEQ ID NO: 7011 - RNA, 5797 nt, synthetic construct
  source 1..5797: mol_type = other RNA
aggaaataagagagaaaagaagagtaagaagaaatataagagccaccatggcccctaagaagaagcgtaaagtgagccggatggaacgcctcgtctacgaggtgcggcagaagtgcagaaacatcgaggacatctgcatctcctgcggatctctgaacgtgaccctggagcacccactgttcatcggcggcatgtgccagaactgtaaaaactgttttctggagtgtgcctatcaatacgacgatgacggctaccagagctactgcaccatctgttgcggcggaagagaggtgctgatgtgtggaaataacaactgctgccggtgcttctgcgtggaatgcgtggacctgctggtgggccccggcgccgcccaggccgctattaaggaagatccttggaactgctacatgtgcggccacaagggcacatacggcctgctgagacggagagaggactggcctagcagactgcagatgttcttcgccaataaccacgaccaggagttcgacccccctaaggtgtaccctcccgtccccgccgagaagagaaagcccatccgggtcctgagcctgttcgatggcatcgccaccggtctgctggtgctgaaggacctgggcatccaggtggataggtacattgcctccgaggtgtgcgaggactccatcaccgtgggaatggtgcgtcatcagggcaagatcatgtacgtgggcgacgtgcggagcgtgacacagaagcatatccaggagtggggccctttcgacctggtgatcggcggcagcccttgcaatgacctgagcatcgtgaacccagcccggaagggcctgtacgagggaaccggcagactgttcttcgagttttacagactgctgcacgacgcccggcctaaggaaggcgacgaccggcccttcttttggctgttcgagaatgtggtggccatgggagtcagcgacaagcgggatattagccggttcctggagagcaaccccgtgatgatcgatgccaaggaagtgagcgccgcccaccgggccagatacttctggggcaatctgcctggcatgaacagacccctggccagcaccgtgaacgacaagctggagctgcaggagtgcctggagcacggccggatcgccaagttcagcaaggtgagaaccatcaccacccgaagcaacagcatcaaacaaggcaaggaccagcactttcctgtgttcatgaacgagaaggaggacatcctgtggtgtaccgagatggagagagtgttcgggttcccagtccactacacagatgtcagcaacatgtctagactggccagacagagactgctgggaagaagctggtccgtccctgtgatcagacacctgttcgcccctctgaaggagtacttcgcctgcgtgagcagcggcaacagcaacgccaacagccggggccccagcttctctagcggcctggtgccactgtccctgagagggagccacatgggccccatggagatctacaaaaccgtgagcgcctggaagcggcagcctgtgcgcgtgctgagcctgtttcggaatatcgataaagtcctgaaaagcctgggattcctggagagcggctctggctccggcggtggcaccctgaagtacgtggaggatgtgacaaacgtggtcagacgggatgtggagaagtggggccccttcgatctggtgtacggcagcacccaacccctgggcagctcttgtgaccggtgccctggctggtacatgtttcagttccaccggatcctgcagtacgccctgccgagacaggagtcccagcggccattcttttggattttcatggacaacttgctgctgaccgaggatgaccaggaaactaccactcggttcctgcagaccgaagccgtgaccctgcaggacgtgagaggccgggactaccagaacgccatgcgggtgtggtccaacatccctggactgaaaagcaagcacgcacctctgacccctaaagaagaggagtacctgcaggcccaggtgcggagcagaagcaagctggacgcccctaaggtggatctgctggtgaagaattgcctcctgcccctgagagagtacttcaagtatttcagccagaatagtctgcccctgggcggcccaagcagcggcgcccctcctcccagcggcggcagcccagccggctccccaacctctaccgaggagggcacctctgagtccgccacccccgagagcggccctggcacctccaccgagcccagcgagggcagcgcacccggcagccctgccggcagccccacctccacagaggagggaaccagcaccgagcccagcgaaggcagcgccccaggcaccagcaccgagcctagtgagggcggctctggcggcggcagcgcccaggagattaaacggatcaacaagatcagaagaagacttgtgaaagacagcaacaccaagaaggccggcaagacaggccccatgaaaaccctgctggttagagtgatgacacccgatctgagagagcggctggaaaacctgagaaagaagcctgaaaatatcccccagcccatcagcaatacatctagagccaacctgaataagctgctgaccgattacaccgaaatgaagaaggcgatcctgcatgtgtactgggaagagttccagaaggaccctgtgggcctgatgagccgggtggcccagcctgccagcaagaagatcgatcagaacaagctgaaacctgagatggacgagaagggcaacctgaccaccgccggctttgcctgctctcagtgtggccagcccctgttcgtgtacaagctggagcaggtgtctgagaagggcaaggcttacaccaactacttcggacggtgcaatgtggccgagcacgaaaagctgatcctgctggcccagctgaagcccgagaaggatagcgacgaagccgtgacatatagcctgggaaagtttgggcagagggccctggatttctacagcattcatgtgaccaaggagtccacccaccccgtgaagcccctggcccagatcgccggaaacagatacgcctccggacctgtgggaaaggccctgagcgacgcatgtatgggcacaatcgcctccttcctgtctaagtaccaggacatcatcatcgaacaccagaaggtggtgaagggcaaccagaagagactggagagcctgcgggagctggccggcaaggaaaacctggaataccctagcgtgaccctgccacctcagcctcacaccaaggagggcgttgatgcctacaacgaagtgatcgcccgggtgcgaatgtgggtgaacctgaacctgtggcagaagctgaagctaagcagagatgatgccaagcctctgctgagactgaagggattcccttcctttcctctggtcgagagacaggccaacgaagtggactggtgggacatggtgtgtaacgtgaagaagctgatcaacgagaaaaaggaggatggcaaggtgttttggcagaatctggctggctacaagagacaggaagccctgagaccatacctgagcagcgaggaagatcggaagaagggaaagaaattcgctcggtaccagctgggcgacctgctgctgcacctggaaaagaagcacggcgaggactggggaaaggtgtacgacgaggcctgggagcggattgacaagaaagtggaaggcctgagcaagcacatcaagctggaagaggaacggagaagcgaggacgcccagagcaaggccgccctgaccgactggctgcgggctaaggccagcttcgtgatcgagggcctgaaggaggccgacaaggacgagttctgcagatgcgagctgaagctgcagaagtggtacggggacctgcggggaaagcccttcgccatcgaagccgagaacagcatcctggacatcagcggcttcagcaagcagtacaactgtgccttcatctggcagaaggacggcgtgaagaagctgaacctgtacctgatcatcaactacttcaagggcggcaagctgcggttcaagaagatcaaacctgaagccttcgaagccaacagattctacaccgtgatcaacaaaaagagcggcgagatcgtgcccatggaggtgaacttcaacttcgacgaccccaacctgatcatcctgcctctggcctttggcaagagacagggcagagaattcatctggaacgacctgctgtccctggaaaccggcagcctgaagctggccaacggaagagtgatcgagaagacactgtacaacagaagaacccggcaggatgagcctgccctgttcgtggccctgaccttcgagcggcgggaggtcctggactcctccaatatcaaaccaatgaacctgatcggcgtggcaagaggcgaaaacatccccgccgtgatcgccctgaccgaccccgagggctgcccactgagccggtttaaggatagcctgggaaacccaacccacatcctgagaatcggcgagagctataaggagaagcagcggaccatccaggccaagaaggaggtggagcagcggagagccggcggctacagccggaagtacgccagcaaagccaagaatctggcagacgatatggtgagaaacaccgctagagatctgctgtactacgccgtgacccaggatgccatgctgatcttcgccaacctgagccggggcttcggccggcagggcaagcggaccttcatggccgagagacagtacacacggatggaggactggctgaccgccaagctggcctacgagggcctgagcaagacctacctgtccaagacactggcccagtacacctccaagacatgcagcaactgtgggtttaccatcaccagcgccgactacgacagggtgctggagaagctgaagaagacagcaacaggctggatgaccacaattaacggcaaggagctgaaggtggagggccagattacctactacaacagatacaagagacagaacgtagtcaaggacctgtccgtcgagctggatagactgagcgaagaatctgtgaacaacgacatctcctcctggacaaagggcagaagcggagaagctctgagcctcctgaagaaaagattctcccatagacccgtgcaggagaagttcgtgtgcctgaactgcggcttcgagacacacgcagccgagcaagccgccctgaacatcgccagatcctggctgttcctgcggagccaggagtacaagaaataccagacaaacaagacaaccggcaacaccgataagagagccttcgtcgagacctggcagtccttttaccggaagaagcttaaggaggtgtggaaacctgccgtgcggtctggcggatctggcggaggctccacaagcttccaggtgctggtgagcttcgaggaggtggccgtgctgctgagccaggaggagtggggccacctgggccccgcccagaagaggctgtacagggacgtgatgctggagacctacggcaacctggtgagcctgggcctgcagggcagcaagcccgacgtgatcagcaagctggagcagggcgaggagccctggaccccccacagccccaggatcgagggcagctggatcaggaggaggaggcccaccagccccaagaaaaagagaaaagtctaagctgccttctgcggggcttgccttctggccatgcccttcttctctcccttgcacctgtacctcttggtctttgaataaagcctgagtaggaaggctagcaaaaaaaaaaaaaaaaaaaaaaaaaaaaaaaaaaaaaaaaaaaaaaaaaaaaaaaaaaaaaaaaaaaaaaaaaaaaaaaa

SEQ ID NO: 7012 - RNA, 5797 nt, synthetic construct
  source 1..5797: mol_type = other RNA
aggaaataagagagaaaagaagagtaagaagaaatataagagccaccatggcccctaagaagaagcgtaaagtgagccggatggaacgcctcgtctacgaggtgcggcagaagtgcagaaacatcgaggacatctgcatctcctgcggatctctgaacgtgaccctggagcacccactgttcatcggcggcatgtgccagaactgtaaaaactgttttctggagtgtgcctatcaatacgacgatgacggctaccagagctactgcaccatctgttgcggcggaagagaggtgctgatgtgtggaaataacaactgctgccggtgcttctgcgtggaatgcgtggacctgctggtgggccccggcgccgcccaggccgctattaaggaagatccttggaactgctacatgtgcggccacaagggcacatacggcctgctgagacggagagaggactggcctagcagactgcagatgttcttcgccaataaccacgaccaggagttcgacccccctaaggtgtaccctcccgtccccgccgagaagagaaagcccatccgggtcctgagcctgttcgatggcatcgccaccggtctgctggtgctgaaggacctgggcatccaggtggataggtacattgcctccgaggtgtgcgaggactccatcaccgtgggaatggtgcgtcatcagggcaagatcatgtacgtgggcgacgtgcggagcgtgacacagaagcatatccaggagtggggccctttcgacctggtgatcggcggcagcccttgcaatgacctgagcatcgtgaacccagcccggaagggcctgtacgagggaaccggcagactgttcttcgagttttacagactgctgcacgacgcccggcctaaggaaggcgacgaccggcccttcttttggctgttcgagaatgtggtggccatgggagtcagcgacaagcgggatattagccggttcctggagagcaaccccgtgatgatcgatgccaaggaagtgagcgccgcccaccgggccagatacttctggggcaatctgcctggcatgaacagacccctggccagcaccgtgaacgacaagctggagctgcaggagtgcctggagcacggccggatcgccaagttcagcaaggtgagaaccatcaccacccgaagcaacagcatcaaacaaggcaaggaccagcactttcctgtgttcatgaacgagaaggaggacatcctgtggtgtaccgagatggagagagtgttcgggttcccagtccactacacagatgtcagcaacatgtctagactggccagacagagactgctgggaagaagctggtccgtccctgtgatcagacacctgttcgcccctctgaaggagtacttcgcctgcgtgagcagcggcaacagcaacgccaacagccggggccccagcttctctagcggcctggtgccactgtccctgagagggagccacatgggccccatggagatctacaaaaccgtgagcgcctggaagcggcagcctgtgcgcgtgctgagcctgtttcggaatatcgataaagtcctgaaaagcctgggattcctggagagcggctctggctccggcggtggcaccctgaagtacgtggaggatgtgacaaacgtggtcagacgggatgtggagaagtggggccccttcgatctggtgtacggcagcacccaacccctgggcagctcttgtgaccggtgccctggctggtacatgtttcagttccaccggatcctgcagtacgccctgccgagacaggagtcccagcggccattcttttggattttcatggacaacttgctgctgaccgaggatgaccaggaaactaccactcggttcctgcagaccgaagccgtgaccctgcaggacgtgagaggccgggactaccagaacgccatgcgggtgtggtccaacatccctggactgaaaagcaagcacgcacctctgacccctaaagaagaggagtacctgcaggcccaggtgcggagcagaagcaagctggacgcccctaaggtggatctgctggtgaagaattgcctcctgcccctgagagagtacttcaagtatttcagccagaatagtctgcccctgggcggcccaagcagcggcgcccctcctcccagcggcggcagcccagccggctccccaacctctaccgaggagggcacctctgagtccgccacccccgagagcggccctggcacctccaccgagcccagcgagggcagcgcacccggcagccctgccggcagccccacctccacagaggagggaaccagcaccgagcccagcgaaggcagcgccccaggcaccagcaccgagcctagtgagggcggctctggcggcggcagcgcccaggagattaaacggatcaacaagatcagaagaagacttgtgaaagacagcaacaccaagaaggccggcaagacaggccccatgaaaaccctgctggttagagtgatgacacccgatctgagagagcggctggaaaacctgagaaagaagcctgaaaatatcccccagcccatcagcaatacatctagagccaacctgaataagctgctgaccgattacaccgaaatgaagaaggcgatcctgcatgtgtactgggaagagttccagaaggaccctgtgggcctgatgagccgggtggcccagcctgccagcaagaagatcgatcagaacaagctgaaacctgagatggacgagaagggcaacctgaccaccgccggctttgcctgctctcagtgtggccagcccctgttcgtgtacaagctggagcaggtgtctgagaagggcaaggcttacaccaactacttcggacggtgcaatgtggccgagcacgaaaagctgatcctgctggcccagctgaagcccgagaaggatagcgacgaagccgtgacatatagcctgggaaagtttgggcagagggccctggatttctacagcattcatgtgaccaaggagtccacccaccccgtgaagcccctggcccagatcgccggaaacagatacgcctccggacctgtgggaaaggccctgagcgacgcatgtatgggcacaatcgcctccttcctgtctaagtaccaggacatcatcatcgaacaccagaaggtggtgaagggcaaccagaagagactggagagcctgcgggagctggccggcaaggaaaacctggaataccctagcgtgaccctgccacctcagcctcacaccaaggagggcgttgatgcctacaacgaagtgatcgcccgggtgcgaatgtgggtgaacctgaacctgtggcagaagctgaagctaagcagagatgatgccaagcctctgctgagactgaagggattcccttcctttcctctggtcgagagacaggccaacgaagtggactggtgggacatggtgtgtaacgtgaagaagctgatcaacgagaaaaaggaggatggcaaggtgttttggcagaatctggctggctacaagagacaggaagccctgagaccatacctgagcagcgaggaagatcggaagaagggaaagaaattcgctcggtaccagctgggcgacctgctgctgcacctggaaaagaagcacggcgaggactggggaaaggtgtacgacgaggcctgggagcggattgacaagaaagtggaaggcctgagcaagcacatcaagctggaagaggaacggagaagcgaggacgcccagagcaaggccgccctgaccgactggctgcgggctaaggccagcttcgtgatcgagggcctgaaggaggccgacaaggacgagttctgcagatgcgagctgaagctgcagaagtggtacggggacctgcggggaaagcccttcgccatcgaagccgagaacagcatcctggacatcagcggcttcagcaagcagtacaactgtgccttcatctggcagaaggacggcgtgaagaagctgaacctgtacctgatcatcaactacttcaagggcggcaagctgcggttcaagaagatcaaacctgaagccttcgaagccaacagattctacaccgtgatcaacaaaaagagcggcgagatcgtgcccatggaggtgaacttcaacttcgacgaccccaacctgatcatcctgcctctggcctttggcaagagacagggcagagaattcatctggaacgacctgctgtccctggaaaccggcagcctgaagctggccaacggaagagtgatcgagaagacactgtacaacagaagaacccggcaggatgagcctgccctgttcgtggccctgaccttcgagcggcgggaggtcctggactcctccaatatcaaaccaatgaacctgatcggcgtggcaagaggcgaaaacatccccgccgtgatcgccctgaccgaccccgagggctgcccactgagccggtttaaggatagcctgggaaacccaacccacatcctgagaatcggcgagagctataaggagaagcagcggaccatccaggccaagaaggaggtggagcagcggagagccggcggctacagccggaagtacgccagcaaagccaagaatctggcagacgatatggtgagaaacaccgctagagatctgctgtactacgccgtgacccaggatgccatgctgatcttcgccaacctgagccggggcttcggccggcagggcaagcggaccttcatggccgagagacagtacacacggatggaggactggctgaccgccaagctggcctacgagggcctgagcaagacctacctgtccaagacactggcccagtacacctccaagacatgcagcaactgtgggtttaccatcaccagcgccgactacgacagggtgctggagaagctgaagaagacagcaacaggctggatgaccacaattaacggcaaggagctgaaggtggagggccagattacctactacaacagatacaagagacagaacgtagtcaaggacctgtccgtcgagctggatagactgagcgaagaatctgtgaacaacgacatctcctcctggacaaagggcagaagcggagaagctctgagcctcctgaagaaaagattctcccatagacccgtgcaggagaagttcgtgtgcctgaactgcggcttcgagacacacgcagccgagcaagccgccctgaacatcgccagatcctggctgttcctgcggagccaggagtacaagaaataccagacaaacaagacaaccggcaacaccgataagagagccttcgtcgagacctggcagtccttttaccggaagaagcttaaggaggtgtggaaacctgccgtgcggtctggcggatctggcggaggctccacaagcatccaggagcccgtgaccttcaaggacgtggccgtggacttcacccaggaggagtggggccagctggacagcgtgcagaggaccctgtacagggacgtgatgctggagacctacggccacctgctgagcgtgggcaaccacatcgccaagcccgaggtgatcagcctgctggagcagggcgaggagccctggagcgtggagcaggcctacccccagagcacctgccccgagtggatgaggaacaccagccccaagaaaaagagaaaagtctaagctgccttctgcggggcttgccttctggccatgcccttcttctctcccttgcacctgtacctcttggtctttgaataaagcctgagtaggaaggctagcaaaaaaaaaaaaaaaaaaaaaaaaaaaaaaaaaaaaaaaaaaaaaaaaaaaaaaaaaaaaaaaaaaaaaaaaaaaaaaaa

SEQ ID NO: 7013 - RNA, 5797 nt, synthetic construct
  source 1..5797: mol_type = other RNA
aggaaataagagagaaaagaagagtaagaagaaatataagagccaccatggcccctaagaagaagcgtaaagtgagccggatggaacgcctcgtctacgaggtgcggcagaagtgcagaaacatcgaggacatctgcatctcctgcggatctctgaacgtgaccctggagcacccactgttcatcggcggcatgtgccagaactgtaaaaactgttttctggagtgtgcctatcaatacgacgatgacggctaccagagctactgcaccatctgttgcggcggaagagaggtgctgatgtgtggaaataacaactgctgccggtgcttctgcgtggaatgcgtggacctgctggtgggccccggcgccgcccaggccgctattaaggaagatccttggaactgctacatgtgcggccacaagggcacatacggcctgctgagacggagagaggactggcctagcagactgcagatgttcttcgccaataaccacgaccaggagttcgacccccctaaggtgtaccctcccgtccccgccgagaagagaaagcccatccgggtcctgagcctgttcgatggcatcgccaccggtctgctggtgctgaaggacctgggcatccaggtggataggtacattgcctccgaggtgtgcgaggactccatcaccgtgggaatggtgcgtcatcagggcaagatcatgtacgtgggcgacgtgcggagcgtgacacagaagcatatccaggagtggggccctttcgacctggtgatcggcggcagcccttgcaatgacctgagcatcgtgaacccagcccggaagggcctgtacgagggaaccggcagactgttcttcgagttttacagactgctgcacgacgcccggcctaaggaaggcgacgaccggcccttcttttggctgttcgagaatgtggtggccatgggagtcagcgacaagcgggatattagccggttcctggagagcaaccccgtgatgatcgatgccaaggaagtgagcgccgcccaccgggccagatacttctggggcaatctgcctggcatgaacagacccctggccagcaccgtgaacgacaagctggagctgcaggagtgcctggagcacggccggatcgccaagttcagcaaggtgagaaccatcaccacccgaagcaacagcatcaaacaaggcaaggaccagcactttcctgtgttcatgaacgagaaggaggacatcctgtggtgtaccgagatggagagagtgttcgggttcccagtccactacacagatgtcagcaacatgtctagactggccagacagagactgctgggaagaagctggtccgtccctgtgatcagacacctgttcgcccctctgaaggagtacttcgcctgcgtgagcagcggcaacagcaacgccaacagccggggccccagcttctctagcggcctggtgccactgtccctgagagggagccacatgggccccatggagatctacaaaaccgtgagcgcctggaagcggcagcctgtgcgcgtgctgagcctgtttcggaatatcgataaagtcctgaaaagcctgggattcctggagagcggctctggctccggcggtggcaccctgaagtacgtggaggatgtgacaaacgtggtcagacgggatgtggagaagtggggccccttcgatctggtgtacggcagcacccaacccctgggcagctcttgtgaccggtgccctggctggtacatgtttcagttccaccggatcctgcagtacgccctgccgagacaggagtcccagcggccattcttttggattttcatggacaacttgctgctgaccgaggatgaccaggaaactaccactcggttcctgcagaccgaagccgtgaccctgcaggacgtgagaggccgggactaccagaacgccatgcgggtgtggtccaacatccctggactgaaaagcaagcacgcacctctgacccctaaagaagaggagtacctgcaggcccaggtgcggagcagaagcaagctggacgcccctaaggtggatctgctggtgaagaattgcctcctgcccctgagagagtacttcaagtatttcagccagaatagtctgcccctgggcggcccaagcagcggcgcccctcctcccagcggcggcagcccagccggctccccaacctctaccgaggagggcacctctgagtccgccacccccgagagcggccctggcacctccaccgagcccagcgagggcagcgcacccggcagccctgccggcagccccacctccacagaggagggaaccagcaccgagcccagcgaaggcagcgccccaggcaccagcaccgagcctagtgagggcggctctggcggcggcagcgcccaggagattaaacggatcaacaagatcagaagaagacttgtgaaagacagcaacaccaagaaggccggcaagacaggccccatgaaaaccctgctggttagagtgatgacacccgatctgagagagcggctggaaaacctgagaaagaagcctgaaaatatcccccagcccatcagcaatacatctagagccaacctgaataagctgctgaccgattacaccgaaatgaagaaggcgatcctgcatgtgtactgggaagagttccagaaggaccctgtgggcctgatgagccgggtggcccagcctgccagcaagaagatcgatcagaacaagctgaaacctgagatggacgagaagggcaacctgaccaccgccggctttgcctgctctcagtgtggccagcccctgttcgtgtacaagctggagcaggtgtctgagaagggcaaggcttacaccaactacttcggacggtgcaatgtggccgagcacgaaaagctgatcctgctggcccagctgaagcccgagaaggatagcgacgaagccgtgacatatagcctgggaaagtttgggcagagggccctggatttctacagcattcatgtgaccaaggagtccacccaccccgtgaagcccctggcccagatcgccggaaacagatacgcctccggacctgtgggaaaggccctgagcgacgcatgtatgggcacaatcgcctccttcctgtctaagtaccaggacatcatcatcgaacaccagaaggtggtgaagggcaaccagaagagactggagagcctgcgggagctggccggcaaggaaaacctggaataccctagcgtgaccctgccacctcagcctcacaccaaggagggcgttgatgcctacaacgaagtgatcgcccgggtgcgaatgtgggtgaacctgaacctgtggcagaagctgaagctaagcagagatgatgccaagcctctgctgagactgaagggattcccttcctttcctctggtcgagagacaggccaacgaagtggactggtgggacatggtgtgtaacgtgaagaagctgatcaacgagaaaaaggaggatggcaaggtgttttggcagaatctggctggctacaagagacaggaagccctgagaccatacctgagcagcgaggaagatcggaagaagggaaagaaattcgctcggtaccagctgggcgacctgctgctgcacctggaaaagaagcacggcgaggactggggaaaggtgtacgacgaggcctgggagcggattgacaagaaagtggaaggcctgagcaagcacatcaagctggaagaggaacggagaagcgaggacgcccagagcaaggccgccctgaccgactggctgcgggctaaggccagcttcgtgatcgagggcctgaaggaggccgacaaggacgagttctgcagatgcgagctgaagctgcagaagtggtacggggacctgcggggaaagcccttcgccatcgaagccgagaacagcatcctggacatcagcggcttcagcaagcagtacaactgtgccttcatctggcagaaggacggcgtgaagaagctgaacctgtacctgatcatcaactacttcaagggcggcaagctgcggttcaagaagatcaaacctgaagccttcgaagccaacagattctacaccgtgatcaacaaaaagagcggcgagatcgtgcccatggaggtgaacttcaacttcgacgaccccaacctgatcatcctgcctctggcctttggcaagagacagggcagagaattcatctggaacgacctgctgtccctggaaaccggcagcctgaagctggccaacggaagagtgatcgagaagacactgtacaacagaagaacccggcaggatgagcctgccctgttcgtggccctgaccttcgagcggcgggaggtcctggactcctccaatatcaaaccaatgaacctgatcggcgtggcaagaggcgaaaacatccccgccgtgatcgccctgaccgaccccgagggctgcccactgagccggtttaaggatagcctgggaaacccaacccacatcctgagaatcggcgagagctataaggagaagcagcggaccatccaggccaagaaggaggtggagcagcggagagccggcggctacagccggaagtacgccagcaaagccaagaatctggcagacgatatggtgagaaacaccgctagagatctgctgtactacgccgtgacccaggatgccatgctgatcttcgccaacctgagccggggcttcggccggcagggcaagcggaccttcatggccgagagacagtacacacggatggaggactggctgaccgccaagctggcctacgagggcctgagcaagacctacctgtccaagacactggcccagtacacctccaagacatgcagcaactgtgggtttaccatcaccagcgccgactacgacagggtgctggagaagctgaagaagacagcaacaggctggatgaccacaattaacggcaaggagctgaaggtggagggccagattacctactacaacagatacaagagacagaacgtagtcaaggacctgtccgtcgagctggatagactgagcgaagaatctgtgaacaacgacatctcctcctggacaaagggcagaagcggagaagctctgagcctcctgaagaaaagattctcccatagacccgtgcaggagaagttcgtgtgcctgaactgcggcttcgagacacacgcagccgagcaagccgccctgaacatcgccagatcctggctgttcctgcggagccaggagtacaagaaataccagacaaacaagacaaccggcaacaccgataagagagccttcgtcgagacctggcagtccttttaccggaagaagcttaaggaggtgtggaaacctgccgtgcggtctggcggatctggcggaggctccacaagccacaagaagagcatggtgttcagcgacgtgagcctggacttcagccaggaggagtgggagtgcctgggccccgcccagaaggacctgtacagggacgtgatgctggagaactacagccacctgctgagcgtggccggcctgcacatccccaagccccaggtgatcagcctgctggagcagggcaaggagccctggatgatcggcaaggagctgaccaggggcctgtgcagcgccctggagagcaccagccccaagaaaaagagaaaagtctaagctgccttctgcggggcttgccttctggccatgcccttcttctctcccttgcacctgtacctcttggtctttgaataaagcctgagtaggaaggctagcaaaaaaaaaaaaaaaaaaaaaaaaaaaaaaaaaaaaaaaaaaaaaaaaaaaaaaaaaaaaaaaaaaaaaaaaaaaaaaaa

SEQ ID NO: 7014 - RNA, 5797 nt, synthetic construct
  source 1..5797: mol_type = other RNA
aggaaataagagagaaaagaagagtaagaagaaatataagagccaccatggcccctaagaagaagcgtaaagtgagccggatggaacgcctcgtctacgaggtgcggcagaagtgcagaaacatcgaggacatctgcatctcctgcggatctctgaacgtgaccctggagcacccactgttcatcggcggcatgtgccagaactgtaaaaactgttttctggagtgtgcctatcaatacgacgatgacggctaccagagctactgcaccatctgttgcggcggaagagaggtgctgatgtgtggaaataacaactgctgccggtgcttctgcgtggaatgcgtggacctgctggtgggccccggcgccgcccaggccgctattaaggaagatccttggaactgctacatgtgcggccacaagggcacatacggcctgctgagacggagagaggactggcctagcagactgcagatgttcttcgccaataaccacgaccaggagttcgacccccctaaggtgtaccctcccgtccccgccgagaagagaaagcccatccgggtcctgagcctgttcgatggcatcgccaccggtctgctggtgctgaaggacctgggcatccaggtggataggtacattgcctccgaggtgtgcgaggactccatcaccgtgggaatggtgcgtcatcagggcaagatcatgtacgtgggcgacgtgcggagcgtgacacagaagcatatccaggagtggggccctttcgacctggtgatcggcggcagcccttgcaatgacctgagcatcgtgaacccagcccggaagggcctgtacgagggaaccggcagactgttcttcgagttttacagactgctgcacgacgcccggcctaaggaaggcgacgaccggcccttcttttggctgttcgagaatgtggtggccatgggagtcagcgacaagcgggatattagccggttcctggagagcaaccccgtgatgatcgatgccaaggaagtgagcgccgcccaccgggccagatacttctggggcaatctgcctggcatgaacagacccctggccagcaccgtgaacgacaagctggagctgcaggagtgcctggagcacggccggatcgccaagttcagcaaggtgagaaccatcaccacccgaagcaacagcatcaaacaaggcaaggaccagcactttcctgtgttcatgaacgagaaggaggacatcctgtggtgtaccgagatggagagagtgttcgggttcccagtccactacacagatgtcagcaacatgtctagactggccagacagagactgctgggaagaagctggtccgtccctgtgatcagacacctgttcgcccctctgaaggagtacttcgcctgcgtgagcagcggcaacagcaacgccaacagccggggccccagcttctctagcggcctggtgccactgtccctgagagggagccacatgggccccatggagatctacaaaaccgtgagcgcctggaagcggcagcctgtgcgcgtgctgagcctgtttcggaatatcgataaagtcctgaaaagcctgggattcctggagagcggctctggctccggcggtggcaccctgaagtacgtggaggatgtgacaaacgtggtcagacgggatgtggagaagtggggccccttcgatctggtgtacggcagcacccaacccctgggcagctcttgtgaccggtgccctggctggtacatgtttcagttccaccggatcctgcagtacgccctgccgagacaggagtcccagcggccattcttttggattttcatggacaacttgctgctgaccgaggatgaccaggaaactaccactcggttcctgcagaccgaagccgtgaccctgcaggacgtgagaggccgggactaccagaacgccatgcgggtgtggtccaacatccctggactgaaaagcaagcacgcacctctgacccctaaagaagaggagtacctgcaggcccaggtgcggagcagaagcaagctggacgcccctaaggtggatctgctggtgaagaattgcctcctgcccctgagagagtacttcaagtatttcagccagaatagtctgcccctgggcggcccaagcagcggcgcccctcctcccagcggcggcagcccagccggctccccaacctctaccgaggagggcacctctgagtccgccacccccgagagcggccctggcacctccaccgagcccagcgagggcagcgcacccggcagccctgccggcagccccacctccacagaggagggaaccagcaccgagcccagcgaaggcagcgccccaggcaccagcaccgagcctagtgagggcggctctggcggcggcagcgcccaggagattaaacggatcaacaagatcagaagaagacttgtgaaagacagcaacaccaagaaggccggcaagacaggccccatgaaaaccctgctggttagagtgatgacacccgatctgagagagcggctggaaaacctgagaaagaagcctgaaaatatcccccagcccatcagcaatacatctagagccaacctgaataagctgctgaccgattacaccgaaatgaagaaggcgatcctgcatgtgtactgggaagagttccagaaggaccctgtgggcctgatgagccgggtggcccagcctgccagcaagaagatcgatcagaacaagctgaaacctgagatggacgagaagggcaacctgaccaccgccggctttgcctgctctcagtgtggccagcccctgttcgtgtacaagctggagcaggtgtctgagaagggcaaggcttacaccaactacttcggacggtgcaatgtggccgagcacgaaaagctgatcctgctggcccagctgaagcccgagaaggatagcgacgaagccgtgacatatagcctgggaaagtttgggcagagggccctggatttctacagcattcatgtgaccaaggagtccacccaccccgtgaagcccctggcccagatcgccggaaacagatacgcctccggacctgtgggaaaggccctgagcgacgcatgtatgggcacaatcgcctccttcctgtctaagtaccaggacatcatcatcgaacaccagaaggtggtgaagggcaaccagaagagactggagagcctgcgggagctggccggcaaggaaaacctggaataccctagcgtgaccctgccacctcagcctcacaccaaggagggcgttgatgcctacaacgaagtgatcgcccgggtgcgaatgtgggtgaacctgaacctgtggcagaagctgaagctaagcagagatgatgccaagcctctgctgagactgaagggattcccttcctttcctctggtcgagagacaggccaacgaagtggactggtgggacatggtgtgtaacgtgaagaagctgatcaacgagaaaaaggaggatggcaaggtgttttggcagaatctggctggctacaagagacaggaagccctgagaccatacctgagcagcgaggaagatcggaagaagggaaagaaattcgctcggtaccagctgggcgacctgctgctgcacctggaaaagaagcacggcgaggactggggaaaggtgtacgacgaggcctgggagcggattgacaagaaagtggaaggcctgagcaagcacatcaagctggaagaggaacggagaagcgaggacgcccagagcaaggccgccctgaccgactggctgcgggctaaggccagcttcgtgatcgagggcctgaaggaggccgacaaggacgagttctgcagatgcgagctgaagctgcagaagtggtacggggacctgcggggaaagcccttcgccatcgaagccgagaacagcatcctggacatcagcggcttcagcaagcagtacaactgtgccttcatctggcagaaggacggcgtgaagaagctgaacctgtacctgatcatcaactacttcaagggcggcaagctgcggttcaagaagatcaaacctgaagccttcgaagccaacagattctacaccgtgatcaacaaaaagagcggcgagatcgtgcccatggaggtgaacttcaacttcgacgaccccaacctgatcatcctgcctctggcctttggcaagagacagggcagagaattcatctggaacgacctgctgtccctggaaaccggcagcctgaagctggccaacggaagagtgatcgagaagacactgtacaacagaagaacccggcaggatgagcctgccctgttcgtggccctgaccttcgagcggcgggaggtcctggactcctccaatatcaaaccaatgaacctgatcggcgtggcaagaggcgaaaacatccccgccgtgatcgccctgaccgaccccgagggctgcccactgagccggtttaaggatagcctgggaaacccaacccacatcctgagaatcggcgagagctataaggagaagcagcggaccatccaggccaagaaggaggtggagcagcggagagccggcggctacagccggaagtacgccagcaaagccaagaatctggcagacgatatggtgagaaacaccgctagagatctgctgtactacgccgtgacccaggatgccatgctgatcttcgccaacctgagccggggcttcggccggcagggcaagcggaccttcatggccgagagacagtacacacggatggaggactggctgaccgccaagctggcctacgagggcctgagcaagacctacctgtccaagacactggcccagtacacctccaagacatgcagcaactgtgggtttaccatcaccagcgccgactacgacagggtgctggagaagctgaagaagacagcaacaggctggatgaccacaattaacggcaaggagctgaaggtggagggccagattacctactacaacagatacaagagacagaacgtagtcaaggacctgtccgtcgagctggatagactgagcgaagaatctgtgaacaacgacatctcctcctggacaaagggcagaagcggagaagctctgagcctcctgaagaaaagattctcccatagacccgtgcaggagaagttcgtgtgcctgaactgcggcttcgagacacacgcagccgagcaagccgccctgaacatcgccagatcctggctgttcctgcggagccaggagtacaagaaataccagacaaacaagacaaccggcaacaccgataagagagccttcgtcgagacctggcagtccttttaccggaagaagcttaaggaggtgtggaaacctgccgtgcggtctggcggatctggcggaggctccacaagcttccagatccccgtgaccttcgaggaggtggccgtgtacttcacccagggccagggcgccctgctggaccccgcccagagggccctgtacagggacgtgatgcaggagaactacgagaccgtgaccagcctgggcttccccatccccaagcccgacctgatcgccaggctggagaggggcgaggagccctgggtgctggacctgcaggccagcgacgagagcgtgagcctgaggggcacctgcaccagccccaagaaaaagagaaaagtctaagctgccttctgcggggcttgccttctggccatgcccttcttctctcccttgcacctgtacctcttggtctttgaataaagcctgagtaggaaggctagcaaaaaaaaaaaaaaaaaaaaaaaaaaaaaaaaaaaaaaaaaaaaaaaaaaaaaaaaaaaaaaaaaaaaaaaaaaaaaaaa

SEQ ID NO: 7015 - RNA, 5797 nt, synthetic construct
  source 1..5797: mol_type = other RNA
aggaaataagagagaaaagaagagtaagaagaaatataagagccaccatggcccctaagaagaagcgtaaagtgagccggatggaacgcctcgtctacgaggtgcggcagaagtgcagaaacatcgaggacatctgcatctcctgcggatctctgaacgtgaccctggagcacccactgttcatcggcggcatgtgccagaactgtaaaaactgttttctggagtgtgcctatcaatacgacgatgacggctaccagagctactgcaccatctgttgcggcggaagagaggtgctgatgtgtggaaataacaactgctgccggtgcttctgcgtggaatgcgtggacctgctggtgggccccggcgccgcccaggccgctattaaggaagatccttggaactgctacatgtgcggccacaagggcacatacggcctgctgagacggagagaggactggcctagcagactgcagatgttcttcgccaataaccacgaccaggagttcgacccccctaaggtgtaccctcccgtccccgccgagaagagaaagcccatccgggtcctgagcctgttcgatggcatcgccaccggtctgctggtgctgaaggacctgggcatccaggtggataggtacattgcctccgaggtgtgcgaggactccatcaccgtgggaatggtgcgtcatcagggcaagatcatgtacgtgggcgacgtgcggagcgtgacacagaagcatatccaggagtggggccctttcgacctggtgatcggcggcagcccttgcaatgacctgagcatcgtgaacccagcccggaagggcctgtacgagggaaccggcagactgttcttcgagttttacagactgctgcacgacgcccggcctaaggaaggcgacgaccggcccttcttttggctgttcgagaatgtggtggccatgggagtcagcgacaagcgggatattagccggttcctggagagcaaccccgtgatgatcgatgccaaggaagtgagcgccgcccaccgggccagatacttctggggcaatctgcctggcatgaacagacccctggccagcaccgtgaacgacaagctggagctgcaggagtgcctggagcacggccggatcgccaagttcagcaaggtgagaaccatcaccacccgaagcaacagcatcaaacaaggcaaggaccagcactttcctgtgttcatgaacgagaaggaggacatcctgtggtgtaccgagatggagagagtgttcgggttcccagtccactacacagatgtcagcaacatgtctagactggccagacagagactgctgggaagaagctggtccgtccctgtgatcagacacctgttcgcccctctgaaggagtacttcgcctgcgtgagcagcggcaacagcaacgccaacagccggggccccagcttctctagcggcctggtgccactgtccctgagagggagccacatgggccccatggagatctacaaaaccgtgagcgcctggaagcggcagcctgtgcgcgtgctgagcctgtttcggaatatcgataaagtcctgaaaagcctgggattcctggagagcggctctggctccggcggtggcaccctgaagtacgtggaggatgtgacaaacgtggtcagacgggatgtggagaagtggggccccttcgatctggtgtacggcagcacccaacccctgggcagctcttgtgaccggtgccctggctggtacatgtttcagttccaccggatcctgcagtacgccctgccgagacaggagtcccagcggccattcttttggattttcatggacaacttgctgctgaccgaggatgaccaggaaactaccactcggttcctgcagaccgaagccgtgaccctgcaggacgtgagaggccgggactaccagaacgccatgcgggtgtggtccaacatccctggactgaaaagcaagcacgcacctctgacccctaaagaagaggagtacctgcaggcccaggtgcggagcagaagcaagctggacgcccctaaggtggatctgctggtgaagaattgcctcctgcccctgagagagtacttcaagtatttcagccagaatagtctgcccctgggcggcccaagcagcggcgcccctcctcccagcggcggcagcccagccggctccccaacctctaccgaggagggcacctctgagtccgccacccccgagagcggccctggcacctccaccgagcccagcgagggcagcgcacccggcagccctgccggcagccccacctccacagaggagggaaccagcaccgagcccagcgaaggcagcgccccaggcaccagcaccgagcctagtgagggcggctctggcggcggcagcgcccaggagattaaacggatcaacaagatcagaagaagacttgtgaaagacagcaacaccaagaaggccggcaagacaggccccatgaaaaccctgctggttagagtgatgacacccgatctgagagagcggctggaaaacctgagaaagaagcctgaaaatatcccccagcccatcagcaatacatctagagccaacctgaataagctgctgaccgattacaccgaaatgaagaaggcgatcctgcatgtgtactgggaagagttccagaaggaccctgtgggcctgatgagccgggtggcccagcctgccagcaagaagatcgatcagaacaagctgaaacctgagatggacgagaagggcaacctgaccaccgccggctttgcctgctctcagtgtggccagcccctgttcgtgtacaagctggagcaggtgtctgagaagggcaaggcttacaccaactacttcggacggtgcaatgtggccgagcacgaaaagctgatcctgctggcccagctgaagcccgagaaggatagcgacgaagccgtgacatatagcctgggaaagtttgggcagagggccctggatttctacagcattcatgtgaccaaggagtccacccaccccgtgaagcccctggcccagatcgccggaaacagatacgcctccggacctgtgggaaaggccctgagcgacgcatgtatgggcacaatcgcctccttcctgtctaagtaccaggacatcatcatcgaacaccagaaggtggtgaagggcaaccagaagagactggagagcctgcgggagctggccggcaaggaaaacctggaataccctagcgtgaccctgccacctcagcctcacaccaaggagggcgttgatgcctacaacgaagtgatcgcccgggtgcgaatgtgggtgaacctgaacctgtggcagaagctgaagctaagcagagatgatgccaagcctctgctgagactgaagggattcccttcctttcctctggtcgagagacaggccaacgaagtggactggtgggacatggtgtgtaacgtgaagaagctgatcaacgagaaaaaggaggatggcaaggtgttttggcagaatctggctggctacaagagacaggaagccctgagaccatacctgagcagcgaggaagatcggaagaagggaaagaaattcgctcggtaccagctgggcgacctgctgctgcacctggaaaagaagcacggcgaggactggggaaaggtgtacgacgaggcctgggagcggattgacaagaaagtggaaggcctgagcaagcacatcaagctggaagaggaacggagaagcgaggacgcccagagcaaggccgccctgaccgactggctgcgggctaaggccagcttcgtgatcgagggcctgaaggaggccgacaaggacgagttctgcagatgcgagctgaagctgcagaagtggtacggggacctgcggggaaagcccttcgccatcgaagccgagaacagcatcctggacatcagcggcttcagcaagcagtacaactgtgccttcatctggcagaaggacggcgtgaagaagctgaacctgtacctgatcatcaactacttcaagggcggcaagctgcggttcaagaagatcaaacctgaagccttcgaagccaacagattctacaccgtgatcaacaaaaagagcggcgagatcgtgcccatggaggtgaacttcaacttcgacgaccccaacctgatcatcctgcctctggcctttggcaagagacagggcagagaattcatctggaacgacctgctgtccctggaaaccggcagcctgaagctggccaacggaagagtgatcgagaagacactgtacaacagaagaacccggcaggatgagcctgccctgttcgtggccctgaccttcgagcggcgggaggtcctggactcctccaatatcaaaccaatgaacctgatcggcgtggcaagaggcgaaaacatccccgccgtgatcgccctgaccgaccccgagggctgcccactgagccggtttaaggatagcctgggaaacccaacccacatcctgagaatcggcgagagctataaggagaagcagcggaccatccaggccaagaaggaggtggagcagcggagagccggcggctacagccggaagtacgccagcaaagccaagaatctggcagacgatatggtgagaaacaccgctagagatctgctgtactacgccgtgacccaggatgccatgctgatcttcgccaacctgagccggggcttcggccggcagggcaagcggaccttcatggccgagagacagtacacacggatggaggactggctgaccgccaagctggcctacgagggcctgagcaagacctacctgtccaagacactggcccagtacacctccaagacatgcagcaactgtgggtttaccatcaccagcgccgactacgacagggtgctggagaagctgaagaagacagcaacaggctggatgaccacaattaacggcaaggagctgaaggtggagggccagattacctactacaacagatacaagagacagaacgtagtcaaggacctgtccgtcgagctggatagactgagcgaagaatctgtgaacaacgacatctcctcctggacaaagggcagaagcggagaagctctgagcctcctgaagaaaagattctcccatagacccgtgcaggagaagttcgtgtgcctgaactgcggcttcgagacacacgcagccgagcaagccgccctgaacatcgccagatcctggctgttcctgcggagccaggagtacaagaaataccagacaaacaagacaaccggcaacaccgataagagagccttcgtcgagacctggcagtccttttaccggaagaagcttaaggaggtgtggaaacctgccgtgcggtctggcggatctggcggaggctccacaagcatggccgtggacctgctgcccgcccaggagagcatgaccttcagggacgtggccgtgttcttcagccaggacgagtggctgcacctggacagcgcccagagggccctgtacagggaggtgatgctggagaactacagcaccctggtgagcctgggcatccccttcagcatgcccaaggtgatccaccagctgcagcagggccaggacccctgcatggtggagggcgaggtgcccagcgacatcaccagccccaagaaaaagagaaaagtctaagctgccttctgcggggcttgccttctggccatgcccttcttctctcccttgcacctgtacctcttggtctttgaataaagcctgagtaggaaggctagcaaaaaaaaaaaaaaaaaaaaaaaaaaaaaaaaaaaaaaaaaaaaaaaaaaaaaaaaaaaaaaaaaaaaaaaaaaaaaaaa

SEQ ID NO: 7016 - RNA, 5797 nt, synthetic construct
  source 1..5797: mol_type = other RNA
aggaaataagagagaaaagaagagtaagaagaaatataagagccaccatggcccctaagaagaagcgtaaagtgagccggatggaacgcctcgtctacgaggtgcggcagaagtgcagaaacatcgaggacatctgcatctcctgcggatctctgaacgtgaccctggagcacccactgttcatcggcggcatgtgccagaactgtaaaaactgttttctggagtgtgcctatcaatacgacgatgacggctaccagagctactgcaccatctgttgcggcggaagagaggtgctgatgtgtggaaataacaactgctgccggtgcttctgcgtggaatgcgtggacctgctggtgggccccggcgccgcccaggccgctattaaggaagatccttggaactgctacatgtgcggccacaagggcacatacggcctgctgagacggagagaggactggcctagcagactgcagatgttcttcgccaataaccacgaccaggagttcgacccccctaaggtgtaccctcccgtccccgccgagaagagaaagcccatccgggtcctgagcctgttcgatggcatcgccaccggtctgctggtgctgaaggacctgggcatccaggtggataggtacattgcctccgaggtgtgcgaggactccatcaccgtgggaatggtgcgtcatcagggcaagatcatgtacgtgggcgacgtgcggagcgtgacacagaagcatatccaggagtggggccctttcgacctggtgatcggcggcagcccttgcaatgacctgagcatcgtgaacccagcccggaagggcctgtacgagggaaccggcagactgttcttcgagttttacagactgctgcacgacgcccggcctaaggaaggcgacgaccggcccttcttttggctgttcgagaatgtggtggccatgggagtcagcgacaagcgggatattagccggttcctggagagcaaccccgtgatgatcgatgccaaggaagtgagcgccgcccaccgggccagatacttctggggcaatctgcctggcatgaacagacccctggccagcaccgtgaacgacaagctggagctgcaggagtgcctggagcacggccggatcgccaagttcagcaaggtgagaaccatcaccacccgaagcaacagcatcaaacaaggcaaggaccagcactttcctgtgttcatgaacgagaaggaggacatcctgtggtgtaccgagatggagagagtgttcgggttcccagtccactacacagatgtcagcaacatgtctagactggccagacagagactgctgggaagaagctggtccgtccctgtgatcagacacctgttcgcccctctgaaggagtacttcgcctgcgtgagcagcggcaacagcaacgccaacagccggggccccagcttctctagcggcctggtgccactgtccctgagagggagccacatgggccccatggagatctacaaaaccgtgagcgcctggaagcggcagcctgtgcgcgtgctgagcctgtttcggaatatcgataaagtcctgaaaagcctgggattcctggagagcggctctggctccggcggtggcaccctgaagtacgtggaggatgtgacaaacgtggtcagacgggatgtggagaagtggggccccttcgatctggtgtacggcagcacccaacccctgggcagctcttgtgaccggtgccctggctggtacatgtttcagttccaccggatcctgcagtacgccctgccgagacaggagtcccagcggccattcttttggattttcatggacaacttgctgctgaccgaggatgaccaggaaactaccactcggttcctgcagaccgaagccgtgaccctgcaggacgtgagaggccgggactaccagaacgccatgcgggtgtggtccaacatccctggactgaaaagcaagcacgcacctctgacccctaaagaagaggagtacctgcaggcccaggtgcggagcagaagcaagctggacgcccctaaggtggatctgctggtgaagaattgcctcctgcccctgagagagtacttcaagtatttcagccagaatagtctgcccctgggcggcccaagcagcggcgcccctcctcccagcggcggcagcccagccggctccccaacctctaccgaggagggcacctctgagtccgccacccccgagagcggccctggcacctccaccgagcccagcgagggcagcgcacccggcagccctgccggcagccccacctccacagaggagggaaccagcaccgagcccagcgaaggcagcgccccaggcaccagcaccgagcctagtgagggcggctctggcggcggcagcgcccaggagattaaacggatcaacaagatcagaagaagacttgtgaaagacagcaacaccaagaaggccggcaagacaggccccatgaaaaccctgctggttagagtgatgacacccgatctgagagagcggctggaaaacctgagaaagaagcctgaaaatatcccccagcccatcagcaatacatctagagccaacctgaataagctgctgaccgattacaccgaaatgaagaaggcgatcctgcatgtgtactgggaagagttccagaaggaccctgtgggcctgatgagccgggtggcccagcctgccagcaagaagatcgatcagaacaagctgaaacctgagatggacgagaagggcaacctgaccaccgccggctttgcctgctctcagtgtggccagcccctgttcgtgtacaagctggagcaggtgtctgagaagggcaaggcttacaccaactacttcggacggtgcaatgtggccgagcacgaaaagctgatcctgctggcccagctgaagcccgagaaggatagcgacgaagccgtgacatatagcctgggaaagtttgggcagagggccctggatttctacagcattcatgtgaccaaggagtccacccaccccgtgaagcccctggcccagatcgccggaaacagatacgcctccggacctgtgggaaaggccctgagcgacgcatgtatgggcacaatcgcctccttcctgtctaagtaccaggacatcatcatcgaacaccagaaggtggtgaagggcaaccagaagagactggagagcctgcgggagctggccggcaaggaaaacctggaataccctagcgtgaccctgccacctcagcctcacaccaaggagggcgttgatgcctacaacgaagtgatcgcccgggtgcgaatgtgggtgaacctgaacctgtggcagaagctgaagctaagcagagatgatgccaagcctctgctgagactgaagggattcccttcctttcctctggtcgagagacaggccaacgaagtggactggtgggacatggtgtgtaacgtgaagaagctgatcaacgagaaaaaggaggatggcaaggtgttttggcagaatctggctggctacaagagacaggaagccctgagaccatacctgagcagcgaggaagatcggaagaagggaaagaaattcgctcggtaccagctgggcgacctgctgctgcacctggaaaagaagcacggcgaggactggggaaaggtgtacgacgaggcctgggagcggattgacaagaaagtggaaggcctgagcaagcacatcaagctggaagaggaacggagaagcgaggacgcccagagcaaggccgccctgaccgactggctgcgggctaaggccagcttcgtgatcgagggcctgaaggaggccgacaaggacgagttctgcagatgcgagctgaagctgcagaagtggtacggggacctgcggggaaagcccttcgccatcgaagccgagaacagcatcctggacatcagcggcttcagcaagcagtacaactgtgccttcatctggcagaaggacggcgtgaagaagctgaacctgtacctgatcatcaactacttcaagggcggcaagctgcggttcaagaagatcaaacctgaagccttcgaagccaacagattctacaccgtgatcaacaaaaagagcggcgagatcgtgcccatggaggtgaacttcaacttcgacgaccccaacctgatcatcctgcctctggcctttggcaagagacagggcagagaattcatctggaacgacctgctgtccctggaaaccggcagcctgaagctggccaacggaagagtgatcgagaagacactgtacaacagaagaacccggcaggatgagcctgccctgttcgtggccctgaccttcgagcggcgggaggtcctggactcctccaatatcaaaccaatgaacctgatcggcgtggcaagaggcgaaaacatccccgccgtgatcgccctgaccgaccccgagggctgcccactgagccggtttaaggatagcctgggaaacccaacccacatcctgagaatcggcgagagctataaggagaagcagcggaccatccaggccaagaaggaggtggagcagcggagagccggcggctacagccggaagtacgccagcaaagccaagaatctggcagacgatatggtgagaaacaccgctagagatctgctgtactacgccgtgacccaggatgccatgctgatcttcgccaacctgagccggggcttcggccggcagggcaagcggaccttcatggccgagagacagtacacacggatggaggactggctgaccgccaagctggcctacgagggcctgagcaagacctacctgtccaagacactggcccagtacacctccaagacatgcagcaactgtgggtttaccatcaccagcgccgactacgacagggtgctggagaagctgaagaagacagcaacaggctggatgaccacaattaacggcaaggagctgaaggtggagggccagattacctactacaacagatacaagagacagaacgtagtcaaggacctgtccgtcgagctggatagactgagcgaagaatctgtgaacaacgacatctcctcctggacaaagggcagaagcggagaagctctgagcctcctgaagaaaagattctcccatagacccgtgcaggagaagttcgtgtgcctgaactgcggcttcgagacacacgcagccgagcaagccgccctgaacatcgccagatcctggctgttcctgcggagccaggagtacaagaaataccagacaaacaagacaaccggcaacaccgataagagagccttcgtcgagacctggcagtccttttaccggaagaagcttaaggaggtgtggaaacctgccgtgcggtctggcggatctggcggaggctccacaagcaagcccctggccgtgaggttcgccgacgtggccgtgtacttcagccccgaggagtggggctgcctgaggcccgcccagagggccctgtacagggacgtgatgcaggagacctacggccacctgggcgccctgggcttccccggccccaagcccgccctgatcagctggatggagcaggagagcgaggcctggagccccgccgcccaggaccccgaggagggcgagagcctgggcggcgccctgaccagccccaagaaaaagagaaaagtctaagctgccttctgcggggcttgccttctggccatgcccttcttctctcccttgcacctgtacctcttggtctttgaataaagcctgagtaggaaggctagcaaaaaaaaaaaaaaaaaaaaaaaaaaaaaaaaaaaaaaaaaaaaaaaaaaaaaaaaaaaaaaaaaaaaaaaaaaaaaaaa

SEQ ID NO: 7017 - RNA, 5797 nt, synthetic construct
  source 1..5797: mol_type = other RNA
aggaaataagagagaaaagaagagtaagaagaaatataagagccaccatggcccctaagaagaagcgtaaagtgagccggatggaacgcctcgtctacgaggtgcggcagaagtgcagaaacatcgaggacatctgcatctcctgcggatctctgaacgtgaccctggagcacccactgttcatcggcggcatgtgccagaactgtaaaaactgttttctggagtgtgcctatcaatacgacgatgacggctaccagagctactgcaccatctgttgcggcggaagagaggtgctgatgtgtggaaataacaactgctgccggtgcttctgcgtggaatgcgtggacctgctggtgggccccggcgccgcccaggccgctattaaggaagatccttggaactgctacatgtgcggccacaagggcacatacggcctgctgagacggagagaggactggcctagcagactgcagatgttcttcgccaataaccacgaccaggagttcgacccccctaaggtgtaccctcccgtccccgccgagaagagaaagcccatccgggtcctgagcctgttcgatggcatcgccaccggtctgctggtgctgaaggacctgggcatccaggtggataggtacattgcctccgaggtgtgcgaggactccatcaccgtgggaatggtgcgtcatcagggcaagatcatgtacgtgggcgacgtgcggagcgtgacacagaagcatatccaggagtggggccctttcgacctggtgatcggcggcagcccttgcaatgacctgagcatcgtgaacccagcccggaagggcctgtacgagggaaccggcagactgttcttcgagttttacagactgctgcacgacgcccggcctaaggaaggcgacgaccggcccttcttttggctgttcgagaatgtggtggccatgggagtcagcgacaagcgggatattagccggttcctggagagcaaccccgtgatgatcgatgccaaggaagtgagcgccgcccaccgggccagatacttctggggcaatctgcctggcatgaacagacccctggccagcaccgtgaacgacaagctggagctgcaggagtgcctggagcacggccggatcgccaagttcagcaaggtgagaaccatcaccacccgaagcaacagcatcaaacaaggcaaggaccagcactttcctgtgttcatgaacgagaaggaggacatcctgtggtgtaccgagatggagagagtgttcgggttcccagtccactacacagatgtcagcaacatgtctagactggccagacagagactgctgggaagaagctggtccgtccctgtgatcagacacctgttcgcccctctgaaggagtacttcgcctgcgtgagcagcggcaacagcaacgccaacagccggggccccagcttctctagcggcctggtgccactgtccctgagagggagccacatgggccccatggagatctacaaaaccgtgagcgcctggaagcggcagcctgtgcgcgtgctgagcctgtttcggaatatcgataaagtcctgaaaagcctgggattcctggagagcggctctggctccggcggtggcaccctgaagtacgtggaggatgtgacaaacgtggtcagacgggatgtggagaagtggggccccttcgatctggtgtacggcagcacccaacccctgggcagctcttgtgaccggtgccctggctggtacatgtttcagttccaccggatcctgcagtacgccctgccgagacaggagtcccagcggccattcttttggattttcatggacaacttgctgctgaccgaggatgaccaggaaactaccactcggttcctgcagaccgaagccgtgaccctgcaggacgtgagaggccgggactaccagaacgccatgcgggtgtggtccaacatccctggactgaaaagcaagcacgcacctctgacccctaaagaagaggagtacctgcaggcccaggtgcggagcagaagcaagctggacgcccctaaggtggatctgctggtgaagaattgcctcctgcccctgagagagtacttcaagtatttcagccagaatagtctgcccctgggcggcccaagcagcggcgcccctcctcccagcggcggcagcccagccggctccccaacctctaccgaggagggcacctctgagtccgccacccccgagagcggccctggcacctccaccgagcccagcgagggcagcgcacccggcagccctgccggcagccccacctccacagaggagggaaccagcaccgagcccagcgaaggcagcgccccaggcaccagcaccgagcctagtgagggcggctctggcggcggcagcgcccaggagattaaacggatcaacaagatcagaagaagacttgtgaaagacagcaacaccaagaaggccggcaagacaggccccatgaaaaccctgctggttagagtgatgacacccgatctgagagagcggctggaaaacctgagaaagaagcctgaaaatatcccccagcccatcagcaatacatctagagccaacctgaataagctgctgaccgattacaccgaaatgaagaaggcgatcctgcatgtgtactgggaagagttccagaaggaccctgtgggcctgatgagccgggtggcccagcctgccagcaagaagatcgatcagaacaagctgaaacctgagatggacgagaagggcaacctgaccaccgccggctttgcctgctctcagtgtggccagcccctgttcgtgtacaagctggagcaggtgtctgagaagggcaaggcttacaccaactacttcggacggtgcaatgtggccgagcacgaaaagctgatcctgctggcccagctgaagcccgagaaggatagcgacgaagccgtgacatatagcctgggaaagtttgggcagagggccctggatttctacagcattcatgtgaccaaggagtccacccaccccgtgaagcccctggcccagatcgccggaaacagatacgcctccggacctgtgggaaaggccctgagcgacgcatgtatgggcacaatcgcctccttcctgtctaagtaccaggacatcatcatcgaacaccagaaggtggtgaagggcaaccagaagagactggagagcctgcgggagctggccggcaaggaaaacctggaataccctagcgtgaccctgccacctcagcctcacaccaaggagggcgttgatgcctacaacgaagtgatcgcccgggtgcgaatgtgggtgaacctgaacctgtggcagaagctgaagctaagcagagatgatgccaagcctctgctgagactgaagggattcccttcctttcctctggtcgagagacaggccaacgaagtggactggtgggacatggtgtgtaacgtgaagaagctgatcaacgagaaaaaggaggatggcaaggtgttttggcagaatctggctggctacaagagacaggaagccctgagaccatacctgagcagcgaggaagatcggaagaagggaaagaaattcgctcggtaccagctgggcgacctgctgctgcacctggaaaagaagcacggcgaggactggggaaaggtgtacgacgaggcctgggagcggattgacaagaaagtggaaggcctgagcaagcacatcaagctggaagaggaacggagaagcgaggacgcccagagcaaggccgccctgaccgactggctgcgggctaaggccagcttcgtgatcgagggcctgaaggaggccgacaaggacgagttctgcagatgcgagctgaagctgcagaagtggtacggggacctgcggggaaagcccttcgccatcgaagccgagaacagcatcctggacatcagcggcttcagcaagcagtacaactgtgccttcatctggcagaaggacggcgtgaagaagctgaacctgtacctgatcatcaactacttcaagggcggcaagctgcggttcaagaagatcaaacctgaagccttcgaagccaacagattctacaccgtgatcaacaaaaagagcggcgagatcgtgcccatggaggtgaacttcaacttcgacgaccccaacctgatcatcctgcctctggcctttggcaagagacagggcagagaattcatctggaacgacctgctgtccctggaaaccggcagcctgaagctggccaacggaagagtgatcgagaagacactgtacaacagaagaacccggcaggatgagcctgccctgttcgtggccctgaccttcgagcggcgggaggtcctggactcctccaatatcaaaccaatgaacctgatcggcgtggcaagaggcgaaaacatccccgccgtgatcgccctgaccgaccccgagggctgcccactgagccggtttaaggatagcctgggaaacccaacccacatcctgagaatcggcgagagctataaggagaagcagcggaccatccaggccaagaaggaggtggagcagcggagagccggcggctacagccggaagtacgccagcaaagccaagaatctggcagacgatatggtgagaaacaccgctagagatctgctgtactacgccgtgacccaggatgccatgctgatcttcgccaacctgagccggggcttcggccggcagggcaagcggaccttcatggccgagagacagtacacacggatggaggactggctgaccgccaagctggcctacgagggcctgagcaagacctacctgtccaagacactggcccagtacacctccaagacatgcagcaactgtgggtttaccatcaccagcgccgactacgacagggtgctggagaagctgaagaagacagcaacaggctggatgaccacaattaacggcaaggagctgaaggtggagggccagattacctactacaacagatacaagagacagaacgtagtcaaggacctgtccgtcgagctggatagactgagcgaagaatctgtgaacaacgacatctcctcctggacaaagggcagaagcggagaagctctgagcctcctgaagaaaagattctcccatagacccgtgcaggagaagttcgtgtgcctgaactgcggcttcgagacacacgcagccgagcaagccgccctgaacatcgccagatcctggctgttcctgcggagccaggagtacaagaaataccagacaaacaagacaaccggcaacaccgataagagagccttcgtcgagacctggcagtccttttaccggaagaagcttaaggaggtgtggaaacctgccgtgcggtctggcggatctggcggaggctccacaagcatggcccacttccagggcagcgtgaccttcgaggacgtggccatcgccttcagccagcaggagtgggagagcctggacagcagccagaggggcctgtacagggacgtgatgctggagaactacaggaacctggtgagcatggccggccacagcctgagcaagccccacgtgatcgccctgctggagaggtggaaggagcccaaggtgaccgagaggaaggacggcaggaggtggtgcaccgacaccagccccaagaaaaagagaaaagtctaagctgccttctgcggggcttgccttctggccatgcccttcttctctcccttgcacctgtacctcttggtctttgaataaagcctgagtaggaaggctagcaaaaaaaaaaaaaaaaaaaaaaaaaaaaaaaaaaaaaaaaaaaaaaaaaaaaaaaaaaaaaaaaaaaaaaaaaaaaaaaa

SEQ ID NO: 7018 - RNA, 5797 nt, synthetic construct
  source 1..5797: mol_type = other RNA
aggaaataagagagaaaagaagagtaagaagaaatataagagccaccatggcccctaagaagaagcgtaaagtgagccggatggaacgcctcgtctacgaggtgcggcagaagtgcagaaacatcgaggacatctgcatctcctgcggatctctgaacgtgaccctggagcacccactgttcatcggcggcatgtgccagaactgtaaaaactgttttctggagtgtgcctatcaatacgacgatgacggctaccagagctactgcaccatctgttgcggcggaagagaggtgctgatgtgtggaaataacaactgctgccggtgcttctgcgtggaatgcgtggacctgctggtgggccccggcgccgcccaggccgctattaaggaagatccttggaactgctacatgtgcggccacaagggcacatacggcctgctgagacggagagaggactggcctagcagactgcagatgttcttcgccaataaccacgaccaggagttcgacccccctaaggtgtaccctcccgtccccgccgagaagagaaagcccatccgggtcctgagcctgttcgatggcatcgccaccggtctgctggtgctgaaggacctgggcatccaggtggataggtacattgcctccgaggtgtgcgaggactccatcaccgtgggaatggtgcgtcatcagggcaagatcatgtacgtgggcgacgtgcggagcgtgacacagaagcatatccaggagtggggccctttcgacctggtgatcggcggcagcccttgcaatgacctgagcatcgtgaacccagcccggaagggcctgtacgagggaaccggcagactgttcttcgagttttacagactgctgcacgacgcccggcctaaggaaggcgacgaccggcccttcttttggctgttcgagaatgtggtggccatgggagtcagcgacaagcgggatattagccggttcctggagagcaaccccgtgatgatcgatgccaaggaagtgagcgccgcccaccgggccagatacttctggggcaatctgcctggcatgaacagacccctggccagcaccgtgaacgacaagctggagctgcaggagtgcctggagcacggccggatcgccaagttcagcaaggtgagaaccatcaccacccgaagcaacagcatcaaacaaggcaaggaccagcactttcctgtgttcatgaacgagaaggaggacatcctgtggtgtaccgagatggagagagtgttcgggttcccagtccactacacagatgtcagcaacatgtctagactggccagacagagactgctgggaagaagctggtccgtccctgtgatcagacacctgttcgcccctctgaaggagtacttcgcctgcgtgagcagcggcaacagcaacgccaacagccggggccccagcttctctagcggcctggtgccactgtccctgagagggagccacatgggccccatggagatctacaaaaccgtgagcgcctggaagcggcagcctgtgcgcgtgctgagcctgtttcggaatatcgataaagtcctgaaaagcctgggattcctggagagcggctctggctccggcggtggcaccctgaagtacgtggaggatgtgacaaacgtggtcagacgggatgtggagaagtggggccccttcgatctggtgtacggcagcacccaacccctgggcagctcttgtgaccggtgccctggctggtacatgtttcagttccaccggatcctgcagtacgccctgccgagacaggagtcccagcggccattcttttggattttcatggacaacttgctgctgaccgaggatgaccaggaaactaccactcggttcctgcagaccgaagccgtgaccctgcaggacgtgagaggccgggactaccagaacgccatgcgggtgtggtccaacatccctggactgaaaagcaagcacgcacctctgacccctaaagaagaggagtacctgcaggcccaggtgcggagcagaagcaagctggacgcccctaaggtggatctgctggtgaagaattgcctcctgcccctgagagagtacttcaagtatttcagccagaatagtctgcccctgggcggcccaagcagcggcgcccctcctcccagcggcggcagcccagccggctccccaacctctaccgaggagggcacctctgagtccgccacccccgagagcggccctggcacctccaccgagcccagcgagggcagcgcacccggcagccctgccggcagccccacctccacagaggagggaaccagcaccgagcccagcgaaggcagcgccccaggcaccagcaccgagcctagtgagggcggctctggcggcggcagcgcccaggagattaaacggatcaacaagatcagaagaagacttgtgaaagacagcaacaccaagaaggccggcaagacaggccccatgaaaaccctgctggttagagtgatgacacccgatctgagagagcggctggaaaacctgagaaagaagcctgaaaatatcccccagcccatcagcaatacatctagagccaacctgaataagctgctgaccgattacaccgaaatgaagaaggcgatcctgcatgtgtactgggaagagttccagaaggaccctgtgggcctgatgagccgggtggcccagcctgccagcaagaagatcgatcagaacaagctgaaacctgagatggacgagaagggcaacctgaccaccgccggctttgcctgctctcagtgtggccagcccctgttcgtgtacaagctggagcaggtgtctgagaagggcaaggcttacaccaactacttcggacggtgcaatgtggccgagcacgaaaagctgatcctgctggcccagctgaagcccgagaaggatagcgacgaagccgtgacatatagcctgggaaagtttgggcagagggccctggatttctacagcattcatgtgaccaaggagtccacccaccccgtgaagcccctggcccagatcgccggaaacagatacgcctccggacctgtgggaaaggccctgagcgacgcatgtatgggcacaatcgcctccttcctgtctaagtaccaggacatcatcatcgaacaccagaaggtggtgaagggcaaccagaagagactggagagcctgcgggagctggccggcaaggaaaacctggaataccctagcgtgaccctgccacctcagcctcacaccaaggagggcgttgatgcctacaacgaagtgatcgcccgggtgcgaatgtgggtgaacctgaacctgtggcagaagctgaagctaagcagagatgatgccaagcctctgctgagactgaagggattcccttcctttcctctggtcgagagacaggccaacgaagtggactggtgggacatggtgtgtaacgtgaagaagctgatcaacgagaaaaaggaggatggcaaggtgttttggcagaatctggctggctacaagagacaggaagccctgagaccatacctgagcagcgaggaagatcggaagaagggaaagaaattcgctcggtaccagctgggcgacctgctgctgcacctggaaaagaagcacggcgaggactggggaaaggtgtacgacgaggcctgggagcggattgacaagaaagtggaaggcctgagcaagcacatcaagctggaagaggaacggagaagcgaggacgcccagagcaaggccgccctgaccgactggctgcgggctaaggccagcttcgtgatcgagggcctgaaggaggccgacaaggacgagttctgcagatgcgagctgaagctgcagaagtggtacggggacctgcggggaaagcccttcgccatcgaagccgagaacagcatcctggacatcagcggcttcagcaagcagtacaactgtgccttcatctggcagaaggacggcgtgaagaagctgaacctgtacctgatcatcaactacttcaagggcggcaagctgcggttcaagaagatcaaacctgaagccttcgaagccaacagattctacaccgtgatcaacaaaaagagcggcgagatcgtgcccatggaggtgaacttcaacttcgacgaccccaacctgatcatcctgcctctggcctttggcaagagacagggcagagaattcatctggaacgacctgctgtccctggaaaccggcagcctgaagctggccaacggaagagtgatcgagaagacactgtacaacagaagaacccggcaggatgagcctgccctgttcgtggccctgaccttcgagcggcgggaggtcctggactcctccaatatcaaaccaatgaacctgatcggcgtggcaagaggcgaaaacatccccgccgtgatcgccctgaccgaccccgagggctgcccactgagccggtttaaggatagcctgggaaacccaacccacatcctgagaatcggcgagagctataaggagaagcagcggaccatccaggccaagaaggaggtggagcagcggagagccggcggctacagccggaagtacgccagcaaagccaagaatctggcagacgatatggtgagaaacaccgctagagatctgctgtactacgccgtgacccaggatgccatgctgatcttcgccaacctgagccggggcttcggccggcagggcaagcggaccttcatggccgagagacagtacacacggatggaggactggctgaccgccaagctggcctacgagggcctgagcaagacctacctgtccaagacactggcccagtacacctccaagacatgcagcaactgtgggtttaccatcaccagcgccgactacgacagggtgctggagaagctgaagaagacagcaacaggctggatgaccacaattaacggcaaggagctgaaggtggagggccagattacctactacaacagatacaagagacagaacgtagtcaaggacctgtccgtcgagctggatagactgagcgaagaatctgtgaacaacgacatctcctcctggacaaagggcagaagcggagaagctctgagcctcctgaagaaaagattctcccatagacccgtgcaggagaagttcgtgtgcctgaactgcggcttcgagacacacgcagccgagcaagccgccctgaacatcgccagatcctggctgttcctgcggagccaggagtacaagaaataccagacaaacaagacaaccggcaacaccgataagagagccttcgtcgagacctggcagtccttttaccggaagaagcttaaggaggtgtggaaacctgccgtgcggtctggcggatctggcggaggctccacaagcagccagggcctggtgaccttcggcgacgtggccatcgacttcagccaggaggagtgggagtggctgagccccatccagaggaacctgtacaggaaggtgatgctggagaactacaggaacctggccagcctgggcctgtgcgtgagcaagcccgacgtgatcagcctgctggagcagggcaaggagccctggaccgtgaagaggaggatgaccagggccaggtgccccgacacccagcacctgaccagccccaagaaaaagagaaaagtctaagctgccttctgcggggcttgccttctggccatgcccttcttctctcccttgcacctgtacctcttggtctttgaataaagcctgagtaggaaggctagcaaaaaaaaaaaaaaaaaaaaaaaaaaaaaaaaaaaaaaaaaaaaaaaaaaaaaaaaaaaaaaaaaaaaaaaaaaaaaaaa

SEQ ID NO: 7019 - RNA, 5797 nt, synthetic construct
  source 1..5797: mol_type = other RNA
aggaaataagagagaaaagaagagtaagaagaaatataagagccaccatggcccctaagaagaagcgtaaagtgagccggatggaacgcctcgtctacgaggtgcggcagaagtgcagaaacatcgaggacatctgcatctcctgcggatctctgaacgtgaccctggagcacccactgttcatcggcggcatgtgccagaactgtaaaaactgttttctggagtgtgcctatcaatacgacgatgacggctaccagagctactgcaccatctgttgcggcggaagagaggtgctgatgtgtggaaataacaactgctgccggtgcttctgcgtggaatgcgtggacctgctggtgggccccggcgccgcccaggccgctattaaggaagatccttggaactgctacatgtgcggccacaagggcacatacggcctgctgagacggagagaggactggcctagcagactgcagatgttcttcgccaataaccacgaccaggagttcgacccccctaaggtgtaccctcccgtccccgccgagaagagaaagcccatccgggtcctgagcctgttcgatggcatcgccaccggtctgctggtgctgaaggacctgggcatccaggtggataggtacattgcctccgaggtgtgcgaggactccatcaccgtgggaatggtgcgtcatcagggcaagatcatgtacgtgggcgacgtgcggagcgtgacacagaagcatatccaggagtggggccctttcgacctggtgatcggcggcagcccttgcaatgacctgagcatcgtgaacccagcccggaagggcctgtacgagggaaccggcagactgttcttcgagttttacagactgctgcacgacgcccggcctaaggaaggcgacgaccggcccttcttttggctgttcgagaatgtggtggccatgggagtcagcgacaagcgggatattagccggttcctggagagcaaccccgtgatgatcgatgccaaggaagtgagcgccgcccaccgggccagatacttctggggcaatctgcctggcatgaacagacccctggccagcaccgtgaacgacaagctggagctgcaggagtgcctggagcacggccggatcgccaagttcagcaaggtgagaaccatcaccacccgaagcaacagcatcaaacaaggcaaggaccagcactttcctgtgttcatgaacgagaaggaggacatcctgtggtgtaccgagatggagagagtgttcgggttcccagtccactacacagatgtcagcaacatgtctagactggccagacagagactgctgggaagaagctggtccgtccctgtgatcagacacctgttcgcccctctgaaggagtacttcgcctgcgtgagcagcggcaacagcaacgccaacagccggggccccagcttctctagcggcctggtgccactgtccctgagagggagccacatgggccccatggagatctacaaaaccgtgagcgcctggaagcggcagcctgtgcgcgtgctgagcctgtttcggaatatcgataaagtcctgaaaagcctgggattcctggagagcggctctggctccggcggtggcaccctgaagtacgtggaggatgtgacaaacgtggtcagacgggatgtggagaagtggggccccttcgatctggtgtacggcagcacccaacccctgggcagctcttgtgaccggtgccctggctggtacatgtttcagttccaccggatcctgcagtacgccctgccgagacaggagtcccagcggccattcttttggattttcatggacaacttgctgctgaccgaggatgaccaggaaactaccactcggttcctgcagaccgaagccgtgaccctgcaggacgtgagaggccgggactaccagaacgccatgcgggtgtggtccaacatccctggactgaaaagcaagcacgcacctctgacccctaaagaagaggagtacctgcaggcccaggtgcggagcagaagcaagctggacgcccctaaggtggatctgctggtgaagaattgcctcctgcccctgagagagtacttcaagtatttcagccagaatagtctgcccctgggcggcccaagcagcggcgcccctcctcccagcggcggcagcccagccggctccccaacctctaccgaggagggcacctctgagtccgccacccccgagagcggccctggcacctccaccgagcccagcgagggcagcgcacccggcagccctgccggcagccccacctccacagaggagggaaccagcaccgagcccagcgaaggcagcgccccaggcaccagcaccgagcctagtgagggcggctctggcggcggcagcgcccaggagattaaacggatcaacaagatcagaagaagacttgtgaaagacagcaacaccaagaaggccggcaagacaggccccatgaaaaccctgctggttagagtgatgacacccgatctgagagagcggctggaaaacctgagaaagaagcctgaaaatatcccccagcccatcagcaatacatctagagccaacctgaataagctgctgaccgattacaccgaaatgaagaaggcgatcctgcatgtgtactgggaagagttccagaaggaccctgtgggcctgatgagccgggtggcccagcctgccagcaagaagatcgatcagaacaagctgaaacctgagatggacgagaagggcaacctgaccaccgccggctttgcctgctctcagtgtggccagcccctgttcgtgtacaagctggagcaggtgtctgagaagggcaaggcttacaccaactacttcggacggtgcaatgtggccgagcacgaaaagctgatcctgctggcccagctgaagcccgagaaggatagcgacgaagccgtgacatatagcctgggaaagtttgggcagagggccctggatttctacagcattcatgtgaccaaggagtccacccaccccgtgaagcccctggcccagatcgccggaaacagatacgcctccggacctgtgggaaaggccctgagcgacgcatgtatgggcacaatcgcctccttcctgtctaagtaccaggacatcatcatcgaacaccagaaggtggtgaagggcaaccagaagagactggagagcctgcgggagctggccggcaaggaaaacctggaataccctagcgtgaccctgccacctcagcctcacaccaaggagggcgttgatgcctacaacgaagtgatcgcccgggtgcgaatgtgggtgaacctgaacctgtggcagaagctgaagctaagcagagatgatgccaagcctctgctgagactgaagggattcccttcctttcctctggtcgagagacaggccaacgaagtggactggtgggacatggtgtgtaacgtgaagaagctgatcaacgagaaaaaggaggatggcaaggtgttttggcagaatctggctggctacaagagacaggaagccctgagaccatacctgagcagcgaggaagatcggaagaagggaaagaaattcgctcggtaccagctgggcgacctgctgctgcacctggaaaagaagcacggcgaggactggggaaaggtgtacgacgaggcctgggagcggattgacaagaaagtggaaggcctgagcaagcacatcaagctggaagaggaacggagaagcgaggacgcccagagcaaggccgccctgaccgactggctgcgggctaaggccagcttcgtgatcgagggcctgaaggaggccgacaaggacgagttctgcagatgcgagctgaagctgcagaagtggtacggggacctgcggggaaagcccttcgccatcgaagccgagaacagcatcctggacatcagcggcttcagcaagcagtacaactgtgccttcatctggcagaaggacggcgtgaagaagctgaacctgtacctgatcatcaactacttcaagggcggcaagctgcggttcaagaagatcaaacctgaagccttcgaagccaacagattctacaccgtgatcaacaaaaagagcggcgagatcgtgcccatggaggtgaacttcaacttcgacgaccccaacctgatcatcctgcctctggcctttggcaagagacagggcagagaattcatctggaacgacctgctgtccctggaaaccggcagcctgaagctggccaacggaagagtgatcgagaagacactgtacaacagaagaacccggcaggatgagcctgccctgttcgtggccctgaccttcgagcggcgggaggtcctggactcctccaatatcaaaccaatgaacctgatcggcgtggcaagaggcgaaaacatccccgccgtgatcgccctgaccgaccccgagggctgcccactgagccggtttaaggatagcctgggaaacccaacccacatcctgagaatcggcgagagctataaggagaagcagcggaccatccaggccaagaaggaggtggagcagcggagagccggcggctacagccggaagtacgccagcaaagccaagaatctggcagacgatatggtgagaaacaccgctagagatctgctgtactacgccgtgacccaggatgccatgctgatcttcgccaacctgagccggggcttcggccggcagggcaagcggaccttcatggccgagagacagtacacacggatggaggactggctgaccgccaagctggcctacgagggcctgagcaagacctacctgtccaagacactggcccagtacacctccaagacatgcagcaactgtgggtttaccatcaccagcgccgactacgacagggtgctggagaagctgaagaagacagcaacaggctggatgaccacaattaacggcaaggagctgaaggtggagggccagattacctactacaacagatacaagagacagaacgtagtcaaggacctgtccgtcgagctggatagactgagcgaagaatctgtgaacaacgacatctcctcctggacaaagggcagaagcggagaagctctgagcctcctgaagaaaagattctcccatagacccgtgcaggagaagttcgtgtgcctgaactgcggcttcgagacacacgcagccgagcaagccgccctgaacatcgccagatcctggctgttcctgcggagccaggagtacaagaaataccagacaaacaagacaaccggcaacaccgataagagagccttcgtcgagacctggcagtccttttaccggaagaagcttaaggaggtgtggaaacctgccgtgcggtctggcggatctggcggaggctccacaagccccagcgtgcccgtgaccttcagggacgtgttcgtgcagttcagcagggacgagtgggccctgctggacgacgagcagaaggagctgcaccagagcgtgatgcagagcaactacgagatgctgatgagcctgtactgcgacctggccaagcccgaggtgagcctgcagatggagaggggcgagccctgcctgcccgccgagcccgacctgcagggcaccgccgtgagcctgaaccccgccgccaccagccccaagaaaaagagaaaagtctaagctgccttctgcggggcttgccttctggccatgcccttcttctctcccttgcacctgtacctcttggtctttgaataaagcctgagtaggaaggctagcaaaaaaaaaaaaaaaaaaaaaaaaaaaaaaaaaaaaaaaaaaaaaaaaaaaaaaaaaaaaaaaaaaaaaaaaaaaaaaaa

SEQ ID NO: 7020 - RNA, 5797 nt, synthetic construct
  source 1..5797: mol_type = other RNA
aggaaataagagagaaaagaagagtaagaagaaatataagagccaccatggcccctaagaagaagcgtaaagtgagccggatggaacgcctcgtctacgaggtgcggcagaagtgcagaaacatcgaggacatctgcatctcctgcggatctctgaacgtgaccctggagcacccactgttcatcggcggcatgtgccagaactgtaaaaactgttttctggagtgtgcctatcaatacgacgatgacggctaccagagctactgcaccatctgttgcggcggaagagaggtgctgatgtgtggaaataacaactgctgccggtgcttctgcgtggaatgcgtggacctgctggtgggccccggcgccgcccaggccgctattaaggaagatccttggaactgctacatgtgcggccacaagggcacatacggcctgctgagacggagagaggactggcctagcagactgcagatgttcttcgccaataaccacgaccaggagttcgacccccctaaggtgtaccctcccgtccccgccgagaagagaaagcccatccgggtcctgagcctgttcgatggcatcgccaccggtctgctggtgctgaaggacctgggcatccaggtggataggtacattgcctccgaggtgtgcgaggactccatcaccgtgggaatggtgcgtcatcagggcaagatcatgtacgtgggcgacgtgcggagcgtgacacagaagcatatccaggagtggggccctttcgacctggtgatcggcggcagcccttgcaatgacctgagcatcgtgaacccagcccggaagggcctgtacgagggaaccggcagactgttcttcgagttttacagactgctgcacgacgcccggcctaaggaaggcgacgaccggcccttcttttggctgttcgagaatgtggtggccatgggagtcagcgacaagcgggatattagccggttcctggagagcaaccccgtgatgatcgatgccaaggaagtgagcgccgcccaccgggccagatacttctggggcaatctgcctggcatgaacagacccctggccagcaccgtgaacgacaagctggagctgcaggagtgcctggagcacggccggatcgccaagttcagcaaggtgagaaccatcaccacccgaagcaacagcatcaaacaaggcaaggaccagcactttcctgtgttcatgaacgagaaggaggacatcctgtggtgtaccgagatggagagagtgttcgggttcccagtccactacacagatgtcagcaacatgtctagactggccagacagagactgctgggaagaagctggtccgtccctgtgatcagacacctgttcgcccctctgaaggagtacttcgcctgcgtgagcagcggcaacagcaacgccaacagccggggccccagcttctctagcggcctggtgccactgtccctgagagggagccacatgggccccatggagatctacaaaaccgtgagcgcctggaagcggcagcctgtgcgcgtgctgagcctgtttcggaatatcgataaagtcctgaaaagcctgggattcctggagagcggctctggctccggcggtggcaccctgaagtacgtggaggatgtgacaaacgtggtcagacgggatgtggagaagtggggccccttcgatctggtgtacggcagcacccaacccctgggcagctcttgtgaccggtgccctggctggtacatgtttcagttccaccggatcctgcagtacgccctgccgagacaggagtcccagcggccattcttttggattttcatggacaacttgctgctgaccgaggatgaccaggaaactaccactcggttcctgcagaccgaagccgtgaccctgcaggacgtgagaggccgggactaccagaacgccatgcgggtgtggtccaacatccctggactgaaaagcaagcacgcacctctgacccctaaagaagaggagtacctgcaggcccaggtgcggagcagaagcaagctggacgcccctaaggtggatctgctggtgaagaattgcctcctgcccctgagagagtacttcaagtatttcagccagaatagtctgcccctgggcggcccaagcagcggcgcccctcctcccagcggcggcagcccagccggctccccaacctctaccgaggagggcacctctgagtccgccacccccgagagcggccctggcacctccaccgagcccagcgagggcagcgcacccggcagccctgccggcagccccacctccacagaggagggaaccagcaccgagcccagcgaaggcagcgccccaggcaccagcaccgagcctagtgagggcggctctggcggcggcagcgcccaggagattaaacggatcaacaagatcagaagaagacttgtgaaagacagcaacaccaagaaggccggcaagacaggccccatgaaaaccctgctggttagagtgatgacacccgatctgagagagcggctggaaaacctgagaaagaagcctgaaaatatcccccagcccatcagcaatacatctagagccaacctgaataagctgctgaccgattacaccgaaatgaagaaggcgatcctgcatgtgtactgggaagagttccagaaggaccctgtgggcctgatgagccgggtggcccagcctgccagcaagaagatcgatcagaacaagctgaaacctgagatggacgagaagggcaacctgaccaccgccggctttgcctgctctcagtgtggccagcccctgttcgtgtacaagctggagcaggtgtctgagaagggcaaggcttacaccaactacttcggacggtgcaatgtggccgagcacgaaaagctgatcctgctggcccagctgaagcccgagaaggatagcgacgaagccgtgacatatagcctgggaaagtttgggcagagggccctggatttctacagcattcatgtgaccaaggagtccacccaccccgtgaagcccctggcccagatcgccggaaacagatacgcctccggacctgtgggaaaggccctgagcgacgcatgtatgggcacaatcgcctccttcctgtctaagtaccaggacatcatcatcgaacaccagaaggtggtgaagggcaaccagaagagactggagagcctgcgggagctggccggcaaggaaaacctggaataccctagcgtgaccctgccacctcagcctcacaccaaggagggcgttgatgcctacaacgaagtgatcgcccgggtgcgaatgtgggtgaacctgaacctgtggcagaagctgaagctaagcagagatgatgccaagcctctgctgagactgaagggattcccttcctttcctctggtcgagagacaggccaacgaagtggactggtgggacatggtgtgtaacgtgaagaagctgatcaacgagaaaaaggaggatggcaaggtgttttggcagaatctggctggctacaagagacaggaagccctgagaccatacctgagcagcgaggaagatcggaagaagggaaagaaattcgctcggtaccagctgggcgacctgctgctgcacctggaaaagaagcacggcgaggactggggaaaggtgtacgacgaggcctgggagcggattgacaagaaagtggaaggcctgagcaagcacatcaagctggaagaggaacggagaagcgaggacgcccagagcaaggccgccctgaccgactggctgcgggctaaggccagcttcgtgatcgagggcctgaaggaggccgacaaggacgagttctgcagatgcgagctgaagctgcagaagtggtacggggacctgcggggaaagcccttcgccatcgaagccgagaacagcatcctggacatcagcggcttcagcaagcagtacaactgtgccttcatctggcagaaggacggcgtgaagaagctgaacctgtacctgatcatcaactacttcaagggcggcaagctgcggttcaagaagatcaaacctgaagccttcgaagccaacagattctacaccgtgatcaacaaaaagagcggcgagatcgtgcccatggaggtgaacttcaacttcgacgaccccaacctgatcatcctgcctctggcctttggcaagagacagggcagagaattcatctggaacgacctgctgtccctggaaaccggcagcctgaagctggccaacggaagagtgatcgagaagacactgtacaacagaagaacccggcaggatgagcctgccctgttcgtggccctgaccttcgagcggcgggaggtcctggactcctccaatatcaaaccaatgaacctgatcggcgtggcaagaggcgaaaacatccccgccgtgatcgccctgaccgaccccgagggctgcccactgagccggtttaaggatagcctgggaaacccaacccacatcctgagaatcggcgagagctataaggagaagcagcggaccatccaggccaagaaggaggtggagcagcggagagccggcggctacagccggaagtacgccagcaaagccaagaatctggcagacgatatggtgagaaacaccgctagagatctgctgtactacgccgtgacccaggatgccatgctgatcttcgccaacctgagccggggcttcggccggcagggcaagcggaccttcatggccgagagacagtacacacggatggaggactggctgaccgccaagctggcctacgagggcctgagcaagacctacctgtccaagacactggcccagtacacctccaagacatgcagcaactgtgggtttaccatcaccagcgccgactacgacagggtgctggagaagctgaagaagacagcaacaggctggatgaccacaattaacggcaaggagctgaaggtggagggccagattacctactacaacagatacaagagacagaacgtagtcaaggacctgtccgtcgagctggatagactgagcgaagaatctgtgaacaacgacatctcctcctggacaaagggcagaagcggagaagctctgagcctcctgaagaaaagattctcccatagacccgtgcaggagaagttcgtgtgcctgaactgcggcttcgagacacacgcagccgagcaagccgccctgaacatcgccagatcctggctgttcctgcggagccaggagtacaagaaataccagacaaacaagacaaccggcaacaccgataagagagccttcgtcgagacctggcagtccttttaccggaagaagcttaaggaggtgtggaaacctgccgtgcggtctggcggatctggcggaggctccacaagcttccaggagagcgtgaccttcgaggacgtggccatctacttcagcgagaacgagtggaccggcctggcccccgcccagagggccctgtacagggacgtgatgctggagaactacggcgccgtggccagcctggccgccttccccttccccaagcccgccctgatcttccagctggagcagggcgaggccccctggagcagcgccccccagggcgccctggacggcgagggccccaggggcatcaccagccccaagaaaaagagaaaagtctaagctgccttctgcggggcttgccttctggccatgcccttcttctctcccttgcacctgtacctcttggtctttgaataaagcctgagtaggaaggctagcaaaaaaaaaaaaaaaaaaaaaaaaaaaaaaaaaaaaaaaaaaaaaaaaaaaaaaaaaaaaaaaaaaaaaaaaaaaaaaaa

SEQ ID NO: 7021 - RNA, 5797 nt, synthetic construct
  source 1..5797: mol_type = other RNA
aggaaataagagagaaaagaagagtaagaagaaatataagagccaccatggcccctaagaagaagcgtaaagtgagccggatggaacgcctcgtctacgaggtgcggcagaagtgcagaaacatcgaggacatctgcatctcctgcggatctctgaacgtgaccctggagcacccactgttcatcggcggcatgtgccagaactgtaaaaactgttttctggagtgtgcctatcaatacgacgatgacggctaccagagctactgcaccatctgttgcggcggaagagaggtgctgatgtgtggaaataacaactgctgccggtgcttctgcgtggaatgcgtggacctgctggtgggccccggcgccgcccaggccgctattaaggaagatccttggaactgctacatgtgcggccacaagggcacatacggcctgctgagacggagagaggactggcctagcagactgcagatgttcttcgccaataaccacgaccaggagttcgacccccctaaggtgtaccctcccgtccccgccgagaagagaaagcccatccgggtcctgagcctgttcgatggcatcgccaccggtctgctggtgctgaaggacctgggcatccaggtggataggtacattgcctccgaggtgtgcgaggactccatcaccgtgggaatggtgcgtcatcagggcaagatcatgtacgtgggcgacgtgcggagcgtgacacagaagcatatccaggagtggggccctttcgacctggtgatcggcggcagcccttgcaatgacctgagcatcgtgaacccagcccggaagggcctgtacgagggaaccggcagactgttcttcgagttttacagactgctgcacgacgcccggcctaaggaaggcgacgaccggcccttcttttggctgttcgagaatgtggtggccatgggagtcagcgacaagcgggatattagccggttcctggagagcaaccccgtgatgatcgatgccaaggaagtgagcgccgcccaccgggccagatacttctggggcaatctgcctggcatgaacagacccctggccagcaccgtgaacgacaagctggagctgcaggagtgcctggagcacggccggatcgccaagttcagcaaggtgagaaccatcaccacccgaagcaacagcatcaaacaaggcaaggaccagcactttcctgtgttcatgaacgagaaggaggacatcctgtggtgtaccgagatggagagagtgttcgggttcccagtccactacacagatgtcagcaacatgtctagactggccagacagagactgctgggaagaagctggtccgtccctgtgatcagacacctgttcgcccctctgaaggagtacttcgcctgcgtgagcagcggcaacagcaacgccaacagccggggccccagcttctctagcggcctggtgccactgtccctgagagggagccacatgggccccatggagatctacaaaaccgtgagcgcctggaagcggcagcctgtgcgcgtgctgagcctgtttcggaatatcgataaagtcctgaaaagcctgggattcctggagagcggctctggctccggcggtggcaccctgaagtacgtggaggatgtgacaaacgtggtcagacgggatgtggagaagtggggccccttcgatctggtgtacggcagcacccaacccctgggcagctcttgtgaccggtgccctggctggtacatgtttcagttccaccggatcctgcagtacgccctgccgagacaggagtcccagcggccattcttttggattttcatggacaacttgctgctgaccgaggatgaccaggaaactaccactcggttcctgcagaccgaagccgtgaccctgcaggacgtgagaggccgggactaccagaacgccatgcgggtgtggtccaacatccctggactgaaaagcaagcacgcacctctgacccctaaagaagaggagtacctgcaggcccaggtgcggagcagaagcaagctggacgcccctaaggtggatctgctggtgaagaattgcctcctgcccctgagagagtacttcaagtatttcagccagaatagtctgcccctgggcggcccaagcagcggcgcccctcctcccagcggcggcagcccagccggctccccaacctctaccgaggagggcacctctgagtccgccacccccgagagcggccctggcacctccaccgagcccagcgagggcagcgcacccggcagccctgccggcagccccacctccacagaggagggaaccagcaccgagcccagcgaaggcagcgccccaggcaccagcaccgagcctagtgagggcggctctggcggcggcagcgcccaggagattaaacggatcaacaagatcagaagaagacttgtgaaagacagcaacaccaagaaggccggcaagacaggccccatgaaaaccctgctggttagagtgatgacacccgatctgagagagcggctggaaaacctgagaaagaagcctgaaaatatcccccagcccatcagcaatacatctagagccaacctgaataagctgctgaccgattacaccgaaatgaagaaggcgatcctgcatgtgtactgggaagagttccagaaggaccctgtgggcctgatgagccgggtggcccagcctgccagcaagaagatcgatcagaacaagctgaaacctgagatggacgagaagggcaacctgaccaccgccggctttgcctgctctcagtgtggccagcccctgttcgtgtacaagctggagcaggtgtctgagaagggcaaggcttacaccaactacttcggacggtgcaatgtggccgagcacgaaaagctgatcctgctggcccagctgaagcccgagaaggatagcgacgaagccgtgacatatagcctgggaaagtttgggcagagggccctggatttctacagcattcatgtgaccaaggagtccacccaccccgtgaagcccctggcccagatcgccggaaacagatacgcctccggacctgtgggaaaggccctgagcgacgcatgtatgggcacaatcgcctccttcctgtctaagtaccaggacatcatcatcgaacaccagaaggtggtgaagggcaaccagaagagactggagagcctgcgggagctggccggcaaggaaaacctggaataccctagcgtgaccctgccacctcagcctcacaccaaggagggcgttgatgcctacaacgaagtgatcgcccgggtgcgaatgtgggtgaacctgaacctgtggcagaagctgaagctaagcagagatgatgccaagcctctgctgagactgaagggattcccttcctttcctctggtcgagagacaggccaacgaagtggactggtgggacatggtgtgtaacgtgaagaagctgatcaacgagaaaaaggaggatggcaaggtgttttggcagaatctggctggctacaagagacaggaagccctgagaccatacctgagcagcgaggaagatcggaagaagggaaagaaattcgctcggtaccagctgggcgacctgctgctgcacctggaaaagaagcacggcgaggactggggaaaggtgtacgacgaggcctgggagcggattgacaagaaagtggaaggcctgagcaagcacatcaagctggaagaggaacggagaagcgaggacgcccagagcaaggccgccctgaccgactggctgcgggctaaggccagcttcgtgatcgagggcctgaaggaggccgacaaggacgagttctgcagatgcgagctgaagctgcagaagtggtacggggacctgcggggaaagcccttcgccatcgaagccgagaacagcatcctggacatcagcggcttcagcaagcagtacaactgtgccttcatctggcagaaggacggcgtgaagaagctgaacctgtacctgatcatcaactacttcaagggcggcaagctgcggttcaagaagatcaaacctgaagccttcgaagccaacagattctacaccgtgatcaacaaaaagagcggcgagatcgtgcccatggaggtgaacttcaacttcgacgaccccaacctgatcatcctgcctctggcctttggcaagagacagggcagagaattcatctggaacgacctgctgtccctggaaaccggcagcctgaagctggccaacggaagagtgatcgagaagacactgtacaacagaagaacccggcaggatgagcctgccctgttcgtggccctgaccttcgagcggcgggaggtcctggactcctccaatatcaaaccaatgaacctgatcggcgtggcaagaggcgaaaacatccccgccgtgatcgccctgaccgaccccgagggctgcccactgagccggtttaaggatagcctgggaaacccaacccacatcctgagaatcggcgagagctataaggagaagcagcggaccatccaggccaagaaggaggtggagcagcggagagccggcggctacagccggaagtacgccagcaaagccaagaatctggcagacgatatggtgagaaacaccgctagagatctgctgtactacgccgtgacccaggatgccatgctgatcttcgccaacctgagccggggcttcggccggcagggcaagcggaccttcatggccgagagacagtacacacggatggaggactggctgaccgccaagctggcctacgagggcctgagcaagacctacctgtccaagacactggcccagtacacctccaagacatgcagcaactgtgggtttaccatcaccagcgccgactacgacagggtgctggagaagctgaagaagacagcaacaggctggatgaccacaattaacggcaaggagctgaaggtggagggccagattacctactacaacagatacaagagacagaacgtagtcaaggacctgtccgtcgagctggatagactgagcgaagaatctgtgaacaacgacatctcctcctggacaaagggcagaagcggagaagctctgagcctcctgaagaaaagattctcccatagacccgtgcaggagaagttcgtgtgcctgaactgcggcttcgagacacacgcagccgagcaagccgccctgaacatcgccagatcctggctgttcctgcggagccaggagtacaagaaataccagacaaacaagacaaccggcaacaccgataagagagccttcgtcgagacctggcagtccttttaccggaagaagcttaaggaggtgtggaaacctgccgtgcggtctggcggatctggcggaggctccacaagcatgggccccctgaccatcagggacgtgaccgtggagttcagcctggaggagtggcactgcctggacaccgcccagcagaacctgtacagggacgtgatgctggagaactacaggaacctggtgttcctgggcatcgccgtgagcaagcccgacctgatcacctgcctggagcagggcaaggagccctgcaacatgaagaggcacgagatggtggccaagccccccgtgatgtgcagccacatcaccagccccaagaaaaagagaaaagtctaagctgccttctgcggggcttgccttctggccatgcccttcttctctcccttgcacctgtacctcttggtctttgaataaagcctgagtaggaaggctagcaaaaaaaaaaaaaaaaaaaaaaaaaaaaaaaaaaaaaaaaaaaaaaaaaaaaaaaaaaaaaaaaaaaaaaaaaaaaaaaa

SEQ ID NO: 7022 - RNA, 5797 nt, synthetic construct
  source 1..5797: mol_type = other RNA
aggaaataagagagaaaagaagagtaagaagaaatataagagccaccatggcccctaagaagaagcgtaaagtgagccggatggaacgcctcgtctacgaggtgcggcagaagtgcagaaacatcgaggacatctgcatctcctgcggatctctgaacgtgaccctggagcacccactgttcatcggcggcatgtgccagaactgtaaaaactgttttctggagtgtgcctatcaatacgacgatgacggctaccagagctactgcaccatctgttgcggcggaagagaggtgctgatgtgtggaaataacaactgctgccggtgcttctgcgtggaatgcgtggacctgctggtgggccccggcgccgcccaggccgctattaaggaagatccttggaactgctacatgtgcggccacaagggcacatacggcctgctgagacggagagaggactggcctagcagactgcagatgttcttcgccaataaccacgaccaggagttcgacccccctaaggtgtaccctcccgtccccgccgagaagagaaagcccatccgggtcctgagcctgttcgatggcatcgccaccggtctgctggtgctgaaggacctgggcatccaggtggataggtacattgcctccgaggtgtgcgaggactccatcaccgtgggaatggtgcgtcatcagggcaagatcatgtacgtgggcgacgtgcggagcgtgacacagaagcatatccaggagtggggccctttcgacctggtgatcggcggcagcccttgcaatgacctgagcatcgtgaacccagcccggaagggcctgtacgagggaaccggcagactgttcttcgagttttacagactgctgcacgacgcccggcctaaggaaggcgacgaccggcccttcttttggctgttcgagaatgtggtggccatgggagtcagcgacaagcgggatattagccggttcctggagagcaaccccgtgatgatcgatgccaaggaagtgagcgccgcccaccgggccagatacttctggggcaatctgcctggcatgaacagacccctggccagcaccgtgaacgacaagctggagctgcaggagtgcctggagcacggccggatcgccaagttcagcaaggtgagaaccatcaccacccgaagcaacagcatcaaacaaggcaaggaccagcactttcctgtgttcatgaacgagaaggaggacatcctgtggtgtaccgagatggagagagtgttcgggttcccagtccactacacagatgtcagcaacatgtctagactggccagacagagactgctgggaagaagctggtccgtccctgtgatcagacacctgttcgcccctctgaaggagtacttcgcctgcgtgagcagcggcaacagcaacgccaacagccggggccccagcttctctagcggcctggtgccactgtccctgagagggagccacatgggccccatggagatctacaaaaccgtgagcgcctggaagcggcagcctgtgcgcgtgctgagcctgtttcggaatatcgataaagtcctgaaaagcctgggattcctggagagcggctctggctccggcggtggcaccctgaagtacgtggaggatgtgacaaacgtggtcagacgggatgtggagaagtggggccccttcgatctggtgtacggcagcacccaacccctgggcagctcttgtgaccggtgccctggctggtacatgtttcagttccaccggatcctgcagtacgccctgccgagacaggagtcccagcggccattcttttggattttcatggacaacttgctgctgaccgaggatgaccaggaaactaccactcggttcctgcagaccgaagccgtgaccctgcaggacgtgagaggccgggactaccagaacgccatgcgggtgtggtccaacatccctggactgaaaagcaagcacgcacctctgacccctaaagaagaggagtacctgcaggcccaggtgcggagcagaagcaagctggacgcccctaaggtggatctgctggtgaagaattgcctcctgcccctgagagagtacttcaagtatttcagccagaatagtctgcccctgggcggcccaagcagcggcgcccctcctcccagcggcggcagcccagccggctccccaacctctaccgaggagggcacctctgagtccgccacccccgagagcggccctggcacctccaccgagcccagcgagggcagcgcacccggcagccctgccggcagccccacctccacagaggagggaaccagcaccgagcccagcgaaggcagcgccccaggcaccagcaccgagcctagtgagggcggctctggcggcggcagcgcccaggagattaaacggatcaacaagatcagaagaagacttgtgaaagacagcaacaccaagaaggccggcaagacaggccccatgaaaaccctgctggttagagtgatgacacccgatctgagagagcggctggaaaacctgagaaagaagcctgaaaatatcccccagcccatcagcaatacatctagagccaacctgaataagctgctgaccgattacaccgaaatgaagaaggcgatcctgcatgtgtactgggaagagttccagaaggaccctgtgggcctgatgagccgggtggcccagcctgccagcaagaagatcgatcagaacaagctgaaacctgagatggacgagaagggcaacctgaccaccgccggctttgcctgctctcagtgtggccagcccctgttcgtgtacaagctggagcaggtgtctgagaagggcaaggcttacaccaactacttcggacggtgcaatgtggccgagcacgaaaagctgatcctgctggcccagctgaagcccgagaaggatagcgacgaagccgtgacatatagcctgggaaagtttgggcagagggccctggatttctacagcattcatgtgaccaaggagtccacccaccccgtgaagcccctggcccagatcgccggaaacagatacgcctccggacctgtgggaaaggccctgagcgacgcatgtatgggcacaatcgcctccttcctgtctaagtaccaggacatcatcatcgaacaccagaaggtggtgaagggcaaccagaagagactggagagcctgcgggagctggccggcaaggaaaacctggaataccctagcgtgaccctgccacctcagcctcacaccaaggagggcgttgatgcctacaacgaagtgatcgcccgggtgcgaatgtgggtgaacctgaacctgtggcagaagctgaagctaagcagagatgatgccaagcctctgctgagactgaagggattcccttcctttcctctggtcgagagacaggccaacgaagtggactggtgggacatggtgtgtaacgtgaagaagctgatcaacgagaaaaaggaggatggcaaggtgttttggcagaatctggctggctacaagagacaggaagccctgagaccatacctgagcagcgaggaagatcggaagaagggaaagaaattcgctcggtaccagctgggcgacctgctgctgcacctggaaaagaagcacggcgaggactggggaaaggtgtacgacgaggcctgggagcggattgacaagaaagtggaaggcctgagcaagcacatcaagctggaagaggaacggagaagcgaggacgcccagagcaaggccgccctgaccgactggctgcgggctaaggccagcttcgtgatcgagggcctgaaggaggccgacaaggacgagttctgcagatgcgagctgaagctgcagaagtggtacggggacctgcggggaaagcccttcgccatcgaagccgagaacagcatcctggacatcagcggcttcagcaagcagtacaactgtgccttcatctggcagaaggacggcgtgaagaagctgaacctgtacctgatcatcaactacttcaagggcggcaagctgcggttcaagaagatcaaacctgaagccttcgaagccaacagattctacaccgtgatcaacaaaaagagcggcgagatcgtgcccatggaggtgaacttcaacttcgacgaccccaacctgatcatcctgcctctggcctttggcaagagacagggcagagaattcatctggaacgacctgctgtccctggaaaccggcagcctgaagctggccaacggaagagtgatcgagaagacactgtacaacagaagaacccggcaggatgagcctgccctgttcgtggccctgaccttcgagcggcgggaggtcctggactcctccaatatcaaaccaatgaacctgatcggcgtggcaagaggcgaaaacatccccgccgtgatcgccctgaccgaccccgagggctgcccactgagccggtttaaggatagcctgggaaacccaacccacatcctgagaatcggcgagagctataaggagaagcagcggaccatccaggccaagaaggaggtggagcagcggagagccggcggctacagccggaagtacgccagcaaagccaagaatctggcagacgatatggtgagaaacaccgctagagatctgctgtactacgccgtgacccaggatgccatgctgatcttcgccaacctgagccggggcttcggccggcagggcaagcggaccttcatggccgagagacagtacacacggatggaggactggctgaccgccaagctggcctacgagggcctgagcaagacctacctgtccaagacactggcccagtacacctccaagacatgcagcaactgtgggtttaccatcaccagcgccgactacgacagggtgctggagaagctgaagaagacagcaacaggctggatgaccacaattaacggcaaggagctgaaggtggagggccagattacctactacaacagatacaagagacagaacgtagtcaaggacctgtccgtcgagctggatagactgagcgaagaatctgtgaacaacgacatctcctcctggacaaagggcagaagcggagaagctctgagcctcctgaagaaaagattctcccatagacccgtgcaggagaagttcgtgtgcctgaactgcggcttcgagacacacgcagccgagcaagccgccctgaacatcgccagatcctggctgttcctgcggagccaggagtacaagaaataccagacaaacaagacaaccggcaacaccgataagagagccttcgtcgagacctggcagtccttttaccggaagaagcttaaggaggtgtggaaacctgccgtgcggtctggcggatctggcggaggctccacaagccagccccaggaggccatgaccttcaaggacgtggaggtgaccttcagccaggacgagtggggcagcctggacagcgcccagaggaacctgtacagggacgtgatgctggagaactacaggaacatggtgagcctggtgggccccttcaccaagcccgccctgatcagctggctggaggccagggagccctggggcctgaacgtgcaggccgcccagcccaagggcaaccccggcgccgcccccaccagccccaagaaaaagagaaaagtctaagctgccttctgcggggcttgccttctggccatgcccttcttctctcccttgcacctgtacctcttggtctttgaataaagcctgagtaggaaggctagcaaaaaaaaaaaaaaaaaaaaaaaaaaaaaaaaaaaaaaaaaaaaaaaaaaaaaaaaaaaaaaaaaaaaaaaaaaaaaaaa

SEQ ID NO: 7023 - RNA, 5797 nt, synthetic construct
  source 1..5797: mol_type = other RNA
aggaaataagagagaaaagaagagtaagaagaaatataagagccaccatggcccctaagaagaagcgtaaagtgagccggatggaacgcctcgtctacgaggtgcggcagaagtgcagaaacatcgaggacatctgcatctcctgcggatctctgaacgtgaccctggagcacccactgttcatcggcggcatgtgccagaactgtaaaaactgttttctggagtgtgcctatcaatacgacgatgacggctaccagagctactgcaccatctgttgcggcggaagagaggtgctgatgtgtggaaataacaactgctgccggtgcttctgcgtggaatgcgtggacctgctggtgggccccggcgccgcccaggccgctattaaggaagatccttggaactgctacatgtgcggccacaagggcacatacggcctgctgagacggagagaggactggcctagcagactgcagatgttcttcgccaataaccacgaccaggagttcgacccccctaaggtgtaccctcccgtccccgccgagaagagaaagcccatccgggtcctgagcctgttcgatggcatcgccaccggtctgctggtgctgaaggacctgggcatccaggtggataggtacattgcctccgaggtgtgcgaggactccatcaccgtgggaatggtgcgtcatcagggcaagatcatgtacgtgggcgacgtgcggagcgtgacacagaagcatatccaggagtggggccctttcgacctggtgatcggcggcagcccttgcaatgacctgagcatcgtgaacccagcccggaagggcctgtacgagggaaccggcagactgttcttcgagttttacagactgctgcacgacgcccggcctaaggaaggcgacgaccggcccttcttttggctgttcgagaatgtggtggccatgggagtcagcgacaagcgggatattagccggttcctggagagcaaccccgtgatgatcgatgccaaggaagtgagcgccgcccaccgggccagatacttctggggcaatctgcctggcatgaacagacccctggccagcaccgtgaacgacaagctggagctgcaggagtgcctggagcacggccggatcgccaagttcagcaaggtgagaaccatcaccacccgaagcaacagcatcaaacaaggcaaggaccagcactttcctgtgttcatgaacgagaaggaggacatcctgtggtgtaccgagatggagagagtgttcgggttcccagtccactacacagatgtcagcaacatgtctagactggccagacagagactgctgggaagaagctggtccgtccctgtgatcagacacctgttcgcccctctgaaggagtacttcgcctgcgtgagcagcggcaacagcaacgccaacagccggggccccagcttctctagcggcctggtgccactgtccctgagagggagccacatgggccccatggagatctacaaaaccgtgagcgcctggaagcggcagcctgtgcgcgtgctgagcctgtttcggaatatcgataaagtcctgaaaagcctgggattcctggagagcggctctggctccggcggtggcaccctgaagtacgtggaggatgtgacaaacgtggtcagacgggatgtggagaagtggggccccttcgatctggtgtacggcagcacccaacccctgggcagctcttgtgaccggtgccctggctggtacatgtttcagttccaccggatcctgcagtacgccctgccgagacaggagtcccagcggccattcttttggattttcatggacaacttgctgctgaccgaggatgaccaggaaactaccactcggttcctgcagaccgaagccgtgaccctgcaggacgtgagaggccgggactaccagaacgccatgcgggtgtggtccaacatccctggactgaaaagcaagcacgcacctctgacccctaaagaagaggagtacctgcaggcccaggtgcggagcagaagcaagctggacgcccctaaggtggatctgctggtgaagaattgcctcctgcccctgagagagtacttcaagtatttcagccagaatagtctgcccctgggcggcccaagcagcggcgcccctcctcccagcggcggcagcccagccggctccccaacctctaccgaggagggcacctctgagtccgccacccccgagagcggccctggcacctccaccgagcccagcgagggcagcgcacccggcagccctgccggcagccccacctccacagaggagggaaccagcaccgagcccagcgaaggcagcgccccaggcaccagcaccgagcctagtgagggcggctctggcggcggcagcgcccaggagattaaacggatcaacaagatcagaagaagacttgtgaaagacagcaacaccaagaaggccggcaagacaggccccatgaaaaccctgctggttagagtgatgacacccgatctgagagagcggctggaaaacctgagaaagaagcctgaaaatatcccccagcccatcagcaatacatctagagccaacctgaataagctgctgaccgattacaccgaaatgaagaaggcgatcctgcatgtgtactgggaagagttccagaaggaccctgtgggcctgatgagccgggtggcccagcctgccagcaagaagatcgatcagaacaagctgaaacctgagatggacgagaagggcaacctgaccaccgccggctttgcctgctctcagtgtggccagcccctgttcgtgtacaagctggagcaggtgtctgagaagggcaaggcttacaccaactacttcggacggtgcaatgtggccgagcacgaaaagctgatcctgctggcccagctgaagcccgagaaggatagcgacgaagccgtgacatatagcctgggaaagtttgggcagagggccctggatttctacagcattcatgtgaccaaggagtccacccaccccgtgaagcccctggcccagatcgccggaaacagatacgcctccggacctgtgggaaaggccctgagcgacgcatgtatgggcacaatcgcctccttcctgtctaagtaccaggacatcatcatcgaacaccagaaggtggtgaagggcaaccagaagagactggagagcctgcgggagctggccggcaaggaaaacctggaataccctagcgtgaccctgccacctcagcctcacaccaaggagggcgttgatgcctacaacgaagtgatcgcccgggtgcgaatgtgggtgaacctgaacctgtggcagaagctgaagctaagcagagatgatgccaagcctctgctgagactgaagggattcccttcctttcctctggtcgagagacaggccaacgaagtggactggtgggacatggtgtgtaacgtgaagaagctgatcaacgagaaaaaggaggatggcaaggtgttttggcagaatctggctggctacaagagacaggaagccctgagaccatacctgagcagcgaggaagatcggaagaagggaaagaaattcgctcggtaccagctgggcgacctgctgctgcacctggaaaagaagcacggcgaggactggggaaaggtgtacgacgaggcctgggagcggattgacaagaaagtggaaggcctgagcaagcacatcaagctggaagaggaacggagaagcgaggacgcccagagcaaggccgccctgaccgactggctgcgggctaaggccagcttcgtgatcgagggcctgaaggaggccgacaaggacgagttctgcagatgcgagctgaagctgcagaagtggtacggggacctgcggggaaagcccttcgccatcgaagccgagaacagcatcctggacatcagcggcttcagcaagcagtacaactgtgccttcatctggcagaaggacggcgtgaagaagctgaacctgtacctgatcatcaactacttcaagggcggcaagctgcggttcaagaagatcaaacctgaagccttcgaagccaacagattctacaccgtgatcaacaaaaagagcggcgagatcgtgcccatggaggtgaacttcaacttcgacgaccccaacctgatcatcctgcctctggcctttggcaagagacagggcagagaattcatctggaacgacctgctgtccctggaaaccggcagcctgaagctggccaacggaagagtgatcgagaagacactgtacaacagaagaacccggcaggatgagcctgccctgttcgtggccctgaccttcgagcggcgggaggtcctggactcctccaatatcaaaccaatgaacctgatcggcgtggcaagaggcgaaaacatccccgccgtgatcgccctgaccgaccccgagggctgcccactgagccggtttaaggatagcctgggaaacccaacccacatcctgagaatcggcgagagctataaggagaagcagcggaccatccaggccaagaaggaggtggagcagcggagagccggcggctacagccggaagtacgccagcaaagccaagaatctggcagacgatatggtgagaaacaccgctagagatctgctgtactacgccgtgacccaggatgccatgctgatcttcgccaacctgagccggggcttcggccggcagggcaagcggaccttcatggccgagagacagtacacacggatggaggactggctgaccgccaagctggcctacgagggcctgagcaagacctacctgtccaagacactggcccagtacacctccaagacatgcagcaactgtgggtttaccatcaccagcgccgactacgacagggtgctggagaagctgaagaagacagcaacaggctggatgaccacaattaacggcaaggagctgaaggtggagggccagattacctactacaacagatacaagagacagaacgtagtcaaggacctgtccgtcgagctggatagactgagcgaagaatctgtgaacaacgacatctcctcctggacaaagggcagaagcggagaagctctgagcctcctgaagaaaagattctcccatagacccgtgcaggagaagttcgtgtgcctgaactgcggcttcgagacacacgcagccgagcaagccgccctgaacatcgccagatcctggctgttcctgcggagccaggagtacaagaaataccagacaaacaagacaaccggcaacaccgataagagagccttcgtcgagacctggcagtccttttaccggaagaagcttaaggaggtgtggaaacctgccgtgcggtctggcggatctggcggaggctccacaagcatgaacagcgaggtgatcgtggaccccatccagggccaggtgaacttcgaggacgtgttcgtgtacttcagccaggaggagtgggtgctgctggacgaggcccagaggctgctgtacagggacgtgatgctggagaacttcgccctgatggccagcctgggccacaccagcttcatgagccacatcggcgccagcctggtgatgggcagcgagccctgggtgcccgactgggtggacatgatcaccagccccaagaaaaagagaaaagtctaagctgccttctgcggggcttgccttctggccatgcccttcttctctcccttgcacctgtacctcttggtctttgaataaagcctgagtaggaaggctagcaaaaaaaaaaaaaaaaaaaaaaaaaaaaaaaaaaaaaaaaaaaaaaaaaaaaaaaaaaaaaaaaaaaaaaaaaaaaaaaa

SEQ ID NO: 7024 - RNA, 5797 nt, synthetic construct
  source 1..5797: mol_type = other RNA
aggaaataagagagaaaagaagagtaagaagaaatataagagccaccatggcccctaagaagaagcgtaaagtgagccggatggaacgcctcgtctacgaggtgcggcagaagtgcagaaacatcgaggacatctgcatctcctgcggatctctgaacgtgaccctggagcacccactgttcatcggcggcatgtgccagaactgtaaaaactgttttctggagtgtgcctatcaatacgacgatgacggctaccagagctactgcaccatctgttgcggcggaagagaggtgctgatgtgtggaaataacaactgctgccggtgcttctgcgtggaatgcgtggacctgctggtgggccccggcgccgcccaggccgctattaaggaagatccttggaactgctacatgtgcggccacaagggcacatacggcctgctgagacggagagaggactggcctagcagactgcagatgttcttcgccaataaccacgaccaggagttcgacccccctaaggtgtaccctcccgtccccgccgagaagagaaagcccatccgggtcctgagcctgttcgatggcatcgccaccggtctgctggtgctgaaggacctgggcatccaggtggataggtacattgcctccgaggtgtgcgaggactccatcaccgtgggaatggtgcgtcatcagggcaagatcatgtacgtgggcgacgtgcggagcgtgacacagaagcatatccaggagtggggccctttcgacctggtgatcggcggcagcccttgcaatgacctgagcatcgtgaacccagcccggaagggcctgtacgagggaaccggcagactgttcttcgagttttacagactgctgcacgacgcccggcctaaggaaggcgacgaccggcccttcttttggctgttcgagaatgtggtggccatgggagtcagcgacaagcgggatattagccggttcctggagagcaaccccgtgatgatcgatgccaaggaagtgagcgccgcccaccgggccagatacttctggggcaatctgcctggcatgaacagacccctggccagcaccgtgaacgacaagctggagctgcaggagtgcctggagcacggccggatcgccaagttcagcaaggtgagaaccatcaccacccgaagcaacagcatcaaacaaggcaaggaccagcactttcctgtgttcatgaacgagaaggaggacatcctgtggtgtaccgagatggagagagtgttcgggttcccagtccactacacagatgtcagcaacatgtctagactggccagacagagactgctgggaagaagctggtccgtccctgtgatcagacacctgttcgcccctctgaaggagtacttcgcctgcgtgagcagcggcaacagcaacgccaacagccggggccccagcttctctagcggcctggtgccactgtccctgagagggagccacatgggccccatggagatctacaaaaccgtgagcgcctggaagcggcagcctgtgcgcgtgctgagcctgtttcggaatatcgataaagtcctgaaaagcctgggattcctggagagcggctctggctccggcggtggcaccctgaagtacgtggaggatgtgacaaacgtggtcagacgggatgtggagaagtggggccccttcgatctggtgtacggcagcacccaacccctgggcagctcttgtgaccggtgccctggctggtacatgtttcagttccaccggatcctgcagtacgccctgccgagacaggagtcccagcggccattcttttggattttcatggacaacttgctgctgaccgaggatgaccaggaaactaccactcggttcctgcagaccgaagccgtgaccctgcaggacgtgagaggccgggactaccagaacgccatgcgggtgtggtccaacatccctggactgaaaagcaagcacgcacctctgacccctaaagaagaggagtacctgcaggcccaggtgcggagcagaagcaagctggacgcccctaaggtggatctgctggtgaagaattgcctcctgcccctgagagagtacttcaagtatttcagccagaatagtctgcccctgggcggcccaagcagcggcgcccctcctcccagcggcggcagcccagccggctccccaacctctaccgaggagggcacctctgagtccgccacccccgagagcggccctggcacctccaccgagcccagcgagggcagcgcacccggcagccctgccggcagccccacctccacagaggagggaaccagcaccgagcccagcgaaggcagcgccccaggcaccagcaccgagcctagtgagggcggctctggcggcggcagcgcccaggagattaaacggatcaacaagatcagaagaagacttgtgaaagacagcaacaccaagaaggccggcaagacaggccccatgaaaaccctgctggttagagtgatgacacccgatctgagagagcggctggaaaacctgagaaagaagcctgaaaatatcccccagcccatcagcaatacatctagagccaacctgaataagctgctgaccgattacaccgaaatgaagaaggcgatcctgcatgtgtactgggaagagttccagaaggaccctgtgggcctgatgagccgggtggcccagcctgccagcaagaagatcgatcagaacaagctgaaacctgagatggacgagaagggcaacctgaccaccgccggctttgcctgctctcagtgtggccagcccctgttcgtgtacaagctggagcaggtgtctgagaagggcaaggcttacaccaactacttcggacggtgcaatgtggccgagcacgaaaagctgatcctgctggcccagctgaagcccgagaaggatagcgacgaagccgtgacatatagcctgggaaagtttgggcagagggccctggatttctacagcattcatgtgaccaaggagtccacccaccccgtgaagcccctggcccagatcgccggaaacagatacgcctccggacctgtgggaaaggccctgagcgacgcatgtatgggcacaatcgcctccttcctgtctaagtaccaggacatcatcatcgaacaccagaaggtggtgaagggcaaccagaagagactggagagcctgcgggagctggccggcaaggaaaacctggaataccctagcgtgaccctgccacctcagcctcacaccaaggagggcgttgatgcctacaacgaagtgatcgcccgggtgcgaatgtgggtgaacctgaacctgtggcagaagctgaagctaagcagagatgatgccaagcctctgctgagactgaagggattcccttcctttcctctggtcgagagacaggccaacgaagtggactggtgggacatggtgtgtaacgtgaagaagctgatcaacgagaaaaaggaggatggcaaggtgttttggcagaatctggctggctacaagagacaggaagccctgagaccatacctgagcagcgaggaagatcggaagaagggaaagaaattcgctcggtaccagctgggcgacctgctgctgcacctggaaaagaagcacggcgaggactggggaaaggtgtacgacgaggcctgggagcggattgacaagaaagtggaaggcctgagcaagcacatcaagctggaagaggaacggagaagcgaggacgcccagagcaaggccgccctgaccgactggctgcgggctaaggccagcttcgtgatcgagggcctgaaggaggccgacaaggacgagttctgcagatgcgagctgaagctgcagaagtggtacggggacctgcggggaaagcccttcgccatcgaagccgagaacagcatcctggacatcagcggcttcagcaagcagtacaactgtgccttcatctggcagaaggacggcgtgaagaagctgaacctgtacctgatcatcaactacttcaagggcggcaagctgcggttcaagaagatcaaacctgaagccttcgaagccaacagattctacaccgtgatcaacaaaaagagcggcgagatcgtgcccatggaggtgaacttcaacttcgacgaccccaacctgatcatcctgcctctggcctttggcaagagacagggcagagaattcatctggaacgacctgctgtccctggaaaccggcagcctgaagctggccaacggaagagtgatcgagaagacactgtacaacagaagaacccggcaggatgagcctgccctgttcgtggccctgaccttcgagcggcgggaggtcctggactcctccaatatcaaaccaatgaacctgatcggcgtggcaagaggcgaaaacatccccgccgtgatcgccctgaccgaccccgagggctgcccactgagccggtttaaggatagcctgggaaacccaacccacatcctgagaatcggcgagagctataaggagaagcagcggaccatccaggccaagaaggaggtggagcagcggagagccggcggctacagccggaagtacgccagcaaagccaagaatctggcagacgatatggtgagaaacaccgctagagatctgctgtactacgccgtgacccaggatgccatgctgatcttcgccaacctgagccggggcttcggccggcagggcaagcggaccttcatggccgagagacagtacacacggatggaggactggctgaccgccaagctggcctacgagggcctgagcaagacctacctgtccaagacactggcccagtacacctccaagacatgcagcaactgtgggtttaccatcaccagcgccgactacgacagggtgctggagaagctgaagaagacagcaacaggctggatgaccacaattaacggcaaggagctgaaggtggagggccagattacctactacaacagatacaagagacagaacgtagtcaaggacctgtccgtcgagctggatagactgagcgaagaatctgtgaacaacgacatctcctcctggacaaagggcagaagcggagaagctctgagcctcctgaagaaaagattctcccatagacccgtgcaggagaagttcgtgtgcctgaactgcggcttcgagacacacgcagccgagcaagccgccctgaacatcgccagatcctggctgttcctgcggagccaggagtacaagaaataccagacaaacaagacaaccggcaacaccgataagagagccttcgtcgagacctggcagtccttttaccggaagaagcttaaggaggtgtggaaacctgccgtgcggtctggcggatctggcggaggctccacaagcctgcaggagagcgtgaccttcagggacgtggccgtgttcttcagccaggacgagtggctgaggctggacagcgcccagaggaccctgtacagggaggtgatgctggagaactacggcaccctggtgagcctgggcatccccttcagcacccccaaggtgatctgccagctgcagcagggcgaggacccctgcgtggtggacagggagctgccccaggacgcctggcccggcctgaagacccagaccagccccaagaaaaagagaaaagtctaagctgccttctgcggggcttgccttctggccatgcccttcttctctcccttgcacctgtacctcttggtctttgaataaagcctgagtaggaaggctagcaaaaaaaaaaaaaaaaaaaaaaaaaaaaaaaaaaaaaaaaaaaaaaaaaaaaaaaaaaaaaaaaaaaaaaaaaaaaaaaa

SEQ ID NO: 7025 - RNA, 5797 nt, synthetic construct
  source 1..5797: mol_type = other RNA
aggaaataagagagaaaagaagagtaagaagaaatataagagccaccatggcccctaagaagaagcgtaaagtgagccggatggaacgcctcgtctacgaggtgcggcagaagtgcagaaacatcgaggacatctgcatctcctgcggatctctgaacgtgaccctggagcacccactgttcatcggcggcatgtgccagaactgtaaaaactgttttctggagtgtgcctatcaatacgacgatgacggctaccagagctactgcaccatctgttgcggcggaagagaggtgctgatgtgtggaaataacaactgctgccggtgcttctgcgtggaatgcgtggacctgctggtgggccccggcgccgcccaggccgctattaaggaagatccttggaactgctacatgtgcggccacaagggcacatacggcctgctgagacggagagaggactggcctagcagactgcagatgttcttcgccaataaccacgaccaggagttcgacccccctaaggtgtaccctcccgtccccgccgagaagagaaagcccatccgggtcctgagcctgttcgatggcatcgccaccggtctgctggtgctgaaggacctgggcatccaggtggataggtacattgcctccgaggtgtgcgaggactccatcaccgtgggaatggtgcgtcatcagggcaagatcatgtacgtgggcgacgtgcggagcgtgacacagaagcatatccaggagtggggccctttcgacctggtgatcggcggcagcccttgcaatgacctgagcatcgtgaacccagcccggaagggcctgtacgagggaaccggcagactgttcttcgagttttacagactgctgcacgacgcccggcctaaggaaggcgacgaccggcccttcttttggctgttcgagaatgtggtggccatgggagtcagcgacaagcgggatattagccggttcctggagagcaaccccgtgatgatcgatgccaaggaagtgagcgccgcccaccgggccagatacttctggggcaatctgcctggcatgaacagacccctggccagcaccgtgaacgacaagctggagctgcaggagtgcctggagcacggccggatcgccaagttcagcaaggtgagaaccatcaccacccgaagcaacagcatcaaacaaggcaaggaccagcactttcctgtgttcatgaacgagaaggaggacatcctgtggtgtaccgagatggagagagtgttcgggttcccagtccactacacagatgtcagcaacatgtctagactggccagacagagactgctgggaagaagctggtccgtccctgtgatcagacacctgttcgcccctctgaaggagtacttcgcctgcgtgagcagcggcaacagcaacgccaacagccggggccccagcttctctagcggcctggtgccactgtccctgagagggagccacatgggccccatggagatctacaaaaccgtgagcgcctggaagcggcagcctgtgcgcgtgctgagcctgtttcggaatatcgataaagtcctgaaaagcctgggattcctggagagcggctctggctccggcggtggcaccctgaagtacgtggaggatgtgacaaacgtggtcagacgggatgtggagaagtggggccccttcgatctggtgtacggcagcacccaacccctgggcagctcttgtgaccggtgccctggctggtacatgtttcagttccaccggatcctgcagtacgccctgccgagacaggagtcccagcggccattcttttggattttcatggacaacttgctgctgaccgaggatgaccaggaaactaccactcggttcctgcagaccgaagccgtgaccctgcaggacgtgagaggccgggactaccagaacgccatgcgggtgtggtccaacatccctggactgaaaagcaagcacgcacctctgacccctaaagaagaggagtacctgcaggcccaggtgcggagcagaagcaagctggacgcccctaaggtggatctgctggtgaagaattgcctcctgcccctgagagagtacttcaagtatttcagccagaatagtctgcccctgggcggcccaagcagcggcgcccctcctcccagcggcggcagcccagccggctccccaacctctaccgaggagggcacctctgagtccgccacccccgagagcggccctggcacctccaccgagcccagcgagggcagcgcacccggcagccctgccggcagccccacctccacagaggagggaaccagcaccgagcccagcgaaggcagcgccccaggcaccagcaccgagcctagtgagggcggctctggcggcggcagcgcccaggagattaaacggatcaacaagatcagaagaagacttgtgaaagacagcaacaccaagaaggccggcaagacaggccccatgaaaaccctgctggttagagtgatgacacccgatctgagagagcggctggaaaacctgagaaagaagcctgaaaatatcccccagcccatcagcaatacatctagagccaacctgaataagctgctgaccgattacaccgaaatgaagaaggcgatcctgcatgtgtactgggaagagttccagaaggaccctgtgggcctgatgagccgggtggcccagcctgccagcaagaagatcgatcagaacaagctgaaacctgagatggacgagaagggcaacctgaccaccgccggctttgcctgctctcagtgtggccagcccctgttcgtgtacaagctggagcaggtgtctgagaagggcaaggcttacaccaactacttcggacggtgcaatgtggccgagcacgaaaagctgatcctgctggcccagctgaagcccgagaaggatagcgacgaagccgtgacatatagcctgggaaagtttgggcagagggccctggatttctacagcattcatgtgaccaaggagtccacccaccccgtgaagcccctggcccagatcgccggaaacagatacgcctccggacctgtgggaaaggccctgagcgacgcatgtatgggcacaatcgcctccttcctgtctaagtaccaggacatcatcatcgaacaccagaaggtggtgaagggcaaccagaagagactggagagcctgcgggagctggccggcaaggaaaacctggaataccctagcgtgaccctgccacctcagcctcacaccaaggagggcgttgatgcctacaacgaagtgatcgcccgggtgcgaatgtgggtgaacctgaacctgtggcagaagctgaagctaagcagagatgatgccaagcctctgctgagactgaagggattcccttcctttcctctggtcgagagacaggccaacgaagtggactggtgggacatggtgtgtaacgtgaagaagctgatcaacgagaaaaaggaggatggcaaggtgttttggcagaatctggctggctacaagagacaggaagccctgagaccatacctgagcagcgaggaagatcggaagaagggaaagaaattcgctcggtaccagctgggcgacctgctgctgcacctggaaaagaagcacggcgaggactggggaaaggtgtacgacgaggcctgggagcggattgacaagaaagtggaaggcctgagcaagcacatcaagctggaagaggaacggagaagcgaggacgcccagagcaaggccgccctgaccgactggctgcgggctaaggccagcttcgtgatcgagggcctgaaggaggccgacaaggacgagttctgcagatgcgagctgaagctgcagaagtggtacggggacctgcggggaaagcccttcgccatcgaagccgagaacagcatcctggacatcagcggcttcagcaagcagtacaactgtgccttcatctggcagaaggacggcgtgaagaagctgaacctgtacctgatcatcaactacttcaagggcggcaagctgcggttcaagaagatcaaacctgaagccttcgaagccaacagattctacaccgtgatcaacaaaaagagcggcgagatcgtgcccatggaggtgaacttcaacttcgacgaccccaacctgatcatcctgcctctggcctttggcaagagacagggcagagaattcatctggaacgacctgctgtccctggaaaccggcagcctgaagctggccaacggaagagtgatcgagaagacactgtacaacagaagaacccggcaggatgagcctgccctgttcgtggccctgaccttcgagcggcgggaggtcctggactcctccaatatcaaaccaatgaacctgatcggcgtggcaagaggcgaaaacatccccgccgtgatcgccctgaccgaccccgagggctgcccactgagccggtttaaggatagcctgggaaacccaacccacatcctgagaatcggcgagagctataaggagaagcagcggaccatccaggccaagaaggaggtggagcagcggagagccggcggctacagccggaagtacgccagcaaagccaagaatctggcagacgatatggtgagaaacaccgctagagatctgctgtactacgccgtgacccaggatgccatgctgatcttcgccaacctgagccggggcttcggccggcagggcaagcggaccttcatggccgagagacagtacacacggatggaggactggctgaccgccaagctggcctacgagggcctgagcaagacctacctgtccaagacactggcccagtacacctccaagacatgcagcaactgtgggtttaccatcaccagcgccgactacgacagggtgctggagaagctgaagaagacagcaacaggctggatgaccacaattaacggcaaggagctgaaggtggagggccagattacctactacaacagatacaagagacagaacgtagtcaaggacctgtccgtcgagctggatagactgagcgaagaatctgtgaacaacgacatctcctcctggacaaagggcagaagcggagaagctctgagcctcctgaagaaaagattctcccatagacccgtgcaggagaagttcgtgtgcctgaactgcggcttcgagacacacgcagccgagcaagccgccctgaacatcgccagatcctggctgttcctgcggagccaggagtacaagaaataccagacaaacaagacaaccggcaacaccgataagagagccttcgtcgagacctggcagtccttttaccggaagaagcttaaggaggtgtggaaacctgccgtgcggtctggcggatctggcggaggctccacaagcttccagggcagcatcagcttcaaggacgtgaccgtgggcttcacccaggaggagtggcagcacctggaccccagccagagggccctgtacagggacgtgaccctggagaactacagcaacctggtgagcgtgggctactgcgtgcacaagcccgaggtgatcttcaggctggagcagggcgaggagccctggaggctggaggaggagttccccagccagagcttccccgaggtgtggaccgccaccagccccaagaaaaagagaaaagtctaagctgccttctgcggggcttgccttctggccatgcccttcttctctcccttgcacctgtacctcttggtctttgaataaagcctgagtaggaaggctagcaaaaaaaaaaaaaaaaaaaaaaaaaaaaaaaaaaaaaaaaaaaaaaaaaaaaaaaaaaaaaaaaaaaaaaaaaaaaaaaa

SEQ ID NO: 7026 - RNA, 5797 nt, synthetic construct
  source 1..5797: mol_type = other RNA
aggaaataagagagaaaagaagagtaagaagaaatataagagccaccatggcccctaagaagaagcgtaaagtgagccggatggaacgcctcgtctacgaggtgcggcagaagtgcagaaacatcgaggacatctgcatctcctgcggatctctgaacgtgaccctggagcacccactgttcatcggcggcatgtgccagaactgtaaaaactgttttctggagtgtgcctatcaatacgacgatgacggctaccagagctactgcaccatctgttgcggcggaagagaggtgctgatgtgtggaaataacaactgctgccggtgcttctgcgtggaatgcgtggacctgctggtgggccccggcgccgcccaggccgctattaaggaagatccttggaactgctacatgtgcggccacaagggcacatacggcctgctgagacggagagaggactggcctagcagactgcagatgttcttcgccaataaccacgaccaggagttcgacccccctaaggtgtaccctcccgtccccgccgagaagagaaagcccatccgggtcctgagcctgttcgatggcatcgccaccggtctgctggtgctgaaggacctgggcatccaggtggataggtacattgcctccgaggtgtgcgaggactccatcaccgtgggaatggtgcgtcatcagggcaagatcatgtacgtgggcgacgtgcggagcgtgacacagaagcatatccaggagtggggccctttcgacctggtgatcggcggcagcccttgcaatgacctgagcatcgtgaacccagcccggaagggcctgtacgagggaaccggcagactgttcttcgagttttacagactgctgcacgacgcccggcctaaggaaggcgacgaccggcccttcttttggctgttcgagaatgtggtggccatgggagtcagcgacaagcgggatattagccggttcctggagagcaaccccgtgatgatcgatgccaaggaagtgagcgccgcccaccgggccagatacttctggggcaatctgcctggcatgaacagacccctggccagcaccgtgaacgacaagctggagctgcaggagtgcctggagcacggccggatcgccaagttcagcaaggtgagaaccatcaccacccgaagcaacagcatcaaacaaggcaaggaccagcactttcctgtgttcatgaacgagaaggaggacatcctgtggtgtaccgagatggagagagtgttcgggttcccagtccactacacagatgtcagcaacatgtctagactggccagacagagactgctgggaagaagctggtccgtccctgtgatcagacacctgttcgcccctctgaaggagtacttcgcctgcgtgagcagcggcaacagcaacgccaacagccggggccccagcttctctagcggcctggtgccactgtccctgagagggagccacatgggccccatggagatctacaaaaccgtgagcgcctggaagcggcagcctgtgcgcgtgctgagcctgtttcggaatatcgataaagtcctgaaaagcctgggattcctggagagcggctctggctccggcggtggcaccctgaagtacgtggaggatgtgacaaacgtggtcagacgggatgtggagaagtggggccccttcgatctggtgtacggcagcacccaacccctgggcagctcttgtgaccggtgccctggctggtacatgtttcagttccaccggatcctgcagtacgccctgccgagacaggagtcccagcggccattcttttggattttcatggacaacttgctgctgaccgaggatgaccaggaaactaccactcggttcctgcagaccgaagccgtgaccctgcaggacgtgagaggccgggactaccagaacgccatgcgggtgtggtccaacatccctggactgaaaagcaagcacgcacctctgacccctaaagaagaggagtacctgcaggcccaggtgcggagcagaagcaagctggacgcccctaaggtggatctgctggtgaagaattgcctcctgcccctgagagagtacttcaagtatttcagccagaatagtctgcccctgggcggcccaagcagcggcgcccctcctcccagcggcggcagcccagccggctccccaacctctaccgaggagggcacctctgagtccgccacccccgagagcggccctggcacctccaccgagcccagcgagggcagcgcacccggcagccctgccggcagccccacctccacagaggagggaaccagcaccgagcccagcgaaggcagcgccccaggcaccagcaccgagcctagtgagggcggctctggcggcggcagcgcccaggagattaaacggatcaacaagatcagaagaagacttgtgaaagacagcaacaccaagaaggccggcaagacaggccccatgaaaaccctgctggttagagtgatgacacccgatctgagagagcggctggaaaacctgagaaagaagcctgaaaatatcccccagcccatcagcaatacatctagagccaacctgaataagctgctgaccgattacaccgaaatgaagaaggcgatcctgcatgtgtactgggaagagttccagaaggaccctgtgggcctgatgagccgggtggcccagcctgccagcaagaagatcgatcagaacaagctgaaacctgagatggacgagaagggcaacctgaccaccgccggctttgcctgctctcagtgtggccagcccctgttcgtgtacaagctggagcaggtgtctgagaagggcaaggcttacaccaactacttcggacggtgcaatgtggccgagcacgaaaagctgatcctgctggcccagctgaagcccgagaaggatagcgacgaagccgtgacatatagcctgggaaagtttgggcagagggccctggatttctacagcattcatgtgaccaaggagtccacccaccccgtgaagcccctggcccagatcgccggaaacagatacgcctccggacctgtgggaaaggccctgagcgacgcatgtatgggcacaatcgcctccttcctgtctaagtaccaggacatcatcatcgaacaccagaaggtggtgaagggcaaccagaagagactggagagcctgcgggagctggccggcaaggaaaacctggaataccctagcgtgaccctgccacctcagcctcacaccaaggagggcgttgatgcctacaacgaagtgatcgcccgggtgcgaatgtgggtgaacctgaacctgtggcagaagctgaagctaagcagagatgatgccaagcctctgctgagactgaagggattcccttcctttcctctggtcgagagacaggccaacgaagtggactggtgggacatggtgtgtaacgtgaagaagctgatcaacgagaaaaaggaggatggcaaggtgttttggcagaatctggctggctacaagagacaggaagccctgagaccatacctgagcagcgaggaagatcggaagaagggaaagaaattcgctcggtaccagctgggcgacctgctgctgcacctggaaaagaagcacggcgaggactggggaaaggtgtacgacgaggcctgggagcggattgacaagaaagtggaaggcctgagcaagcacatcaagctggaagaggaacggagaagcgaggacgcccagagcaaggccgccctgaccgactggctgcgggctaaggccagcttcgtgatcgagggcctgaaggaggccgacaaggacgagttctgcagatgcgagctgaagctgcagaagtggtacggggacctgcggggaaagcccttcgccatcgaagccgagaacagcatcctggacatcagcggcttcagcaagcagtacaactgtgccttcatctggcagaaggacggcgtgaagaagctgaacctgtacctgatcatcaactacttcaagggcggcaagctgcggttcaagaagatcaaacctgaagccttcgaagccaacagattctacaccgtgatcaacaaaaagagcggcgagatcgtgcccatggaggtgaacttcaacttcgacgaccccaacctgatcatcctgcctctggcctttggcaagagacagggcagagaattcatctggaacgacctgctgtccctggaaaccggcagcctgaagctggccaacggaagagtgatcgagaagacactgtacaacagaagaacccggcaggatgagcctgccctgttcgtggccctgaccttcgagcggcgggaggtcctggactcctccaatatcaaaccaatgaacctgatcggcgtggcaagaggcgaaaacatccccgccgtgatcgccctgaccgaccccgagggctgcccactgagccggtttaaggatagcctgggaaacccaacccacatcctgagaatcggcgagagctataaggagaagcagcggaccatccaggccaagaaggaggtggagcagcggagagccggcggctacagccggaagtacgccagcaaagccaagaatctggcagacgatatggtgagaaacaccgctagagatctgctgtactacgccgtgacccaggatgccatgctgatcttcgccaacctgagccggggcttcggccggcagggcaagcggaccttcatggccgagagacagtacacacggatggaggactggctgaccgccaagctggcctacgagggcctgagcaagacctacctgtccaagacactggcccagtacacctccaagacatgcagcaactgtgggtttaccatcaccagcgccgactacgacagggtgctggagaagctgaagaagacagcaacaggctggatgaccacaattaacggcaaggagctgaaggtggagggccagattacctactacaacagatacaagagacagaacgtagtcaaggacctgtccgtcgagctggatagactgagcgaagaatctgtgaacaacgacatctcctcctggacaaagggcagaagcggagaagctctgagcctcctgaagaaaagattctcccatagacccgtgcaggagaagttcgtgtgcctgaactgcggcttcgagacacacgcagccgagcaagccgccctgaacatcgccagatcctggctgttcctgcggagccaggagtacaagaaataccagacaaacaagacaaccggcaacaccgataagagagccttcgtcgagacctggcagtccttttaccggaagaagcttaaggaggtgtggaaacctgccgtgcggtctggcggatctggcggaggctccacaagcccccaggagcccgtgaccttcgaggacgtggccgtgtacttcacccagaaccagtgggccagcctggaccccacccagagggccctgtacagggaggtgatgctggagaactacgccagcgtggccagcctggtgttccccttccccaagcccgacctggtgagccagctggagagggaggaggccccctggggccccgacccctgggaggccgaggtgctgaggggcatctgccccggcggcaccagccccaagaaaaagagaaaagtctaagctgccttctgcggggcttgccttctggccatgcccttcttctctcccttgcacctgtacctcttggtctttgaataaagcctgagtaggaaggctagcaaaaaaaaaaaaaaaaaaaaaaaaaaaaaaaaaaaaaaaaaaaaaaaaaaaaaaaaaaaaaaaaaaaaaaaaaaaaaaaa

SEQ ID NO: 7027 - RNA, 5797 nt, synthetic construct
  source 1..5797: mol_type = other RNA
aggaaataagagagaaaagaagagtaagaagaaatataagagccaccatggcccctaagaagaagcgtaaagtgagccggatggaacgcctcgtctacgaggtgcggcagaagtgcagaaacatcgaggacatctgcatctcctgcggatctctgaacgtgaccctggagcacccactgttcatcggcggcatgtgccagaactgtaaaaactgttttctggagtgtgcctatcaatacgacgatgacggctaccagagctactgcaccatctgttgcggcggaagagaggtgctgatgtgtggaaataacaactgctgccggtgcttctgcgtggaatgcgtggacctgctggtgggccccggcgccgcccaggccgctattaaggaagatccttggaactgctacatgtgcggccacaagggcacatacggcctgctgagacggagagaggactggcctagcagactgcagatgttcttcgccaataaccacgaccaggagttcgacccccctaaggtgtaccctcccgtccccgccgagaagagaaagcccatccgggtcctgagcctgttcgatggcatcgccaccggtctgctggtgctgaaggacctgggcatccaggtggataggtacattgcctccgaggtgtgcgaggactccatcaccgtgggaatggtgcgtcatcagggcaagatcatgtacgtgggcgacgtgcggagcgtgacacagaagcatatccaggagtggggccctttcgacctggtgatcggcggcagcccttgcaatgacctgagcatcgtgaacccagcccggaagggcctgtacgagggaaccggcagactgttcttcgagttttacagactgctgcacgacgcccggcctaaggaaggcgacgaccggcccttcttttggctgttcgagaatgtggtggccatgggagtcagcgacaagcgggatattagccggttcctggagagcaaccccgtgatgatcgatgccaaggaagtgagcgccgcccaccgggccagatacttctggggcaatctgcctggcatgaacagacccctggccagcaccgtgaacgacaagctggagctgcaggagtgcctggagcacggccggatcgccaagttcagcaaggtgagaaccatcaccacccgaagcaacagcatcaaacaaggcaaggaccagcactttcctgtgttcatgaacgagaaggaggacatcctgtggtgtaccgagatggagagagtgttcgggttcccagtccactacacagatgtcagcaacatgtctagactggccagacagagactgctgggaagaagctggtccgtccctgtgatcagacacctgttcgcccctctgaaggagtacttcgcctgcgtgagcagcggcaacagcaacgccaacagccggggccccagcttctctagcggcctggtgccactgtccctgagagggagccacatgggccccatggagatctacaaaaccgtgagcgcctggaagcggcagcctgtgcgcgtgctgagcctgtttcggaatatcgataaagtcctgaaaagcctgggattcctggagagcggctctggctccggcggtggcaccctgaagtacgtggaggatgtgacaaacgtggtcagacgggatgtggagaagtggggccccttcgatctggtgtacggcagcacccaacccctgggcagctcttgtgaccggtgccctggctggtacatgtttcagttccaccggatcctgcagtacgccctgccgagacaggagtcccagcggccattcttttggattttcatggacaacttgctgctgaccgaggatgaccaggaaactaccactcggttcctgcagaccgaagccgtgaccctgcaggacgtgagaggccgggactaccagaacgccatgcgggtgtggtccaacatccctggactgaaaagcaagcacgcacctctgacccctaaagaagaggagtacctgcaggcccaggtgcggagcagaagcaagctggacgcccctaaggtggatctgctggtgaagaattgcctcctgcccctgagagagtacttcaagtatttcagccagaatagtctgcccctgggcggcccaagcagcggcgcccctcctcccagcggcggcagcccagccggctccccaacctctaccgaggagggcacctctgagtccgccacccccgagagcggccctggcacctccaccgagcccagcgagggcagcgcacccggcagccctgccggcagccccacctccacagaggagggaaccagcaccgagcccagcgaaggcagcgccccaggcaccagcaccgagcctagtgagggcggctctggcggcggcagcgcccaggagattaaacggatcaacaagatcagaagaagacttgtgaaagacagcaacaccaagaaggccggcaagacaggccccatgaaaaccctgctggttagagtgatgacacccgatctgagagagcggctggaaaacctgagaaagaagcctgaaaatatcccccagcccatcagcaatacatctagagccaacctgaataagctgctgaccgattacaccgaaatgaagaaggcgatcctgcatgtgtactgggaagagttccagaaggaccctgtgggcctgatgagccgggtggcccagcctgccagcaagaagatcgatcagaacaagctgaaacctgagatggacgagaagggcaacctgaccaccgccggctttgcctgctctcagtgtggccagcccctgttcgtgtacaagctggagcaggtgtctgagaagggcaaggcttacaccaactacttcggacggtgcaatgtggccgagcacgaaaagctgatcctgctggcccagctgaagcccgagaaggatagcgacgaagccgtgacatatagcctgggaaagtttgggcagagggccctggatttctacagcattcatgtgaccaaggagtccacccaccccgtgaagcccctggcccagatcgccggaaacagatacgcctccggacctgtgggaaaggccctgagcgacgcatgtatgggcacaatcgcctccttcctgtctaagtaccaggacatcatcatcgaacaccagaaggtggtgaagggcaaccagaagagactggagagcctgcgggagctggccggcaaggaaaacctggaataccctagcgtgaccctgccacctcagcctcacaccaaggagggcgttgatgcctacaacgaagtgatcgcccgggtgcgaatgtgggtgaacctgaacctgtggcagaagctgaagctaagcagagatgatgccaagcctctgctgagactgaagggattcccttcctttcctctggtcgagagacaggccaacgaagtggactggtgggacatggtgtgtaacgtgaagaagctgatcaacgagaaaaaggaggatggcaaggtgttttggcagaatctggctggctacaagagacaggaagccctgagaccatacctgagcagcgaggaagatcggaagaagggaaagaaattcgctcggtaccagctgggcgacctgctgctgcacctggaaaagaagcacggcgaggactggggaaaggtgtacgacgaggcctgggagcggattgacaagaaagtggaaggcctgagcaagcacatcaagctggaagaggaacggagaagcgaggacgcccagagcaaggccgccctgaccgactggctgcgggctaaggccagcttcgtgatcgagggcctgaaggaggccgacaaggacgagttctgcagatgcgagctgaagctgcagaagtggtacggggacctgcggggaaagcccttcgccatcgaagccgagaacagcatcctggacatcagcggcttcagcaagcagtacaactgtgccttcatctggcagaaggacggcgtgaagaagctgaacctgtacctgatcatcaactacttcaagggcggcaagctgcggttcaagaagatcaaacctgaagccttcgaagccaacagattctacaccgtgatcaacaaaaagagcggcgagatcgtgcccatggaggtgaacttcaacttcgacgaccccaacctgatcatcctgcctctggcctttggcaagagacagggcagagaattcatctggaacgacctgctgtccctggaaaccggcagcctgaagctggccaacggaagagtgatcgagaagacactgtacaacagaagaacccggcaggatgagcctgccctgttcgtggccctgaccttcgagcggcgggaggtcctggactcctccaatatcaaaccaatgaacctgatcggcgtggcaagaggcgaaaacatccccgccgtgatcgccctgaccgaccccgagggctgcccactgagccggtttaaggatagcctgggaaacccaacccacatcctgagaatcggcgagagctataaggagaagcagcggaccatccaggccaagaaggaggtggagcagcggagagccggcggctacagccggaagtacgccagcaaagccaagaatctggcagacgatatggtgagaaacaccgctagagatctgctgtactacgccgtgacccaggatgccatgctgatcttcgccaacctgagccggggcttcggccggcagggcaagcggaccttcatggccgagagacagtacacacggatggaggactggctgaccgccaagctggcctacgagggcctgagcaagacctacctgtccaagacactggcccagtacacctccaagacatgcagcaactgtgggtttaccatcaccagcgccgactacgacagggtgctggagaagctgaagaagacagcaacaggctggatgaccacaattaacggcaaggagctgaaggtggagggccagattacctactacaacagatacaagagacagaacgtagtcaaggacctgtccgtcgagctggatagactgagcgaagaatctgtgaacaacgacatctcctcctggacaaagggcagaagcggagaagctctgagcctcctgaagaaaagattctcccatagacccgtgcaggagaagttcgtgtgcctgaactgcggcttcgagacacacgcagccgagcaagccgccctgaacatcgccagatcctggctgttcctgcggagccaggagtacaagaaataccagacaaacaagacaaccggcaacaccgataagagagccttcgtcgagacctggcagtccttttaccggaagaagcttaaggaggtgtggaaacctgccgtgcggtctggcggatctggcggaggctccacaagccccaaggtgcccgtgaccttcgacgacgtggccgtgtacttcagcgagagcgagtggggcaggctggacaagtggcagaaggagctgtacaagcacgtgatgaggggcaactacgagatgctggtgagcctggactacgccatcagcaagcccgacatcctgaccaggatggagaggggcgaggagccctgccccgacggcccctggggccccgaggagggcaaggagagggaggccgccaggaccagccccaagaaaaagagaaaagtctaagctgccttctgcggggcttgccttctggccatgcccttcttctctcccttgcacctgtacctcttggtctttgaataaagcctgagtaggaaggctagcaaaaaaaaaaaaaaaaaaaaaaaaaaaaaaaaaaaaaaaaaaaaaaaaaaaaaaaaaaaaaaaaaaaaaaaaaaaaaaaa

SEQ ID NO: 7028 - RNA, 5797 nt, synthetic construct
  source 1..5797: mol_type = other RNA
aggaaataagagagaaaagaagagtaagaagaaatataagagccaccatggcccctaagaagaagcgtaaagtgagccggatggaacgcctcgtctacgaggtgcggcagaagtgcagaaacatcgaggacatctgcatctcctgcggatctctgaacgtgaccctggagcacccactgttcatcggcggcatgtgccagaactgtaaaaactgttttctggagtgtgcctatcaatacgacgatgacggctaccagagctactgcaccatctgttgcggcggaagagaggtgctgatgtgtggaaataacaactgctgccggtgcttctgcgtggaatgcgtggacctgctggtgggccccggcgccgcccaggccgctattaaggaagatccttggaactgctacatgtgcggccacaagggcacatacggcctgctgagacggagagaggactggcctagcagactgcagatgttcttcgccaataaccacgaccaggagttcgacccccctaaggtgtaccctcccgtccccgccgagaagagaaagcccatccgggtcctgagcctgttcgatggcatcgccaccggtctgctggtgctgaaggacctgggcatccaggtggataggtacattgcctccgaggtgtgcgaggactccatcaccgtgggaatggtgcgtcatcagggcaagatcatgtacgtgggcgacgtgcggagcgtgacacagaagcatatccaggagtggggccctttcgacctggtgatcggcggcagcccttgcaatgacctgagcatcgtgaacccagcccggaagggcctgtacgagggaaccggcagactgttcttcgagttttacagactgctgcacgacgcccggcctaaggaaggcgacgaccggcccttcttttggctgttcgagaatgtggtggccatgggagtcagcgacaagcgggatattagccggttcctggagagcaaccccgtgatgatcgatgccaaggaagtgagcgccgcccaccgggccagatacttctggggcaatctgcctggcatgaacagacccctggccagcaccgtgaacgacaagctggagctgcaggagtgcctggagcacggccggatcgccaagttcagcaaggtgagaaccatcaccacccgaagcaacagcatcaaacaaggcaaggaccagcactttcctgtgttcatgaacgagaaggaggacatcctgtggtgtaccgagatggagagagtgttcgggttcccagtccactacacagatgtcagcaacatgtctagactggccagacagagactgctgggaagaagctggtccgtccctgtgatcagacacctgttcgcccctctgaaggagtacttcgcctgcgtgagcagcggcaacagcaacgccaacagccggggccccagcttctctagcggcctggtgccactgtccctgagagggagccacatgggccccatggagatctacaaaaccgtgagcgcctggaagcggcagcctgtgcgcgtgctgagcctgtttcggaatatcgataaagtcctgaaaagcctgggattcctggagagcggctctggctccggcggtggcaccctgaagtacgtggaggatgtgacaaacgtggtcagacgggatgtggagaagtggggccccttcgatctggtgtacggcagcacccaacccctgggcagctcttgtgaccggtgccctggctggtacatgtttcagttccaccggatcctgcagtacgccctgccgagacaggagtcccagcggccattcttttggattttcatggacaacttgctgctgaccgaggatgaccaggaaactaccactcggttcctgcagaccgaagccgtgaccctgcaggacgtgagaggccgggactaccagaacgccatgcgggtgtggtccaacatccctggactgaaaagcaagcacgcacctctgacccctaaagaagaggagtacctgcaggcccaggtgcggagcagaagcaagctggacgcccctaaggtggatctgctggtgaagaattgcctcctgcccctgagagagtacttcaagtatttcagccagaatagtctgcccctgggcggcccaagcagcggcgcccctcctcccagcggcggcagcccagccggctccccaacctctaccgaggagggcacctctgagtccgccacccccgagagcggccctggcacctccaccgagcccagcgagggcagcgcacccggcagccctgccggcagccccacctccacagaggagggaaccagcaccgagcccagcgaaggcagcgccccaggcaccagcaccgagcctagtgagggcggctctggcggcggcagcgcccaggagattaaacggatcaacaagatcagaagaagacttgtgaaagacagcaacaccaagaaggccggcaagacaggccccatgaaaaccctgctggttagagtgatgacacccgatctgagagagcggctggaaaacctgagaaagaagcctgaaaatatcccccagcccatcagcaatacatctagagccaacctgaataagctgctgaccgattacaccgaaatgaagaaggcgatcctgcatgtgtactgggaagagttccagaaggaccctgtgggcctgatgagccgggtggcccagcctgccagcaagaagatcgatcagaacaagctgaaacctgagatggacgagaagggcaacctgaccaccgccggctttgcctgctctcagtgtggccagcccctgttcgtgtacaagctggagcaggtgtctgagaagggcaaggcttacaccaactacttcggacggtgcaatgtggccgagcacgaaaagctgatcctgctggcccagctgaagcccgagaaggatagcgacgaagccgtgacatatagcctgggaaagtttgggcagagggccctggatttctacagcattcatgtgaccaaggagtccacccaccccgtgaagcccctggcccagatcgccggaaacagatacgcctccggacctgtgggaaaggccctgagcgacgcatgtatgggcacaatcgcctccttcctgtctaagtaccaggacatcatcatcgaacaccagaaggtggtgaagggcaaccagaagagactggagagcctgcgggagctggccggcaaggaaaacctggaataccctagcgtgaccctgccacctcagcctcacaccaaggagggcgttgatgcctacaacgaagtgatcgcccgggtgcgaatgtgggtgaacctgaacctgtggcagaagctgaagctaagcagagatgatgccaagcctctgctgagactgaagggattcccttcctttcctctggtcgagagacaggccaacgaagtggactggtgggacatggtgtgtaacgtgaagaagctgatcaacgagaaaaaggaggatggcaaggtgttttggcagaatctggctggctacaagagacaggaagccctgagaccatacctgagcagcgaggaagatcggaagaagggaaagaaattcgctcggtaccagctgggcgacctgctgctgcacctggaaaagaagcacggcgaggactggggaaaggtgtacgacgaggcctgggagcggattgacaagaaagtggaaggcctgagcaagcacatcaagctggaagaggaacggagaagcgaggacgcccagagcaaggccgccctgaccgactggctgcgggctaaggccagcttcgtgatcgagggcctgaaggaggccgacaaggacgagttctgcagatgcgagctgaagctgcagaagtggtacggggacctgcggggaaagcccttcgccatcgaagccgagaacagcatcctggacatcagcggcttcagcaagcagtacaactgtgccttcatctggcagaaggacggcgtgaagaagctgaacctgtacctgatcatcaactacttcaagggcggcaagctgcggttcaagaagatcaaacctgaagccttcgaagccaacagattctacaccgtgatcaacaaaaagagcggcgagatcgtgcccatggaggtgaacttcaacttcgacgaccccaacctgatcatcctgcctctggcctttggcaagagacagggcagagaattcatctggaacgacctgctgtccctggaaaccggcagcctgaagctggccaacggaagagtgatcgagaagacactgtacaacagaagaacccggcaggatgagcctgccctgttcgtggccctgaccttcgagcggcgggaggtcctggactcctccaatatcaaaccaatgaacctgatcggcgtggcaagaggcgaaaacatccccgccgtgatcgccctgaccgaccccgagggctgcccactgagccggtttaaggatagcctgggaaacccaacccacatcctgagaatcggcgagagctataaggagaagcagcggaccatccaggccaagaaggaggtggagcagcggagagccggcggctacagccggaagtacgccagcaaagccaagaatctggcagacgatatggtgagaaacaccgctagagatctgctgtactacgccgtgacccaggatgccatgctgatcttcgccaacctgagccggggcttcggccggcagggcaagcggaccttcatggccgagagacagtacacacggatggaggactggctgaccgccaagctggcctacgagggcctgagcaagacctacctgtccaagacactggcccagtacacctccaagacatgcagcaactgtgggtttaccatcaccagcgccgactacgacagggtgctggagaagctgaagaagacagcaacaggctggatgaccacaattaacggcaaggagctgaaggtggagggccagattacctactacaacagatacaagagacagaacgtagtcaaggacctgtccgtcgagctggatagactgagcgaagaatctgtgaacaacgacatctcctcctggacaaagggcagaagcggagaagctctgagcctcctgaagaaaagattctcccatagacccgtgcaggagaagttcgtgtgcctgaactgcggcttcgagacacacgcagccgagcaagccgccctgaacatcgccagatcctggctgttcctgcggagccaggagtacaagaaataccagacaaacaagacaaccggcaacaccgataagagagccttcgtcgagacctggcagtccttttaccggaagaagcttaaggaggtgtggaaacctgccgtgcggtctggcggatctggcggaggctccacaagctgcaacatgagcctgagcttcagcgacgtggccgtggacctgagccaggaggagtgggagtgcatgagccccgcccagagggccctgtacagggacgtgatgctggagaactacagcaacctggtgagcctgggctgcagcacccccaagcccgacatgatcaccctgctggagcaggagaaggagccctggatgatcctgagggagggcaccggcagctggttcaccgacctggagagcgagaccagccccaagaaaaagagaaaagtctaagctgccttctgcggggcttgccttctggccatgcccttcttctctcccttgcacctgtacctcttggtctttgaataaagcctgagtaggaaggctagcaaaaaaaaaaaaaaaaaaaaaaaaaaaaaaaaaaaaaaaaaaaaaaaaaaaaaaaaaaaaaaaaaaaaaaaaaaaaaaaa

SEQ ID NO: 7029 - RNA, 5797 nt, synthetic construct
  source 1..5797: mol_type = other RNA
aggaaataagagagaaaagaagagtaagaagaaatataagagccaccatggcccctaagaagaagcgtaaagtgagccggatggaacgcctcgtctacgaggtgcggcagaagtgcagaaacatcgaggacatctgcatctcctgcggatctctgaacgtgaccctggagcacccactgttcatcggcggcatgtgccagaactgtaaaaactgttttctggagtgtgcctatcaatacgacgatgacggctaccagagctactgcaccatctgttgcggcggaagagaggtgctgatgtgtggaaataacaactgctgccggtgcttctgcgtggaatgcgtggacctgctggtgggccccggcgccgcccaggccgctattaaggaagatccttggaactgctacatgtgcggccacaagggcacatacggcctgctgagacggagagaggactggcctagcagactgcagatgttcttcgccaataaccacgaccaggagttcgacccccctaaggtgtaccctcccgtccccgccgagaagagaaagcccatccgggtcctgagcctgttcgatggcatcgccaccggtctgctggtgctgaaggacctgggcatccaggtggataggtacattgcctccgaggtgtgcgaggactccatcaccgtgggaatggtgcgtcatcagggcaagatcatgtacgtgggcgacgtgcggagcgtgacacagaagcatatccaggagtggggccctttcgacctggtgatcggcggcagcccttgcaatgacctgagcatcgtgaacccagcccggaagggcctgtacgagggaaccggcagactgttcttcgagttttacagactgctgcacgacgcccggcctaaggaaggcgacgaccggcccttcttttggctgttcgagaatgtggtggccatgggagtcagcgacaagcgggatattagccggttcctggagagcaaccccgtgatgatcgatgccaaggaagtgagcgccgcccaccgggccagatacttctggggcaatctgcctggcatgaacagacccctggccagcaccgtgaacgacaagctggagctgcaggagtgcctggagcacggccggatcgccaagttcagcaaggtgagaaccatcaccacccgaagcaacagcatcaaacaaggcaaggaccagcactttcctgtgttcatgaacgagaaggaggacatcctgtggtgtaccgagatggagagagtgttcgggttcccagtccactacacagatgtcagcaacatgtctagactggccagacagagactgctgggaagaagctggtccgtccctgtgatcagacacctgttcgcccctctgaaggagtacttcgcctgcgtgagcagcggcaacagcaacgccaacagccggggccccagcttctctagcggcctggtgccactgtccctgagagggagccacatgggccccatggagatctacaaaaccgtgagcgcctggaagcggcagcctgtgcgcgtgctgagcctgtttcggaatatcgataaagtcctgaaaagcctgggattcctggagagcggctctggctccggcggtggcaccctgaagtacgtggaggatgtgacaaacgtggtcagacgggatgtggagaagtggggccccttcgatctggtgtacggcagcacccaacccctgggcagctcttgtgaccggtgccctggctggtacatgtttcagttccaccggatcctgcagtacgccctgccgagacaggagtcccagcggccattcttttggattttcatggacaacttgctgctgaccgaggatgaccaggaaactaccactcggttcctgcagaccgaagccgtgaccctgcaggacgtgagaggccgggactaccagaacgccatgcgggtgtggtccaacatccctggactgaaaagcaagcacgcacctctgacccctaaagaagaggagtacctgcaggcccaggtgcggagcagaagcaagctggacgcccctaaggtggatctgctggtgaagaattgcctcctgcccctgagagagtacttcaagtatttcagccagaatagtctgcccctgggcggcccaagcagcggcgcccctcctcccagcggcggcagcccagccggctccccaacctctaccgaggagggcacctctgagtccgccacccccgagagcggccctggcacctccaccgagcccagcgagggcagcgcacccggcagccctgccggcagccccacctccacagaggagggaaccagcaccgagcccagcgaaggcagcgccccaggcaccagcaccgagcctagtgagggcggctctggcggcggcagcgcccaggagattaaacggatcaacaagatcagaagaagacttgtgaaagacagcaacaccaagaaggccggcaagacaggccccatgaaaaccctgctggttagagtgatgacacccgatctgagagagcggctggaaaacctgagaaagaagcctgaaaatatcccccagcccatcagcaatacatctagagccaacctgaataagctgctgaccgattacaccgaaatgaagaaggcgatcctgcatgtgtactgggaagagttccagaaggaccctgtgggcctgatgagccgggtggcccagcctgccagcaagaagatcgatcagaacaagctgaaacctgagatggacgagaagggcaacctgaccaccgccggctttgcctgctctcagtgtggccagcccctgttcgtgtacaagctggagcaggtgtctgagaagggcaaggcttacaccaactacttcggacggtgcaatgtggccgagcacgaaaagctgatcctgctggcccagctgaagcccgagaaggatagcgacgaagccgtgacatatagcctgggaaagtttgggcagagggccctggatttctacagcattcatgtgaccaaggagtccacccaccccgtgaagcccctggcccagatcgccggaaacagatacgcctccggacctgtgggaaaggccctgagcgacgcatgtatgggcacaatcgcctccttcctgtctaagtaccaggacatcatcatcgaacaccagaaggtggtgaagggcaaccagaagagactggagagcctgcgggagctggccggcaaggaaaacctggaataccctagcgtgaccctgccacctcagcctcacaccaaggagggcgttgatgcctacaacgaagtgatcgcccgggtgcgaatgtgggtgaacctgaacctgtggcagaagctgaagctaagcagagatgatgccaagcctctgctgagactgaagggattcccttcctttcctctggtcgagagacaggccaacgaagtggactggtgggacatggtgtgtaacgtgaagaagctgatcaacgagaaaaaggaggatggcaaggtgttttggcagaatctggctggctacaagagacaggaagccctgagaccatacctgagcagcgaggaagatcggaagaagggaaagaaattcgctcggtaccagctgggcgacctgctgctgcacctggaaaagaagcacggcgaggactggggaaaggtgtacgacgaggcctgggagcggattgacaagaaagtggaaggcctgagcaagcacatcaagctggaagaggaacggagaagcgaggacgcccagagcaaggccgccctgaccgactggctgcgggctaaggccagcttcgtgatcgagggcctgaaggaggccgacaaggacgagttctgcagatgcgagctgaagctgcagaagtggtacggggacctgcggggaaagcccttcgccatcgaagccgagaacagcatcctggacatcagcggcttcagcaagcagtacaactgtgccttcatctggcagaaggacggcgtgaagaagctgaacctgtacctgatcatcaactacttcaagggcggcaagctgcggttcaagaagatcaaacctgaagccttcgaagccaacagattctacaccgtgatcaacaaaaagagcggcgagatcgtgcccatggaggtgaacttcaacttcgacgaccccaacctgatcatcctgcctctggcctttggcaagagacagggcagagaattcatctggaacgacctgctgtccctggaaaccggcagcctgaagctggccaacggaagagtgatcgagaagacactgtacaacagaagaacccggcaggatgagcctgccctgttcgtggccctgaccttcgagcggcgggaggtcctggactcctccaatatcaaaccaatgaacctgatcggcgtggcaagaggcgaaaacatccccgccgtgatcgccctgaccgaccccgagggctgcccactgagccggtttaaggatagcctgggaaacccaacccacatcctgagaatcggcgagagctataaggagaagcagcggaccatccaggccaagaaggaggtggagcagcggagagccggcggctacagccggaagtacgccagcaaagccaagaatctggcagacgatatggtgagaaacaccgctagagatctgctgtactacgccgtgacccaggatgccatgctgatcttcgccaacctgagccggggcttcggccggcagggcaagcggaccttcatggccgagagacagtacacacggatggaggactggctgaccgccaagctggcctacgagggcctgagcaagacctacctgtccaagacactggcccagtacacctccaagacatgcagcaactgtgggtttaccatcaccagcgccgactacgacagggtgctggagaagctgaagaagacagcaacaggctggatgaccacaattaacggcaaggagctgaaggtggagggccagattacctactacaacagatacaagagacagaacgtagtcaaggacctgtccgtcgagctggatagactgagcgaagaatctgtgaacaacgacatctcctcctggacaaagggcagaagcggagaagctctgagcctcctgaagaaaagattctcccatagacccgtgcaggagaagttcgtgtgcctgaactgcggcttcgagacacacgcagccgagcaagccgccctgaacatcgccagatcctggctgttcctgcggagccaggagtacaagaaataccagacaaacaagacaaccggcaacaccgataagagagccttcgtcgagacctggcagtccttttaccggaagaagcttaaggaggtgtggaaacctgccgtgcggtctggcggatctggcggaggctccacaagcgagcccggcgccgtgagcttcgccgacgtggccgtgtacttctgcagggaggagtggggctgcctgaggcccgcccagagggccctgtacagggacgtgatgagggagacctacggccacctgagcgccctgggcatcggcggcaacaagcccgccctgatcagctgggtggaggaggaggccgagctgtggggccccgccgcccaggaccccgaggtggccaagtgccagacccagaccgacaccagccccaagaaaaagagaaaagtctaagctgccttctgcggggcttgccttctggccatgcccttcttctctcccttgcacctgtacctcttggtctttgaataaagcctgagtaggaaggctagcaaaaaaaaaaaaaaaaaaaaaaaaaaaaaaaaaaaaaaaaaaaaaaaaaaaaaaaaaaaaaaaaaaaaaaaaaaaaaaaa

SEQ ID NO: 7030 - RNA, 5797 nt, synthetic construct
  source 1..5797: mol_type = other RNA
aggaaataagagagaaaagaagagtaagaagaaatataagagccaccatggcccctaagaagaagcgtaaagtgagccggatggaacgcctcgtctacgaggtgcggcagaagtgcagaaacatcgaggacatctgcatctcctgcggatctctgaacgtgaccctggagcacccactgttcatcggcggcatgtgccagaactgtaaaaactgttttctggagtgtgcctatcaatacgacgatgacggctaccagagctactgcaccatctgttgcggcggaagagaggtgctgatgtgtggaaataacaactgctgccggtgcttctgcgtggaatgcgtggacctgctggtgggccccggcgccgcccaggccgctattaaggaagatccttggaactgctacatgtgcggccacaagggcacatacggcctgctgagacggagagaggactggcctagcagactgcagatgttcttcgccaataaccacgaccaggagttcgacccccctaaggtgtaccctcccgtccccgccgagaagagaaagcccatccgggtcctgagcctgttcgatggcatcgccaccggtctgctggtgctgaaggacctgggcatccaggtggataggtacattgcctccgaggtgtgcgaggactccatcaccgtgggaatggtgcgtcatcagggcaagatcatgtacgtgggcgacgtgcggagcgtgacacagaagcatatccaggagtggggccctttcgacctggtgatcggcggcagcccttgcaatgacctgagcatcgtgaacccagcccggaagggcctgtacgagggaaccggcagactgttcttcgagttttacagactgctgcacgacgcccggcctaaggaaggcgacgaccggcccttcttttggctgttcgagaatgtggtggccatgggagtcagcgacaagcgggatattagccggttcctggagagcaaccccgtgatgatcgatgccaaggaagtgagcgccgcccaccgggccagatacttctggggcaatctgcctggcatgaacagacccctggccagcaccgtgaacgacaagctggagctgcaggagtgcctggagcacggccggatcgccaagttcagcaaggtgagaaccatcaccacccgaagcaacagcatcaaacaaggcaaggaccagcactttcctgtgttcatgaacgagaaggaggacatcctgtggtgtaccgagatggagagagtgttcgggttcccagtccactacacagatgtcagcaacatgtctagactggccagacagagactgctgggaagaagctggtccgtccctgtgatcagacacctgttcgcccctctgaaggagtacttcgcctgcgtgagcagcggcaacagcaacgccaacagccggggccccagcttctctagcggcctggtgccactgtccctgagagggagccacatgggccccatggagatctacaaaaccgtgagcgcctggaagcggcagcctgtgcgcgtgctgagcctgtttcggaatatcgataaagtcctgaaaagcctgggattcctggagagcggctctggctccggcggtggcaccctgaagtacgtggaggatgtgacaaacgtggtcagacgggatgtggagaagtggggccccttcgatctggtgtacggcagcacccaacccctgggcagctcttgtgaccggtgccctggctggtacatgtttcagttccaccggatcctgcagtacgccctgccgagacaggagtcccagcggccattcttttggattttcatggacaacttgctgctgaccgaggatgaccaggaaactaccactcggttcctgcagaccgaagccgtgaccctgcaggacgtgagaggccgggactaccagaacgccatgcgggtgtggtccaacatccctggactgaaaagcaagcacgcacctctgacccctaaagaagaggagtacctgcaggcccaggtgcggagcagaagcaagctggacgcccctaaggtggatctgctggtgaagaattgcctcctgcccctgagagagtacttcaagtatttcagccagaatagtctgcccctgggcggcccaagcagcggcgcccctcctcccagcggcggcagcccagccggctccccaacctctaccgaggagggcacctctgagtccgccacccccgagagcggccctggcacctccaccgagcccagcgagggcagcgcacccggcagccctgccggcagccccacctccacagaggagggaaccagcaccgagcccagcgaaggcagcgccccaggcaccagcaccgagcctagtgagggcggctctggcggcggcagcgcccaggagattaaacggatcaacaagatcagaagaagacttgtgaaagacagcaacaccaagaaggccggcaagacaggccccatgaaaaccctgctggttagagtgatgacacccgatctgagagagcggctggaaaacctgagaaagaagcctgaaaatatcccccagcccatcagcaatacatctagagccaacctgaataagctgctgaccgattacaccgaaatgaagaaggcgatcctgcatgtgtactgggaagagttccagaaggaccctgtgggcctgatgagccgggtggcccagcctgccagcaagaagatcgatcagaacaagctgaaacctgagatggacgagaagggcaacctgaccaccgccggctttgcctgctctcagtgtggccagcccctgttcgtgtacaagctggagcaggtgtctgagaagggcaaggcttacaccaactacttcggacggtgcaatgtggccgagcacgaaaagctgatcctgctggcccagctgaagcccgagaaggatagcgacgaagccgtgacatatagcctgggaaagtttgggcagagggccctggatttctacagcattcatgtgaccaaggagtccacccaccccgtgaagcccctggcccagatcgccggaaacagatacgcctccggacctgtgggaaaggccctgagcgacgcatgtatgggcacaatcgcctccttcctgtctaagtaccaggacatcatcatcgaacaccagaaggtggtgaagggcaaccagaagagactggagagcctgcgggagctggccggcaaggaaaacctggaataccctagcgtgaccctgccacctcagcctcacaccaaggagggcgttgatgcctacaacgaagtgatcgcccgggtgcgaatgtgggtgaacctgaacctgtggcagaagctgaagctaagcagagatgatgccaagcctctgctgagactgaagggattcccttcctttcctctggtcgagagacaggccaacgaagtggactggtgggacatggtgtgtaacgtgaagaagctgatcaacgagaaaaaggaggatggcaaggtgttttggcagaatctggctggctacaagagacaggaagccctgagaccatacctgagcagcgaggaagatcggaagaagggaaagaaattcgctcggtaccagctgggcgacctgctgctgcacctggaaaagaagcacggcgaggactggggaaaggtgtacgacgaggcctgggagcggattgacaagaaagtggaaggcctgagcaagcacatcaagctggaagaggaacggagaagcgaggacgcccagagcaaggccgccctgaccgactggctgcgggctaaggccagcttcgtgatcgagggcctgaaggaggccgacaaggacgagttctgcagatgcgagctgaagctgcagaagtggtacggggacctgcggggaaagcccttcgccatcgaagccgagaacagcatcctggacatcagcggcttcagcaagcagtacaactgtgccttcatctggcagaaggacggcgtgaagaagctgaacctgtacctgatcatcaactacttcaagggcggcaagctgcggttcaagaagatcaaacctgaagccttcgaagccaacagattctacaccgtgatcaacaaaaagagcggcgagatcgtgcccatggaggtgaacttcaacttcgacgaccccaacctgatcatcctgcctctggcctttggcaagagacagggcagagaattcatctggaacgacctgctgtccctggaaaccggcagcctgaagctggccaacggaagagtgatcgagaagacactgtacaacagaagaacccggcaggatgagcctgccctgttcgtggccctgaccttcgagcggcgggaggtcctggactcctccaatatcaaaccaatgaacctgatcggcgtggcaagaggcgaaaacatccccgccgtgatcgccctgaccgaccccgagggctgcccactgagccggtttaaggatagcctgggaaacccaacccacatcctgagaatcggcgagagctataaggagaagcagcggaccatccaggccaagaaggaggtggagcagcggagagccggcggctacagccggaagtacgccagcaaagccaagaatctggcagacgatatggtgagaaacaccgctagagatctgctgtactacgccgtgacccaggatgccatgctgatcttcgccaacctgagccggggcttcggccggcagggcaagcggaccttcatggccgagagacagtacacacggatggaggactggctgaccgccaagctggcctacgagggcctgagcaagacctacctgtccaagacactggcccagtacacctccaagacatgcagcaactgtgggtttaccatcaccagcgccgactacgacagggtgctggagaagctgaagaagacagcaacaggctggatgaccacaattaacggcaaggagctgaaggtggagggccagattacctactacaacagatacaagagacagaacgtagtcaaggacctgtccgtcgagctggatagactgagcgaagaatctgtgaacaacgacatctcctcctggacaaagggcagaagcggagaagctctgagcctcctgaagaaaagattctcccatagacccgtgcaggagaagttcgtgtgcctgaactgcggcttcgagacacacgcagccgagcaagccgccctgaacatcgccagatcctggctgttcctgcggagccaggagtacaagaaataccagacaaacaagacaaccggcaacaccgataagagagccttcgtcgagacctggcagtccttttaccggaagaagcttaaggaggtgtggaaacctgccgtgcggtctggcggatctggcggaggctccacaagcttcaagggccccgtgaccttcaaggacgtgaccgtggagttcaccaaggaggagtggaagctgctgacccccgcccagaggaccctgtacaaggacgtgatgctggagaactacaaccacctggtgagcgtgggctacagggtgagcaagcccaacctggtgttcaagctgaagcagggcaaggagccctgggtgctggaggtggagttccccaggaggaggtgccccgaggagctgtggaacaccagccccaagaaaaagagaaaagtctaagctgccttctgcggggcttgccttctggccatgcccttcttctctcccttgcacctgtacctcttggtctttgaataaagcctgagtaggaaggctagcaaaaaaaaaaaaaaaaaaaaaaaaaaaaaaaaaaaaaaaaaaaaaaaaaaaaaaaaaaaaaaaaaaaaaaaaaaaaaaaa

SEQ ID NO: 7031 - RNA, 5797 nt, synthetic construct
  source 1..5797: mol_type = other RNA
aggaaataagagagaaaagaagagtaagaagaaatataagagccaccatggcccctaagaagaagcgtaaagtgagccggatggaacgcctcgtctacgaggtgcggcagaagtgcagaaacatcgaggacatctgcatctcctgcggatctctgaacgtgaccctggagcacccactgttcatcggcggcatgtgccagaactgtaaaaactgttttctggagtgtgcctatcaatacgacgatgacggctaccagagctactgcaccatctgttgcggcggaagagaggtgctgatgtgtggaaataacaactgctgccggtgcttctgcgtggaatgcgtggacctgctggtgggccccggcgccgcccaggccgctattaaggaagatccttggaactgctacatgtgcggccacaagggcacatacggcctgctgagacggagagaggactggcctagcagactgcagatgttcttcgccaataaccacgaccaggagttcgacccccctaaggtgtaccctcccgtccccgccgagaagagaaagcccatccgggtcctgagcctgttcgatggcatcgccaccggtctgctggtgctgaaggacctgggcatccaggtggataggtacattgcctccgaggtgtgcgaggactccatcaccgtgggaatggtgcgtcatcagggcaagatcatgtacgtgggcgacgtgcggagcgtgacacagaagcatatccaggagtggggccctttcgacctggtgatcggcggcagcccttgcaatgacctgagcatcgtgaacccagcccggaagggcctgtacgagggaaccggcagactgttcttcgagttttacagactgctgcacgacgcccggcctaaggaaggcgacgaccggcccttcttttggctgttcgagaatgtggtggccatgggagtcagcgacaagcgggatattagccggttcctggagagcaaccccgtgatgatcgatgccaaggaagtgagcgccgcccaccgggccagatacttctggggcaatctgcctggcatgaacagacccctggccagcaccgtgaacgacaagctggagctgcaggagtgcctggagcacggccggatcgccaagttcagcaaggtgagaaccatcaccacccgaagcaacagcatcaaacaaggcaaggaccagcactttcctgtgttcatgaacgagaaggaggacatcctgtggtgtaccgagatggagagagtgttcgggttcccagtccactacacagatgtcagcaacatgtctagactggccagacagagactgctgggaagaagctggtccgtccctgtgatcagacacctgttcgcccctctgaaggagtacttcgcctgcgtgagcagcggcaacagcaacgccaacagccggggccccagcttctctagcggcctggtgccactgtccctgagagggagccacatgggccccatggagatctacaaaaccgtgagcgcctggaagcggcagcctgtgcgcgtgctgagcctgtttcggaatatcgataaagtcctgaaaagcctgggattcctggagagcggctctggctccggcggtggcaccctgaagtacgtggaggatgtgacaaacgtggtcagacgggatgtggagaagtggggccccttcgatctggtgtacggcagcacccaacccctgggcagctcttgtgaccggtgccctggctggtacatgtttcagttccaccggatcctgcagtacgccctgccgagacaggagtcccagcggccattcttttggattttcatggacaacttgctgctgaccgaggatgaccaggaaactaccactcggttcctgcagaccgaagccgtgaccctgcaggacgtgagaggccgggactaccagaacgccatgcgggtgtggtccaacatccctggactgaaaagcaagcacgcacctctgacccctaaagaagaggagtacctgcaggcccaggtgcggagcagaagcaagctggacgcccctaaggtggatctgctggtgaagaattgcctcctgcccctgagagagtacttcaagtatttcagccagaatagtctgcccctgggcggcccaagcagcggcgcccctcctcccagcggcggcagcccagccggctccccaacctctaccgaggagggcacctctgagtccgccacccccgagagcggccctggcacctccaccgagcccagcgagggcagcgcacccggcagccctgccggcagccccacctccacagaggagggaaccagcaccgagcccagcgaaggcagcgccccaggcaccagcaccgagcctagtgagggcggctctggcggcggcagcgcccaggagattaaacggatcaacaagatcagaagaagacttgtgaaagacagcaacaccaagaaggccggcaagacaggccccatgaaaaccctgctggttagagtgatgacacccgatctgagagagcggctggaaaacctgagaaagaagcctgaaaatatcccccagcccatcagcaatacatctagagccaacctgaataagctgctgaccgattacaccgaaatgaagaaggcgatcctgcatgtgtactgggaagagttccagaaggaccctgtgggcctgatgagccgggtggcccagcctgccagcaagaagatcgatcagaacaagctgaaacctgagatggacgagaagggcaacctgaccaccgccggctttgcctgctctcagtgtggccagcccctgttcgtgtacaagctggagcaggtgtctgagaagggcaaggcttacaccaactacttcggacggtgcaatgtggccgagcacgaaaagctgatcctgctggcccagctgaagcccgagaaggatagcgacgaagccgtgacatatagcctgggaaagtttgggcagagggccctggatttctacagcattcatgtgaccaaggagtccacccaccccgtgaagcccctggcccagatcgccggaaacagatacgcctccggacctgtgggaaaggccctgagcgacgcatgtatgggcacaatcgcctccttcctgtctaagtaccaggacatcatcatcgaacaccagaaggtggtgaagggcaaccagaagagactggagagcctgcgggagctggccggcaaggaaaacctggaataccctagcgtgaccctgccacctcagcctcacaccaaggagggcgttgatgcctacaacgaagtgatcgcccgggtgcgaatgtgggtgaacctgaacctgtggcagaagctgaagctaagcagagatgatgccaagcctctgctgagactgaagggattcccttcctttcctctggtcgagagacaggccaacgaagtggactggtgggacatggtgtgtaacgtgaagaagctgatcaacgagaaaaaggaggatggcaaggtgttttggcagaatctggctggctacaagagacaggaagccctgagaccatacctgagcagcgaggaagatcggaagaagggaaagaaattcgctcggtaccagctgggcgacctgctgctgcacctggaaaagaagcacggcgaggactggggaaaggtgtacgacgaggcctgggagcggattgacaagaaagtggaaggcctgagcaagcacatcaagctggaagaggaacggagaagcgaggacgcccagagcaaggccgccctgaccgactggctgcgggctaaggccagcttcgtgatcgagggcctgaaggaggccgacaaggacgagttctgcagatgcgagctgaagctgcagaagtggtacggggacctgcggggaaagcccttcgccatcgaagccgagaacagcatcctggacatcagcggcttcagcaagcagtacaactgtgccttcatctggcagaaggacggcgtgaagaagctgaacctgtacctgatcatcaactacttcaagggcggcaagctgcggttcaagaagatcaaacctgaagccttcgaagccaacagattctacaccgtgatcaacaaaaagagcggcgagatcgtgcccatggaggtgaacttcaacttcgacgaccccaacctgatcatcctgcctctggcctttggcaagagacagggcagagaattcatctggaacgacctgctgtccctggaaaccggcagcctgaagctggccaacggaagagtgatcgagaagacactgtacaacagaagaacccggcaggatgagcctgccctgttcgtggccctgaccttcgagcggcgggaggtcctggactcctccaatatcaaaccaatgaacctgatcggcgtggcaagaggcgaaaacatccccgccgtgatcgccctgaccgaccccgagggctgcccactgagccggtttaaggatagcctgggaaacccaacccacatcctgagaatcggcgagagctataaggagaagcagcggaccatccaggccaagaaggaggtggagcagcggagagccggcggctacagccggaagtacgccagcaaagccaagaatctggcagacgatatggtgagaaacaccgctagagatctgctgtactacgccgtgacccaggatgccatgctgatcttcgccaacctgagccggggcttcggccggcagggcaagcggaccttcatggccgagagacagtacacacggatggaggactggctgaccgccaagctggcctacgagggcctgagcaagacctacctgtccaagacactggcccagtacacctccaagacatgcagcaactgtgggtttaccatcaccagcgccgactacgacagggtgctggagaagctgaagaagacagcaacaggctggatgaccacaattaacggcaaggagctgaaggtggagggccagattacctactacaacagatacaagagacagaacgtagtcaaggacctgtccgtcgagctggatagactgagcgaagaatctgtgaacaacgacatctcctcctggacaaagggcagaagcggagaagctctgagcctcctgaagaaaagattctcccatagacccgtgcaggagaagttcgtgtgcctgaactgcggcttcgagacacacgcagccgagcaagccgccctgaacatcgccagatcctggctgttcctgcggagccaggagtacaagaaataccagacaaacaagacaaccggcaacaccgataagagagccttcgtcgagacctggcagtccttttaccggaagaagcttaaggaggtgtggaaacctgccgtgcggtctggcggatctggcggaggctccacaagcgtggccggccccgtgaccttcgaggaggtggccgtgtacttcagcgaggaggagtgggccctgctggaccccggccagagggccctgtacagggacgtgatgcaggagaactacgaggccgtgagctggctgggcttccccgtgagcaagcccggcgagaccagctggctggagagggccggcaagctgcaggagtgggagagcaggagccacgccaacaccgccaggcccaggggcaaccagaccagccccaagaaaaagagaaaagtctaagctgccttctgcggggcttgccttctggccatgcccttcttctctcccttgcacctgtacctcttggtctttgaataaagcctgagtaggaaggctagcaaaaaaaaaaaaaaaaaaaaaaaaaaaaaaaaaaaaaaaaaaaaaaaaaaaaaaaaaaaaaaaaaaaaaaaaaaaaaaaa

SEQ ID NO: 7032 - RNA, 5803 nt, synthetic construct
  source 1..5803: mol_type = other RNA
aggaaataagagagaaaagaagagtaagaagaaatataagagccaccatggcccctaagaagaagcgtaaagtgagccggatggaacgcctcgtctacgaggtgcggcagaagtgcagaaacatcgaggacatctgcatctcctgcggatctctgaacgtgaccctggagcacccactgttcatcggcggcatgtgccagaactgtaaaaactgttttctggagtgtgcctatcaatacgacgatgacggctaccagagctactgcaccatctgttgcggcggaagagaggtgctgatgtgtggaaataacaactgctgccggtgcttctgcgtggaatgcgtggacctgctggtgggccccggcgccgcccaggccgctattaaggaagatccttggaactgctacatgtgcggccacaagggcacatacggcctgctgagacggagagaggactggcctagcagactgcagatgttcttcgccaataaccacgaccaggagttcgacccccctaaggtgtaccctcccgtccccgccgagaagagaaagcccatccgggtcctgagcctgttcgatggcatcgccaccggtctgctggtgctgaaggacctgggcatccaggtggataggtacattgcctccgaggtgtgcgaggactccatcaccgtgggaatggtgcgtcatcagggcaagatcatgtacgtgggcgacgtgcggagcgtgacacagaagcatatccaggagtggggccctttcgacctggtgatcggcggcagcccttgcaatgacctgagcatcgtgaacccagcccggaagggcctgtacgagggaaccggcagactgttcttcgagttttacagactgctgcacgacgcccggcctaaggaaggcgacgaccggcccttcttttggctgttcgagaatgtggtggccatgggagtcagcgacaagcgggatattagccggttcctggagagcaaccccgtgatgatcgatgccaaggaagtgagcgccgcccaccgggccagatacttctggggcaatctgcctggcatgaacagacccctggccagcaccgtgaacgacaagctggagctgcaggagtgcctggagcacggccggatcgccaagttcagcaaggtgagaaccatcaccacccgaagcaacagcatcaaacaaggcaaggaccagcactttcctgtgttcatgaacgagaaggaggacatcctgtggtgtaccgagatggagagagtgttcgggttcccagtccactacacagatgtcagcaacatgtctagactggccagacagagactgctgggaagaagctggtccgtccctgtgatcagacacctgttcgcccctctgaaggagtacttcgcctgcgtgagcagcggcaacagcaacgccaacagccggggccccagcttctctagcggcctggtgccactgtccctgagagggagccacatgggccccatggagatctacaaaaccgtgagcgcctggaagcggcagcctgtgcgcgtgctgagcctgtttcggaatatcgataaagtcctgaaaagcctgggattcctggagagcggctctggctccggcggtggcaccctgaagtacgtggaggatgtgacaaacgtggtcagacgggatgtggagaagtggggccccttcgatctggtgtacggcagcacccaacccctgggcagctcttgtgaccggtgccctggctggtacatgtttcagttccaccggatcctgcagtacgccctgccgagacaggagtcccagcggccattcttttggattttcatggacaacttgctgctgaccgaggatgaccaggaaactaccactcggttcctgcagaccgaagccgtgaccctgcaggacgtgagaggccgggactaccagaacgccatgcgggtgtggtccaacatccctggactgaaaagcaagcacgcacctctgacccctaaagaagaggagtacctgcaggcccaggtgcggagcagaagcaagctggacgcccctaaggtggatctgctggtgaagaattgcctcctgcccctgagagagtacttcaagtatttcagccagaatagtctgcccctgggcggcccaagcagcggcgcccctcctcccagcggcggcagcccagccggctccccaacctctaccgaggagggcacctctgagtccgccacccccgagagcggccctggcacctccaccgagcccagcgagggcagcgcacccggcagccctgccggcagccccacctccacagaggagggaaccagcaccgagcccagcgaaggcagcgccccaggcaccagcaccgagcctagtgagggcggctctggcggcggcagcgcccaggagattaaacggatcaacaagatcagaagaagacttgtgaaagacagcaacaccaagaaggccggcaagacaggccccatgaaaaccctgctggttagagtgatgacacccgatctgagagagcggctggaaaacctgagaaagaagcctgaaaatatcccccagcccatcagcaatacatctagagccaacctgaataagctgctgaccgattacaccgaaatgaagaaggcgatcctgcatgtgtactgggaagagttccagaaggaccctgtgggcctgatgagccgggtggcccagcctgccagcaagaagatcgatcagaacaagctgaaacctgagatggacgagaagggcaacctgaccaccgccggctttgcctgctctcagtgtggccagcccctgttcgtgtacaagctggagcaggtgtctgagaagggcaaggcttacaccaactacttcggacggtgcaatgtggccgagcacgaaaagctgatcctgctggcccagctgaagcccgagaaggatagcgacgaagccgtgacatatagcctgggaaagtttgggcagagggccctggatttctacagcattcatgtgaccaaggagtccacccaccccgtgaagcccctggcccagatcgccggaaacagatacgcctccggacctgtgggaaaggccctgagcgacgcatgtatgggcacaatcgcctccttcctgtctaagtaccaggacatcatcatcgaacaccagaaggtggtgaagggcaaccagaagagactggagagcctgcgggagctggccggcaaggaaaacctggaataccctagcgtgaccctgccacctcagcctcacaccaaggagggcgttgatgcctacaacgaagtgatcgcccgggtgcgaatgtgggtgaacctgaacctgtggcagaagctgaagctaagcagagatgatgccaagcctctgctgagactgaagggattcccttcctttcctctggtcgagagacaggccaacgaagtggactggtgggacatggtgtgtaacgtgaagaagctgatcaacgagaaaaaggaggatggcaaggtgttttggcagaatctggctggctacaagagacaggaagccctgagaccatacctgagcagcgaggaagatcggaagaagggaaagaaattcgctcggtaccagctgggcgacctgctgctgcacctggaaaagaagcacggcgaggactggggaaaggtgtacgacgaggcctgggagcggattgacaagaaagtggaaggcctgagcaagcacatcaagctggaagaggaacggagaagcgaggacgcccagagcaaggccgccctgaccgactggctgcgggctaaggccagcttcgtgatcgagggcctgaaggaggccgacaaggacgagttctgcagatgcgagctgaagctgcagaagtggtacggggacctgcggggaaagcccttcgccatcgaagccgagaacagcatcctggacatcagcggcttcagcaagcagtacaactgtgccttcatctggcagaaggacggcgtgaagaagctgaacctgtacctgatcatcaactacttcaagggcggcaagctgcggttcaagaagatcaaacctgaagccttcgaagccaacagattctacaccgtgatcaacaaaaagagcggcgagatcgtgcccatggaggtgaacttcaacttcgacgaccccaacctgatcatcctgcctctggcctttggcaagagacagggcagagaattcatctggaacgacctgctgtccctggaaaccggcagcctgaagctggccaacggaagagtgatcgagaagacactgtacaacagaagaacccggcaggatgagcctgccctgttcgtggccctgaccttcgagcggcgggaggtcctggactcctccaatatcaaaccaatgaacctgatcggcgtggcaagaggcgaaaacatccccgccgtgatcgccctgaccgaccccgagggctgcccactgagccggtttaaggatagcctgggaaacccaacccacatcctgagaatcggcgagagctataaggagaagcagcggaccatccaggccaagaaggaggtggagcagcggagagccggcggctacagccggaagtacgccagcaaagccaagaatctggcagacgatatggtgagaaacaccgctagagatctgctgtactacgccgtgacccaggatgccatgctgatcttcgccaacctgagccggggcttcggccggcagggcaagcggaccttcatggccgagagacagtacacacggatggaggactggctgaccgccaagctggcctacgagggcctgagcaagacctacctgtccaagacactggcccagtacacctccaagacatgcagcaactgtgggtttaccatcaccagcgccgactacgacagggtgctggagaagctgaagaagacagcaacaggctggatgaccacaattaacggcaaggagctgaaggtggagggccagattacctactacaacagatacaagagacagaacgtagtcaaggacctgtccgtcgagctggatagactgagcgaagaatctgtgaacaacgacatctcctcctggacaaagggcagaagcggagaagctctgagcctcctgaagaaaagattctcccatagacccgtgcaggagaagttcgtgtgcctgaactgcggcttcgagacacacgcagccgagcaagccgccctgaacatcgccagatcctggctgttcctgcggagccaggagtacaagaaataccagacaaacaagacaaccggcaacaccgataagagagccttcgtcgagacctggcagtccttttaccggaagaagcttaaggaggtgtggaaacctgccgtgcggtctggcggatctggcggaggctccacaagcatgacctacgacgacgtgcacgtgaacttcaccggcgaggagtgggccctgctgagccccagccagaagaggctgtacaaggacgtgatgctggagacctacaggaacctgaccgccatcggctacaactgggaggaccacaacagcgagcacttccagcacagcaggaggcacggcaggcacgagaggaggcacaccggcgagaagcccagcgtgtacacccagtgcggcaaggtgttcgcctaccacaccagccccaagaaaaagagaaaagtctaagctgccttctgcggggcttgccttctggccatgcccttcttctctcccttgcacctgtacctcttggtctttgaataaagcctgagtaggaaggctagcaaaaaaaaaaaaaaaaaaaaaaaaaaaaaaaaaaaaaaaaaaaaaaaaaaaaaaaaaaaaaaaaaaaaaaaaaaaaaaaa

SEQ ID NO: 7033 - RNA, 5797 nt, synthetic construct
  source 1..5797: mol_type = other RNA
aggaaataagagagaaaagaagagtaagaagaaatataagagccaccatggcccctaagaagaagcgtaaagtgagccggatggaacgcctcgtctacgaggtgcggcagaagtgcagaaacatcgaggacatctgcatctcctgcggatctctgaacgtgaccctggagcacccactgttcatcggcggcatgtgccagaactgtaaaaactgttttctggagtgtgcctatcaatacgacgatgacggctaccagagctactgcaccatctgttgcggcggaagagaggtgctgatgtgtggaaataacaactgctgccggtgcttctgcgtggaatgcgtggacctgctggtgggccccggcgccgcccaggccgctattaaggaagatccttggaactgctacatgtgcggccacaagggcacatacggcctgctgagacggagagaggactggcctagcagactgcagatgttcttcgccaataaccacgaccaggagttcgacccccctaaggtgtaccctcccgtccccgccgagaagagaaagcccatccgggtcctgagcctgttcgatggcatcgccaccggtctgctggtgctgaaggacctgggcatccaggtggataggtacattgcctccgaggtgtgcgaggactccatcaccgtgggaatggtgcgtcatcagggcaagatcatgtacgtgggcgacgtgcggagcgtgacacagaagcatatccaggagtggggccctttcgacctggtgatcggcggcagcccttgcaatgacctgagcatcgtgaacccagcccggaagggcctgtacgagggaaccggcagactgttcttcgagttttacagactgctgcacgacgcccggcctaaggaaggcgacgaccggcccttcttttggctgttcgagaatgtggtggccatgggagtcagcgacaagcgggatattagccggttcctggagagcaaccccgtgatgatcgatgccaaggaagtgagcgccgcccaccgggccagatacttctggggcaatctgcctggcatgaacagacccctggccagcaccgtgaacgacaagctggagctgcaggagtgcctggagcacggccggatcgccaagttcagcaaggtgagaaccatcaccacccgaagcaacagcatcaaacaaggcaaggaccagcactttcctgtgttcatgaacgagaaggaggacatcctgtggtgtaccgagatggagagagtgttcgggttcccagtccactacacagatgtcagcaacatgtctagactggccagacagagactgctgggaagaagctggtccgtccctgtgatcagacacctgttcgcccctctgaaggagtacttcgcctgcgtgagcagcggcaacagcaacgccaacagccggggccccagcttctctagcggcctggtgccactgtccctgagagggagccacatgggccccatggagatctacaaaaccgtgagcgcctggaagcggcagcctgtgcgcgtgctgagcctgtttcggaatatcgataaagtcctgaaaagcctgggattcctggagagcggctctggctccggcggtggcaccctgaagtacgtggaggatgtgacaaacgtggtcagacgggatgtggagaagtggggccccttcgatctggtgtacggcagcacccaacccctgggcagctcttgtgaccggtgccctggctggtacatgtttcagttccaccggatcctgcagtacgccctgccgagacaggagtcccagcggccattcttttggattttcatggacaacttgctgctgaccgaggatgaccaggaaactaccactcggttcctgcagaccgaagccgtgaccctgcaggacgtgagaggccgggactaccagaacgccatgcgggtgtggtccaacatccctggactgaaaagcaagcacgcacctctgacccctaaagaagaggagtacctgcaggcccaggtgcggagcagaagcaagctggacgcccctaaggtggatctgctggtgaagaattgcctcctgcccctgagagagtacttcaagtatttcagccagaatagtctgcccctgggcggcccaagcagcggcgcccctcctcccagcggcggcagcccagccggctccccaacctctaccgaggagggcacctctgagtccgccacccccgagagcggccctggcacctccaccgagcccagcgagggcagcgcacccggcagccctgccggcagccccacctccacagaggagggaaccagcaccgagcccagcgaaggcagcgccccaggcaccagcaccgagcctagtgagggcggctctggcggcggcagcgcccaggagattaaacggatcaacaagatcagaagaagacttgtgaaagacagcaacaccaagaaggccggcaagacaggccccatgaaaaccctgctggttagagtgatgacacccgatctgagagagcggctggaaaacctgagaaagaagcctgaaaatatcccccagcccatcagcaatacatctagagccaacctgaataagctgctgaccgattacaccgaaatgaagaaggcgatcctgcatgtgtactgggaagagttccagaaggaccctgtgggcctgatgagccgggtggcccagcctgccagcaagaagatcgatcagaacaagctgaaacctgagatggacgagaagggcaacctgaccaccgccggctttgcctgctctcagtgtggccagcccctgttcgtgtacaagctggagcaggtgtctgagaagggcaaggcttacaccaactacttcggacggtgcaatgtggccgagcacgaaaagctgatcctgctggcccagctgaagcccgagaaggatagcgacgaagccgtgacatatagcctgggaaagtttgggcagagggccctggatttctacagcattcatgtgaccaaggagtccacccaccccgtgaagcccctggcccagatcgccggaaacagatacgcctccggacctgtgggaaaggccctgagcgacgcatgtatgggcacaatcgcctccttcctgtctaagtaccaggacatcatcatcgaacaccagaaggtggtgaagggcaaccagaagagactggagagcctgcgggagctggccggcaaggaaaacctggaataccctagcgtgaccctgccacctcagcctcacaccaaggagggcgttgatgcctacaacgaagtgatcgcccgggtgcgaatgtgggtgaacctgaacctgtggcagaagctgaagctaagcagagatgatgccaagcctctgctgagactgaagggattcccttcctttcctctggtcgagagacaggccaacgaagtggactggtgggacatggtgtgtaacgtgaagaagctgatcaacgagaaaaaggaggatggcaaggtgttttggcagaatctggctggctacaagagacaggaagccctgagaccatacctgagcagcgaggaagatcggaagaagggaaagaaattcgctcggtaccagctgggcgacctgctgctgcacctggaaaagaagcacggcgaggactggggaaaggtgtacgacgaggcctgggagcggattgacaagaaagtggaaggcctgagcaagcacatcaagctggaagaggaacggagaagcgaggacgcccagagcaaggccgccctgaccgactggctgcgggctaaggccagcttcgtgatcgagggcctgaaggaggccgacaaggacgagttctgcagatgcgagctgaagctgcagaagtggtacggggacctgcggggaaagcccttcgccatcgaagccgagaacagcatcctggacatcagcggcttcagcaagcagtacaactgtgccttcatctggcagaaggacggcgtgaagaagctgaacctgtacctgatcatcaactacttcaagggcggcaagctgcggttcaagaagatcaaacctgaagccttcgaagccaacagattctacaccgtgatcaacaaaaagagcggcgagatcgtgcccatggaggtgaacttcaacttcgacgaccccaacctgatcatcctgcctctggcctttggcaagagacagggcagagaattcatctggaacgacctgctgtccctggaaaccggcagcctgaagctggccaacggaagagtgatcgagaagacactgtacaacagaagaacccggcaggatgagcctgccctgttcgtggccctgaccttcgagcggcgggaggtcctggactcctccaatatcaaaccaatgaacctgatcggcgtggcaagaggcgaaaacatccccgccgtgatcgccctgaccgaccccgagggctgcccactgagccggtttaaggatagcctgggaaacccaacccacatcctgagaatcggcgagagctataaggagaagcagcggaccatccaggccaagaaggaggtggagcagcggagagccggcggctacagccggaagtacgccagcaaagccaagaatctggcagacgatatggtgagaaacaccgctagagatctgctgtactacgccgtgacccaggatgccatgctgatcttcgccaacctgagccggggcttcggccggcagggcaagcggaccttcatggccgagagacagtacacacggatggaggactggctgaccgccaagctggcctacgagggcctgagcaagacctacctgtccaagacactggcccagtacacctccaagacatgcagcaactgtgggtttaccatcaccagcgccgactacgacagggtgctggagaagctgaagaagacagcaacaggctggatgaccacaattaacggcaaggagctgaaggtggagggccagattacctactacaacagatacaagagacagaacgtagtcaaggacctgtccgtcgagctggatagactgagcgaagaatctgtgaacaacgacatctcctcctggacaaagggcagaagcggagaagctctgagcctcctgaagaaaagattctcccatagacccgtgcaggagaagttcgtgtgcctgaactgcggcttcgagacacacgcagccgagcaagccgccctgaacatcgccagatcctggctgttcctgcggagccaggagtacaagaaataccagacaaacaagacaaccggcaacaccgataagagagccttcgtcgagacctggcagtccttttaccggaagaagcttaaggaggtgtggaaacctgccgtgcggtctggcggatctggcggaggctccacaagcctgcaggagcccctggagttcatggacgtggccatcgagttcagcctggaggagtggcactgcctggacaccgcccagaggaacctgtacagggacgtgatgctggagaactacaggaacctggtgttcctgggcatcgtggtgagcaagcccgacctgatcacctggctggagcagggcaagaagcccctgaccgtgaagaggaggggcatgatcgccgccccccccggcatgagcagccacaccagccccaagaaaaagagaaaagtctaagctgccttctgcggggcttgccttctggccatgcccttcttctctcccttgcacctgtacctcttggtctttgaataaagcctgagtaggaaggctagcaaaaaaaaaaaaaaaaaaaaaaaaaaaaaaaaaaaaaaaaaaaaaaaaaaaaaaaaaaaaaaaaaaaaaaaaaaaaaaaa

SEQ ID NO: 7034 - RNA, 5797 nt, synthetic construct
  source 1..5797: mol_type = other RNA
aggaaataagagagaaaagaagagtaagaagaaatataagagccaccatggcccctaagaagaagcgtaaagtgagccggatggaacgcctcgtctacgaggtgcggcagaagtgcagaaacatcgaggacatctgcatctcctgcggatctctgaacgtgaccctggagcacccactgttcatcggcggcatgtgccagaactgtaaaaactgttttctggagtgtgcctatcaatacgacgatgacggctaccagagctactgcaccatctgttgcggcggaagagaggtgctgatgtgtggaaataacaactgctgccggtgcttctgcgtggaatgcgtggacctgctggtgggccccggcgccgcccaggccgctattaaggaagatccttggaactgctacatgtgcggccacaagggcacatacggcctgctgagacggagagaggactggcctagcagactgcagatgttcttcgccaataaccacgaccaggagttcgacccccctaaggtgtaccctcccgtccccgccgagaagagaaagcccatccgggtcctgagcctgttcgatggcatcgccaccggtctgctggtgctgaaggacctgggcatccaggtggataggtacattgcctccgaggtgtgcgaggactccatcaccgtgggaatggtgcgtcatcagggcaagatcatgtacgtgggcgacgtgcggagcgtgacacagaagcatatccaggagtggggccctttcgacctggtgatcggcggcagcccttgcaatgacctgagcatcgtgaacccagcccggaagggcctgtacgagggaaccggcagactgttcttcgagttttacagactgctgcacgacgcccggcctaaggaaggcgacgaccggcccttcttttggctgttcgagaatgtggtggccatgggagtcagcgacaagcgggatattagccggttcctggagagcaaccccgtgatgatcgatgccaaggaagtgagcgccgcccaccgggccagatacttctggggcaatctgcctggcatgaacagacccctggccagcaccgtgaacgacaagctggagctgcaggagtgcctggagcacggccggatcgccaagttcagcaaggtgagaaccatcaccacccgaagcaacagcatcaaacaaggcaaggaccagcactttcctgtgttcatgaacgagaaggaggacatcctgtggtgtaccgagatggagagagtgttcgggttcccagtccactacacagatgtcagcaacatgtctagactggccagacagagactgctgggaagaagctggtccgtccctgtgatcagacacctgttcgcccctctgaaggagtacttcgcctgcgtgagcagcggcaacagcaacgccaacagccggggccccagcttctctagcggcctggtgccactgtccctgagagggagccacatgggccccatggagatctacaaaaccgtgagcgcctggaagcggcagcctgtgcgcgtgctgagcctgtttcggaatatcgataaagtcctgaaaagcctgggattcctggagagcggctctggctccggcggtggcaccctgaagtacgtggaggatgtgacaaacgtggtcagacgggatgtggagaagtggggccccttcgatctggtgtacggcagcacccaacccctgggcagctcttgtgaccggtgccctggctggtacatgtttcagttccaccggatcctgcagtacgccctgccgagacaggagtcccagcggccattcttttggattttcatggacaacttgctgctgaccgaggatgaccaggaaactaccactcggttcctgcagaccgaagccgtgaccctgcaggacgtgagaggccgggactaccagaacgccatgcgggtgtggtccaacatccctggactgaaaagcaagcacgcacctctgacccctaaagaagaggagtacctgcaggcccaggtgcggagcagaagcaagctggacgcccctaaggtggatctgctggtgaagaattgcctcctgcccctgagagagtacttcaagtatttcagccagaatagtctgcccctgggcggcccaagcagcggcgcccctcctcccagcggcggcagcccagccggctccccaacctctaccgaggagggcacctctgagtccgccacccccgagagcggccctggcacctccaccgagcccagcgagggcagcgcacccggcagccctgccggcagccccacctccacagaggagggaaccagcaccgagcccagcgaaggcagcgccccaggcaccagcaccgagcctagtgagggcggctctggcggcggcagcgcccaggagattaaacggatcaacaagatcagaagaagacttgtgaaagacagcaacaccaagaaggccggcaagacaggccccatgaaaaccctgctggttagagtgatgacacccgatctgagagagcggctggaaaacctgagaaagaagcctgaaaatatcccccagcccatcagcaatacatctagagccaacctgaataagctgctgaccgattacaccgaaatgaagaaggcgatcctgcatgtgtactgggaagagttccagaaggaccctgtgggcctgatgagccgggtggcccagcctgccagcaagaagatcgatcagaacaagctgaaacctgagatggacgagaagggcaacctgaccaccgccggctttgcctgctctcagtgtggccagcccctgttcgtgtacaagctggagcaggtgtctgagaagggcaaggcttacaccaactacttcggacggtgcaatgtggccgagcacgaaaagctgatcctgctggcccagctgaagcccgagaaggatagcgacgaagccgtgacatatagcctgggaaagtttgggcagagggccctggatttctacagcattcatgtgaccaaggagtccacccaccccgtgaagcccctggcccagatcgccggaaacagatacgcctccggacctgtgggaaaggccctgagcgacgcatgtatgggcacaatcgcctccttcctgtctaagtaccaggacatcatcatcgaacaccagaaggtggtgaagggcaaccagaagagactggagagcctgcgggagctggccggcaaggaaaacctggaataccctagcgtgaccctgccacctcagcctcacaccaaggagggcgttgatgcctacaacgaagtgatcgcccgggtgcgaatgtgggtgaacctgaacctgtggcagaagctgaagctaagcagagatgatgccaagcctctgctgagactgaagggattcccttcctttcctctggtcgagagacaggccaacgaagtggactggtgggacatggtgtgtaacgtgaagaagctgatcaacgagaaaaaggaggatggcaaggtgttttggcagaatctggctggctacaagagacaggaagccctgagaccatacctgagcagcgaggaagatcggaagaagggaaagaaattcgctcggtaccagctgggcgacctgctgctgcacctggaaaagaagcacggcgaggactggggaaaggtgtacgacgaggcctgggagcggattgacaagaaagtggaaggcctgagcaagcacatcaagctggaagaggaacggagaagcgaggacgcccagagcaaggccgccctgaccgactggctgcgggctaaggccagcttcgtgatcgagggcctgaaggaggccgacaaggacgagttctgcagatgcgagctgaagctgcagaagtggtacggggacctgcggggaaagcccttcgccatcgaagccgagaacagcatcctggacatcagcggcttcagcaagcagtacaactgtgccttcatctggcagaaggacggcgtgaagaagctgaacctgtacctgatcatcaactacttcaagggcggcaagctgcggttcaagaagatcaaacctgaagccttcgaagccaacagattctacaccgtgatcaacaaaaagagcggcgagatcgtgcccatggaggtgaacttcaacttcgacgaccccaacctgatcatcctgcctctggcctttggcaagagacagggcagagaattcatctggaacgacctgctgtccctggaaaccggcagcctgaagctggccaacggaagagtgatcgagaagacactgtacaacagaagaacccggcaggatgagcctgccctgttcgtggccctgaccttcgagcggcgggaggtcctggactcctccaatatcaaaccaatgaacctgatcggcgtggcaagaggcgaaaacatccccgccgtgatcgccctgaccgaccccgagggctgcccactgagccggtttaaggatagcctgggaaacccaacccacatcctgagaatcggcgagagctataaggagaagcagcggaccatccaggccaagaaggaggtggagcagcggagagccggcggctacagccggaagtacgccagcaaagccaagaatctggcagacgatatggtgagaaacaccgctagagatctgctgtactacgccgtgacccaggatgccatgctgatcttcgccaacctgagccggggcttcggccggcagggcaagcggaccttcatggccgagagacagtacacacggatggaggactggctgaccgccaagctggcctacgagggcctgagcaagacctacctgtccaagacactggcccagtacacctccaagacatgcagcaactgtgggtttaccatcaccagcgccgactacgacagggtgctggagaagctgaagaagacagcaacaggctggatgaccacaattaacggcaaggagctgaaggtggagggccagattacctactacaacagatacaagagacagaacgtagtcaaggacctgtccgtcgagctggatagactgagcgaagaatctgtgaacaacgacatctcctcctggacaaagggcagaagcggagaagctctgagcctcctgaagaaaagattctcccatagacccgtgcaggagaagttcgtgtgcctgaactgcggcttcgagacacacgcagccgagcaagccgccctgaacatcgccagatcctggctgttcctgcggagccaggagtacaagaaataccagacaaacaagacaaccggcaacaccgataagagagccttcgtcgagacctggcagtccttttaccggaagaagcttaaggaggtgtggaaacctgccgtgcggtctggcggatctggcggaggctccacaagccagatgcccatcaagttcgaggacatcgccgtgagcttcagccaggaggagtgggagtacctgaacgaggagcagaaggagctgtacagggaggtgatgaaggagaactaccagaccctgatcagcctgggcaccggcagcccccccgtgacccccgacatcatcagccacatcgagaggggcgaggagccctacatcagggaggagcccggcagcgaggagagggagcccggcaggagcagcaccagccccaagaaaaagagaaaagtctaagctgccttctgcggggcttgccttctggccatgcccttcttctctcccttgcacctgtacctcttggtctttgaataaagcctgagtaggaaggctagcaaaaaaaaaaaaaaaaaaaaaaaaaaaaaaaaaaaaaaaaaaaaaaaaaaaaaaaaaaaaaaaaaaaaaaaaaaaaaaaa

SEQ ID NO: 7035 - RNA, 5797 nt, synthetic construct
  source 1..5797: mol_type = other RNA
aggaaataagagagaaaagaagagtaagaagaaatataagagccaccatggcccctaagaagaagcgtaaagtgagccggatggaacgcctcgtctacgaggtgcggcagaagtgcagaaacatcgaggacatctgcatctcctgcggatctctgaacgtgaccctggagcacccactgttcatcggcggcatgtgccagaactgtaaaaactgttttctggagtgtgcctatcaatacgacgatgacggctaccagagctactgcaccatctgttgcggcggaagagaggtgctgatgtgtggaaataacaactgctgccggtgcttctgcgtggaatgcgtggacctgctggtgggccccggcgccgcccaggccgctattaaggaagatccttggaactgctacatgtgcggccacaagggcacatacggcctgctgagacggagagaggactggcctagcagactgcagatgttcttcgccaataaccacgaccaggagttcgacccccctaaggtgtaccctcccgtccccgccgagaagagaaagcccatccgggtcctgagcctgttcgatggcatcgccaccggtctgctggtgctgaaggacctgggcatccaggtggataggtacattgcctccgaggtgtgcgaggactccatcaccgtgggaatggtgcgtcatcagggcaagatcatgtacgtgggcgacgtgcggagcgtgacacagaagcatatccaggagtggggccctttcgacctggtgatcggcggcagcccttgcaatgacctgagcatcgtgaacccagcccggaagggcctgtacgagggaaccggcagactgttcttcgagttttacagactgctgcacgacgcccggcctaaggaaggcgacgaccggcccttcttttggctgttcgagaatgtggtggccatgggagtcagcgacaagcgggatattagccggttcctggagagcaaccccgtgatgatcgatgccaaggaagtgagcgccgcccaccgggccagatacttctggggcaatctgcctggcatgaacagacccctggccagcaccgtgaacgacaagctggagctgcaggagtgcctggagcacggccggatcgccaagttcagcaaggtgagaaccatcaccacccgaagcaacagcatcaaacaaggcaaggaccagcactttcctgtgttcatgaacgagaaggaggacatcctgtggtgtaccgagatggagagagtgttcgggttcccagtccactacacagatgtcagcaacatgtctagactggccagacagagactgctgggaagaagctggtccgtccctgtgatcagacacctgttcgcccctctgaaggagtacttcgcctgcgtgagcagcggcaacagcaacgccaacagccggggccccagcttctctagcggcctggtgccactgtccctgagagggagccacatgggccccatggagatctacaaaaccgtgagcgcctggaagcggcagcctgtgcgcgtgctgagcctgtttcggaatatcgataaagtcctgaaaagcctgggattcctggagagcggctctggctccggcggtggcaccctgaagtacgtggaggatgtgacaaacgtggtcagacgggatgtggagaagtggggccccttcgatctggtgtacggcagcacccaacccctgggcagctcttgtgaccggtgccctggctggtacatgtttcagttccaccggatcctgcagtacgccctgccgagacaggagtcccagcggccattcttttggattttcatggacaacttgctgctgaccgaggatgaccaggaaactaccactcggttcctgcagaccgaagccgtgaccctgcaggacgtgagaggccgggactaccagaacgccatgcgggtgtggtccaacatccctggactgaaaagcaagcacgcacctctgacccctaaagaagaggagtacctgcaggcccaggtgcggagcagaagcaagctggacgcccctaaggtggatctgctggtgaagaattgcctcctgcccctgagagagtacttcaagtatttcagccagaatagtctgcccctgggcggcccaagcagcggcgcccctcctcccagcggcggcagcccagccggctccccaacctctaccgaggagggcacctctgagtccgccacccccgagagcggccctggcacctccaccgagcccagcgagggcagcgcacccggcagccctgccggcagccccacctccacagaggagggaaccagcaccgagcccagcgaaggcagcgccccaggcaccagcaccgagcctagtgagggcggctctggcggcggcagcgcccaggagattaaacggatcaacaagatcagaagaagacttgtgaaagacagcaacaccaagaaggccggcaagacaggccccatgaaaaccctgctggttagagtgatgacacccgatctgagagagcggctggaaaacctgagaaagaagcctgaaaatatcccccagcccatcagcaatacatctagagccaacctgaataagctgctgaccgattacaccgaaatgaagaaggcgatcctgcatgtgtactgggaagagttccagaaggaccctgtgggcctgatgagccgggtggcccagcctgccagcaagaagatcgatcagaacaagctgaaacctgagatggacgagaagggcaacctgaccaccgccggctttgcctgctctcagtgtggccagcccctgttcgtgtacaagctggagcaggtgtctgagaagggcaaggcttacaccaactacttcggacggtgcaatgtggccgagcacgaaaagctgatcctgctggcccagctgaagcccgagaaggatagcgacgaagccgtgacatatagcctgggaaagtttgggcagagggccctggatttctacagcattcatgtgaccaaggagtccacccaccccgtgaagcccctggcccagatcgccggaaacagatacgcctccggacctgtgggaaaggccctgagcgacgcatgtatgggcacaatcgcctccttcctgtctaagtaccaggacatcatcatcgaacaccagaaggtggtgaagggcaaccagaagagactggagagcctgcgggagctggccggcaaggaaaacctggaataccctagcgtgaccctgccacctcagcctcacaccaaggagggcgttgatgcctacaacgaagtgatcgcccgggtgcgaatgtgggtgaacctgaacctgtggcagaagctgaagctaagcagagatgatgccaagcctctgctgagactgaagggattcccttcctttcctctggtcgagagacaggccaacgaagtggactggtgggacatggtgtgtaacgtgaagaagctgatcaacgagaaaaaggaggatggcaaggtgttttggcagaatctggctggctacaagagacaggaagccctgagaccatacctgagcagcgaggaagatcggaagaagggaaagaaattcgctcggtaccagctgggcgacctgctgctgcacctggaaaagaagcacggcgaggactggggaaaggtgtacgacgaggcctgggagcggattgacaagaaagtggaaggcctgagcaagcacatcaagctggaagaggaacggagaagcgaggacgcccagagcaaggccgccctgaccgactggctgcgggctaaggccagcttcgtgatcgagggcctgaaggaggccgacaaggacgagttctgcagatgcgagctgaagctgcagaagtggtacggggacctgcggggaaagcccttcgccatcgaagccgagaacagcatcctggacatcagcggcttcagcaagcagtacaactgtgccttcatctggcagaaggacggcgtgaagaagctgaacctgtacctgatcatcaactacttcaagggcggcaagctgcggttcaagaagatcaaacctgaagccttcgaagccaacagattctacaccgtgatcaacaaaaagagcggcgagatcgtgcccatggaggtgaacttcaacttcgacgaccccaacctgatcatcctgcctctggcctttggcaagagacagggcagagaattcatctggaacgacctgctgtccctggaaaccggcagcctgaagctggccaacggaagagtgatcgagaagacactgtacaacagaagaacccggcaggatgagcctgccctgttcgtggccctgaccttcgagcggcgggaggtcctggactcctccaatatcaaaccaatgaacctgatcggcgtggcaagaggcgaaaacatccccgccgtgatcgccctgaccgaccccgagggctgcccactgagccggtttaaggatagcctgggaaacccaacccacatcctgagaatcggcgagagctataaggagaagcagcggaccatccaggccaagaaggaggtggagcagcggagagccggcggctacagccggaagtacgccagcaaagccaagaatctggcagacgatatggtgagaaacaccgctagagatctgctgtactacgccgtgacccaggatgccatgctgatcttcgccaacctgagccggggcttcggccggcagggcaagcggaccttcatggccgagagacagtacacacggatggaggactggctgaccgccaagctggcctacgagggcctgagcaagacctacctgtccaagacactggcccagtacacctccaagacatgcagcaactgtgggtttaccatcaccagcgccgactacgacagggtgctggagaagctgaagaagacagcaacaggctggatgaccacaattaacggcaaggagctgaaggtggagggccagattacctactacaacagatacaagagacagaacgtagtcaaggacctgtccgtcgagctggatagactgagcgaagaatctgtgaacaacgacatctcctcctggacaaagggcagaagcggagaagctctgagcctcctgaagaaaagattctcccatagacccgtgcaggagaagttcgtgtgcctgaactgcggcttcgagacacacgcagccgagcaagccgccctgaacatcgccagatcctggctgttcctgcggagccaggagtacaagaaataccagacaaacaagacaaccggcaacaccgataagagagccttcgtcgagacctggcagtccttttaccggaagaagcttaaggaggtgtggaaacctgccgtgcggtctggcggatctggcggaggctccacaagcgtgtgcggcagcgtgaccttcaaggacgtggccgtggacttcagccaggaggagtgggcctgcctggacgccacccagaaggtgctgtacagggacatgatgctggagacctacagcaacctggtggccgtggtgggcaggtgcatcagcaagcccgacctgatcgtgctgctggagcaggagaaggagccctggatggccgtgaaggaggagaccgacaggcccagccccgacctggagagcaccagccccaagaaaaagagaaaagtctaagctgccttctgcggggcttgccttctggccatgcccttcttctctcccttgcacctgtacctcttggtctttgaataaagcctgagtaggaaggctagcaaaaaaaaaaaaaaaaaaaaaaaaaaaaaaaaaaaaaaaaaaaaaaaaaaaaaaaaaaaaaaaaaaaaaaaaaaaaaaaa

SEQ ID NO: 7036 - RNA, 5797 nt, synthetic construct
  source 1..5797: mol_type = other RNA
aggaaataagagagaaaagaagagtaagaagaaatataagagccaccatggcccctaagaagaagcgtaaagtgagccggatggaacgcctcgtctacgaggtgcggcagaagtgcagaaacatcgaggacatctgcatctcctgcggatctctgaacgtgaccctggagcacccactgttcatcggcggcatgtgccagaactgtaaaaactgttttctggagtgtgcctatcaatacgacgatgacggctaccagagctactgcaccatctgttgcggcggaagagaggtgctgatgtgtggaaataacaactgctgccggtgcttctgcgtggaatgcgtggacctgctggtgggccccggcgccgcccaggccgctattaaggaagatccttggaactgctacatgtgcggccacaagggcacatacggcctgctgagacggagagaggactggcctagcagactgcagatgttcttcgccaataaccacgaccaggagttcgacccccctaaggtgtaccctcccgtccccgccgagaagagaaagcccatccgggtcctgagcctgttcgatggcatcgccaccggtctgctggtgctgaaggacctgggcatccaggtggataggtacattgcctccgaggtgtgcgaggactccatcaccgtgggaatggtgcgtcatcagggcaagatcatgtacgtgggcgacgtgcggagcgtgacacagaagcatatccaggagtggggccctttcgacctggtgatcggcggcagcccttgcaatgacctgagcatcgtgaacccagcccggaagggcctgtacgagggaaccggcagactgttcttcgagttttacagactgctgcacgacgcccggcctaaggaaggcgacgaccggcccttcttttggctgttcgagaatgtggtggccatgggagtcagcgacaagcgggatattagccggttcctggagagcaaccccgtgatgatcgatgccaaggaagtgagcgccgcccaccgggccagatacttctggggcaatctgcctggcatgaacagacccctggccagcaccgtgaacgacaagctggagctgcaggagtgcctggagcacggccggatcgccaagttcagcaaggtgagaaccatcaccacccgaagcaacagcatcaaacaaggcaaggaccagcactttcctgtgttcatgaacgagaaggaggacatcctgtggtgtaccgagatggagagagtgttcgggttcccagtccactacacagatgtcagcaacatgtctagactggccagacagagactgctgggaagaagctggtccgtccctgtgatcagacacctgttcgcccctctgaaggagtacttcgcctgcgtgagcagcggcaacagcaacgccaacagccggggccccagcttctctagcggcctggtgccactgtccctgagagggagccacatgggccccatggagatctacaaaaccgtgagcgcctggaagcggcagcctgtgcgcgtgctgagcctgtttcggaatatcgataaagtcctgaaaagcctgggattcctggagagcggctctggctccggcggtggcaccctgaagtacgtggaggatgtgacaaacgtggtcagacgggatgtggagaagtggggccccttcgatctggtgtacggcagcacccaacccctgggcagctcttgtgaccggtgccctggctggtacatgtttcagttccaccggatcctgcagtacgccctgccgagacaggagtcccagcggccattcttttggattttcatggacaacttgctgctgaccgaggatgaccaggaaactaccactcggttcctgcagaccgaagccgtgaccctgcaggacgtgagaggccgggactaccagaacgccatgcgggtgtggtccaacatccctggactgaaaagcaagcacgcacctctgacccctaaagaagaggagtacctgcaggcccaggtgcggagcagaagcaagctggacgcccctaaggtggatctgctggtgaagaattgcctcctgcccctgagagagtacttcaagtatttcagccagaatagtctgcccctgggcggcccaagcagcggcgcccctcctcccagcggcggcagcccagccggctccccaacctctaccgaggagggcacctctgagtccgccacccccgagagcggccctggcacctccaccgagcccagcgagggcagcgcacccggcagccctgccggcagccccacctccacagaggagggaaccagcaccgagcccagcgaaggcagcgccccaggcaccagcaccgagcctagtgagggcggctctggcggcggcagcgcccaggagattaaacggatcaacaagatcagaagaagacttgtgaaagacagcaacaccaagaaggccggcaagacaggccccatgaaaaccctgctggttagagtgatgacacccgatctgagagagcggctggaaaacctgagaaagaagcctgaaaatatcccccagcccatcagcaatacatctagagccaacctgaataagctgctgaccgattacaccgaaatgaagaaggcgatcctgcatgtgtactgggaagagttccagaaggaccctgtgggcctgatgagccgggtggcccagcctgccagcaagaagatcgatcagaacaagctgaaacctgagatggacgagaagggcaacctgaccaccgccggctttgcctgctctcagtgtggccagcccctgttcgtgtacaagctggagcaggtgtctgagaagggcaaggcttacaccaactacttcggacggtgcaatgtggccgagcacgaaaagctgatcctgctggcccagctgaagcccgagaaggatagcgacgaagccgtgacatatagcctgggaaagtttgggcagagggccctggatttctacagcattcatgtgaccaaggagtccacccaccccgtgaagcccctggcccagatcgccggaaacagatacgcctccggacctgtgggaaaggccctgagcgacgcatgtatgggcacaatcgcctccttcctgtctaagtaccaggacatcatcatcgaacaccagaaggtggtgaagggcaaccagaagagactggagagcctgcgggagctggccggcaaggaaaacctggaataccctagcgtgaccctgccacctcagcctcacaccaaggagggcgttgatgcctacaacgaagtgatcgcccgggtgcgaatgtgggtgaacctgaacctgtggcagaagctgaagctaagcagagatgatgccaagcctctgctgagactgaagggattcccttcctttcctctggtcgagagacaggccaacgaagtggactggtgggacatggtgtgtaacgtgaagaagctgatcaacgagaaaaaggaggatggcaaggtgttttggcagaatctggctggctacaagagacaggaagccctgagaccatacctgagcagcgaggaagatcggaagaagggaaagaaattcgctcggtaccagctgggcgacctgctgctgcacctggaaaagaagcacggcgaggactggggaaaggtgtacgacgaggcctgggagcggattgacaagaaagtggaaggcctgagcaagcacatcaagctggaagaggaacggagaagcgaggacgcccagagcaaggccgccctgaccgactggctgcgggctaaggccagcttcgtgatcgagggcctgaaggaggccgacaaggacgagttctgcagatgcgagctgaagctgcagaagtggtacggggacctgcggggaaagcccttcgccatcgaagccgagaacagcatcctggacatcagcggcttcagcaagcagtacaactgtgccttcatctggcagaaggacggcgtgaagaagctgaacctgtacctgatcatcaactacttcaagggcggcaagctgcggttcaagaagatcaaacctgaagccttcgaagccaacagattctacaccgtgatcaacaaaaagagcggcgagatcgtgcccatggaggtgaacttcaacttcgacgaccccaacctgatcatcctgcctctggcctttggcaagagacagggcagagaattcatctggaacgacctgctgtccctggaaaccggcagcctgaagctggccaacggaagagtgatcgagaagacactgtacaacagaagaacccggcaggatgagcctgccctgttcgtggccctgaccttcgagcggcgggaggtcctggactcctccaatatcaaaccaatgaacctgatcggcgtggcaagaggcgaaaacatccccgccgtgatcgccctgaccgaccccgagggctgcccactgagccggtttaaggatagcctgggaaacccaacccacatcctgagaatcggcgagagctataaggagaagcagcggaccatccaggccaagaaggaggtggagcagcggagagccggcggctacagccggaagtacgccagcaaagccaagaatctggcagacgatatggtgagaaacaccgctagagatctgctgtactacgccgtgacccaggatgccatgctgatcttcgccaacctgagccggggcttcggccggcagggcaagcggaccttcatggccgagagacagtacacacggatggaggactggctgaccgccaagctggcctacgagggcctgagcaagacctacctgtccaagacactggcccagtacacctccaagacatgcagcaactgtgggtttaccatcaccagcgccgactacgacagggtgctggagaagctgaagaagacagcaacaggctggatgaccacaattaacggcaaggagctgaaggtggagggccagattacctactacaacagatacaagagacagaacgtagtcaaggacctgtccgtcgagctggatagactgagcgaagaatctgtgaacaacgacatctcctcctggacaaagggcagaagcggagaagctctgagcctcctgaagaaaagattctcccatagacccgtgcaggagaagttcgtgtgcctgaactgcggcttcgagacacacgcagccgagcaagccgccctgaacatcgccagatcctggctgttcctgcggagccaggagtacaagaaataccagacaaacaagacaaccggcaacaccgataagagagccttcgtcgagacctggcagtccttttaccggaagaagcttaaggaggtgtggaaacctgccgtgcggtctggcggatctggcggaggctccacaagcttccaggagagcctgaccttcaaggacgtggccgtggacttcacctacgaggagtggcagcagctgaaccccgaccagaggtacctgtacagggacgtgatgctggagaactacaagaacctggtgttcctgggccaccagatcagcaagcccgacgtgatcagccagctggagcagggcaaggagccctggcccatcgagagggagatcttcacctacagctgcagggactgggagaccaagaccagccccaagaaaaagagaaaagtctaagctgccttctgcggggcttgccttctggccatgcccttcttctctcccttgcacctgtacctcttggtctttgaataaagcctgagtaggaaggctagcaaaaaaaaaaaaaaaaaaaaaaaaaaaaaaaaaaaaaaaaaaaaaaaaaaaaaaaaaaaaaaaaaaaaaaaaaaaaaaaa

SEQ ID NO: 7037 - RNA, 5797 nt, synthetic construct
  source 1..5797: mol_type = other RNA
aggaaataagagagaaaagaagagtaagaagaaatataagagccaccatggcccctaagaagaagcgtaaagtgagccggatggaacgcctcgtctacgaggtgcggcagaagtgcagaaacatcgaggacatctgcatctcctgcggatctctgaacgtgaccctggagcacccactgttcatcggcggcatgtgccagaactgtaaaaactgttttctggagtgtgcctatcaatacgacgatgacggctaccagagctactgcaccatctgttgcggcggaagagaggtgctgatgtgtggaaataacaactgctgccggtgcttctgcgtggaatgcgtggacctgctggtgggccccggcgccgcccaggccgctattaaggaagatccttggaactgctacatgtgcggccacaagggcacatacggcctgctgagacggagagaggactggcctagcagactgcagatgttcttcgccaataaccacgaccaggagttcgacccccctaaggtgtaccctcccgtccccgccgagaagagaaagcccatccgggtcctgagcctgttcgatggcatcgccaccggtctgctggtgctgaaggacctgggcatccaggtggataggtacattgcctccgaggtgtgcgaggactccatcaccgtgggaatggtgcgtcatcagggcaagatcatgtacgtgggcgacgtgcggagcgtgacacagaagcatatccaggagtggggccctttcgacctggtgatcggcggcagcccttgcaatgacctgagcatcgtgaacccagcccggaagggcctgtacgagggaaccggcagactgttcttcgagttttacagactgctgcacgacgcccggcctaaggaaggcgacgaccggcccttcttttggctgttcgagaatgtggtggccatgggagtcagcgacaagcgggatattagccggttcctggagagcaaccccgtgatgatcgatgccaaggaagtgagcgccgcccaccgggccagatacttctggggcaatctgcctggcatgaacagacccctggccagcaccgtgaacgacaagctggagctgcaggagtgcctggagcacggccggatcgccaagttcagcaaggtgagaaccatcaccacccgaagcaacagcatcaaacaaggcaaggaccagcactttcctgtgttcatgaacgagaaggaggacatcctgtggtgtaccgagatggagagagtgttcgggttcccagtccactacacagatgtcagcaacatgtctagactggccagacagagactgctgggaagaagctggtccgtccctgtgatcagacacctgttcgcccctctgaaggagtacttcgcctgcgtgagcagcggcaacagcaacgccaacagccggggccccagcttctctagcggcctggtgccactgtccctgagagggagccacatgggccccatggagatctacaaaaccgtgagcgcctggaagcggcagcctgtgcgcgtgctgagcctgtttcggaatatcgataaagtcctgaaaagcctgggattcctggagagcggctctggctccggcggtggcaccctgaagtacgtggaggatgtgacaaacgtggtcagacgggatgtggagaagtggggccccttcgatctggtgtacggcagcacccaacccctgggcagctcttgtgaccggtgccctggctggtacatgtttcagttccaccggatcctgcagtacgccctgccgagacaggagtcccagcggccattcttttggattttcatggacaacttgctgctgaccgaggatgaccaggaaactaccactcggttcctgcagaccgaagccgtgaccctgcaggacgtgagaggccgggactaccagaacgccatgcgggtgtggtccaacatccctggactgaaaagcaagcacgcacctctgacccctaaagaagaggagtacctgcaggcccaggtgcggagcagaagcaagctggacgcccctaaggtggatctgctggtgaagaattgcctcctgcccctgagagagtacttcaagtatttcagccagaatagtctgcccctgggcggcccaagcagcggcgcccctcctcccagcggcggcagcccagccggctccccaacctctaccgaggagggcacctctgagtccgccacccccgagagcggccctggcacctccaccgagcccagcgagggcagcgcacccggcagccctgccggcagccccacctccacagaggagggaaccagcaccgagcccagcgaaggcagcgccccaggcaccagcaccgagcctagtgagggcggctctggcggcggcagcgcccaggagattaaacggatcaacaagatcagaagaagacttgtgaaagacagcaacaccaagaaggccggcaagacaggccccatgaaaaccctgctggttagagtgatgacacccgatctgagagagcggctggaaaacctgagaaagaagcctgaaaatatcccccagcccatcagcaatacatctagagccaacctgaataagctgctgaccgattacaccgaaatgaagaaggcgatcctgcatgtgtactgggaagagttccagaaggaccctgtgggcctgatgagccgggtggcccagcctgccagcaagaagatcgatcagaacaagctgaaacctgagatggacgagaagggcaacctgaccaccgccggctttgcctgctctcagtgtggccagcccctgttcgtgtacaagctggagcaggtgtctgagaagggcaaggcttacaccaactacttcggacggtgcaatgtggccgagcacgaaaagctgatcctgctggcccagctgaagcccgagaaggatagcgacgaagccgtgacatatagcctgggaaagtttgggcagagggccctggatttctacagcattcatgtgaccaaggagtccacccaccccgtgaagcccctggcccagatcgccggaaacagatacgcctccggacctgtgggaaaggccctgagcgacgcatgtatgggcacaatcgcctccttcctgtctaagtaccaggacatcatcatcgaacaccagaaggtggtgaagggcaaccagaagagactggagagcctgcgggagctggccggcaaggaaaacctggaataccctagcgtgaccctgccacctcagcctcacaccaaggagggcgttgatgcctacaacgaagtgatcgcccgggtgcgaatgtgggtgaacctgaacctgtggcagaagctgaagctaagcagagatgatgccaagcctctgctgagactgaagggattcccttcctttcctctggtcgagagacaggccaacgaagtggactggtgggacatggtgtgtaacgtgaagaagctgatcaacgagaaaaaggaggatggcaaggtgttttggcagaatctggctggctacaagagacaggaagccctgagaccatacctgagcagcgaggaagatcggaagaagggaaagaaattcgctcggtaccagctgggcgacctgctgctgcacctggaaaagaagcacggcgaggactggggaaaggtgtacgacgaggcctgggagcggattgacaagaaagtggaaggcctgagcaagcacatcaagctggaagaggaacggagaagcgaggacgcccagagcaaggccgccctgaccgactggctgcgggctaaggccagcttcgtgatcgagggcctgaaggaggccgacaaggacgagttctgcagatgcgagctgaagctgcagaagtggtacggggacctgcggggaaagcccttcgccatcgaagccgagaacagcatcctggacatcagcggcttcagcaagcagtacaactgtgccttcatctggcagaaggacggcgtgaagaagctgaacctgtacctgatcatcaactacttcaagggcggcaagctgcggttcaagaagatcaaacctgaagccttcgaagccaacagattctacaccgtgatcaacaaaaagagcggcgagatcgtgcccatggaggtgaacttcaacttcgacgaccccaacctgatcatcctgcctctggcctttggcaagagacagggcagagaattcatctggaacgacctgctgtccctggaaaccggcagcctgaagctggccaacggaagagtgatcgagaagacactgtacaacagaagaacccggcaggatgagcctgccctgttcgtggccctgaccttcgagcggcgggaggtcctggactcctccaatatcaaaccaatgaacctgatcggcgtggcaagaggcgaaaacatccccgccgtgatcgccctgaccgaccccgagggctgcccactgagccggtttaaggatagcctgggaaacccaacccacatcctgagaatcggcgagagctataaggagaagcagcggaccatccaggccaagaaggaggtggagcagcggagagccggcggctacagccggaagtacgccagcaaagccaagaatctggcagacgatatggtgagaaacaccgctagagatctgctgtactacgccgtgacccaggatgccatgctgatcttcgccaacctgagccggggcttcggccggcagggcaagcggaccttcatggccgagagacagtacacacggatggaggactggctgaccgccaagctggcctacgagggcctgagcaagacctacctgtccaagacactggcccagtacacctccaagacatgcagcaactgtgggtttaccatcaccagcgccgactacgacagggtgctggagaagctgaagaagacagcaacaggctggatgaccacaattaacggcaaggagctgaaggtggagggccagattacctactacaacagatacaagagacagaacgtagtcaaggacctgtccgtcgagctggatagactgagcgaagaatctgtgaacaacgacatctcctcctggacaaagggcagaagcggagaagctctgagcctcctgaagaaaagattctcccatagacccgtgcaggagaagttcgtgtgcctgaactgcggcttcgagacacacgcagccgagcaagccgccctgaacatcgccagatcctggctgttcctgcggagccaggagtacaagaaataccagacaaacaagacaaccggcaacaccgataagagagccttcgtcgagacctggcagtccttttaccggaagaagcttaaggaggtgtggaaacctgccgtgcggtctggcggatctggcggaggctccacaagcttccagaacagcctgaccttcgacgacgtggccgtggacttcacccaggaggagtgggtgctgatggaccagacccagagggacctgtacagggaggtgatgctggagaactaccagaacctgttcagcgccggctgcgagatcaccaagcccagcctgatcagctggctggaggaggacctgcagatcggccagagggaggacttccaggagtgggagatgcaggacaccctgagggagcagaccagccccaagaaaaagagaaaagtctaagctgccttctgcggggcttgccttctggccatgcccttcttctctcccttgcacctgtacctcttggtctttgaataaagcctgagtaggaaggctagcaaaaaaaaaaaaaaaaaaaaaaaaaaaaaaaaaaaaaaaaaaaaaaaaaaaaaaaaaaaaaaaaaaaaaaaaaaaaaaaa

SEQ ID NO: 7038 - RNA, 5797 nt, synthetic construct
  source 1..5797: mol_type = other RNA
aggaaataagagagaaaagaagagtaagaagaaatataagagccaccatggcccctaagaagaagcgtaaagtgagccggatggaacgcctcgtctacgaggtgcggcagaagtgcagaaacatcgaggacatctgcatctcctgcggatctctgaacgtgaccctggagcacccactgttcatcggcggcatgtgccagaactgtaaaaactgttttctggagtgtgcctatcaatacgacgatgacggctaccagagctactgcaccatctgttgcggcggaagagaggtgctgatgtgtggaaataacaactgctgccggtgcttctgcgtggaatgcgtggacctgctggtgggccccggcgccgcccaggccgctattaaggaagatccttggaactgctacatgtgcggccacaagggcacatacggcctgctgagacggagagaggactggcctagcagactgcagatgttcttcgccaataaccacgaccaggagttcgacccccctaaggtgtaccctcccgtccccgccgagaagagaaagcccatccgggtcctgagcctgttcgatggcatcgccaccggtctgctggtgctgaaggacctgggcatccaggtggataggtacattgcctccgaggtgtgcgaggactccatcaccgtgggaatggtgcgtcatcagggcaagatcatgtacgtgggcgacgtgcggagcgtgacacagaagcatatccaggagtggggccctttcgacctggtgatcggcggcagcccttgcaatgacctgagcatcgtgaacccagcccggaagggcctgtacgagggaaccggcagactgttcttcgagttttacagactgctgcacgacgcccggcctaaggaaggcgacgaccggcccttcttttggctgttcgagaatgtggtggccatgggagtcagcgacaagcgggatattagccggttcctggagagcaaccccgtgatgatcgatgccaaggaagtgagcgccgcccaccgggccagatacttctggggcaatctgcctggcatgaacagacccctggccagcaccgtgaacgacaagctggagctgcaggagtgcctggagcacggccggatcgccaagttcagcaaggtgagaaccatcaccacccgaagcaacagcatcaaacaaggcaaggaccagcactttcctgtgttcatgaacgagaaggaggacatcctgtggtgtaccgagatggagagagtgttcgggttcccagtccactacacagatgtcagcaacatgtctagactggccagacagagactgctgggaagaagctggtccgtccctgtgatcagacacctgttcgcccctctgaaggagtacttcgcctgcgtgagcagcggcaacagcaacgccaacagccggggccccagcttctctagcggcctggtgccactgtccctgagagggagccacatgggccccatggagatctacaaaaccgtgagcgcctggaagcggcagcctgtgcgcgtgctgagcctgtttcggaatatcgataaagtcctgaaaagcctgggattcctggagagcggctctggctccggcggtggcaccctgaagtacgtggaggatgtgacaaacgtggtcagacgggatgtggagaagtggggccccttcgatctggtgtacggcagcacccaacccctgggcagctcttgtgaccggtgccctggctggtacatgtttcagttccaccggatcctgcagtacgccctgccgagacaggagtcccagcggccattcttttggattttcatggacaacttgctgctgaccgaggatgaccaggaaactaccactcggttcctgcagaccgaagccgtgaccctgcaggacgtgagaggccgggactaccagaacgccatgcgggtgtggtccaacatccctggactgaaaagcaagcacgcacctctgacccctaaagaagaggagtacctgcaggcccaggtgcggagcagaagcaagctggacgcccctaaggtggatctgctggtgaagaattgcctcctgcccctgagagagtacttcaagtatttcagccagaatagtctgcccctgggcggcccaagcagcggcgcccctcctcccagcggcggcagcccagccggctccccaacctctaccgaggagggcacctctgagtccgccacccccgagagcggccctggcacctccaccgagcccagcgagggcagcgcacccggcagccctgccggcagccccacctccacagaggagggaaccagcaccgagcccagcgaaggcagcgccccaggcaccagcaccgagcctagtgagggcggctctggcggcggcagcgcccaggagattaaacggatcaacaagatcagaagaagacttgtgaaagacagcaacaccaagaaggccggcaagacaggccccatgaaaaccctgctggttagagtgatgacacccgatctgagagagcggctggaaaacctgagaaagaagcctgaaaatatcccccagcccatcagcaatacatctagagccaacctgaataagctgctgaccgattacaccgaaatgaagaaggcgatcctgcatgtgtactgggaagagttccagaaggaccctgtgggcctgatgagccgggtggcccagcctgccagcaagaagatcgatcagaacaagctgaaacctgagatggacgagaagggcaacctgaccaccgccggctttgcctgctctcagtgtggccagcccctgttcgtgtacaagctggagcaggtgtctgagaagggcaaggcttacaccaactacttcggacggtgcaatgtggccgagcacgaaaagctgatcctgctggcccagctgaagcccgagaaggatagcgacgaagccgtgacatatagcctgggaaagtttgggcagagggccctggatttctacagcattcatgtgaccaaggagtccacccaccccgtgaagcccctggcccagatcgccggaaacagatacgcctccggacctgtgggaaaggccctgagcgacgcatgtatgggcacaatcgcctccttcctgtctaagtaccaggacatcatcatcgaacaccagaaggtggtgaagggcaaccagaagagactggagagcctgcgggagctggccggcaaggaaaacctggaataccctagcgtgaccctgccacctcagcctcacaccaaggagggcgttgatgcctacaacgaagtgatcgcccgggtgcgaatgtgggtgaacctgaacctgtggcagaagctgaagctaagcagagatgatgccaagcctctgctgagactgaagggattcccttcctttcctctggtcgagagacaggccaacgaagtggactggtgggacatggtgtgtaacgtgaagaagctgatcaacgagaaaaaggaggatggcaaggtgttttggcagaatctggctggctacaagagacaggaagccctgagaccatacctgagcagcgaggaagatcggaagaagggaaagaaattcgctcggtaccagctgggcgacctgctgctgcacctggaaaagaagcacggcgaggactggggaaaggtgtacgacgaggcctgggagcggattgacaagaaagtggaaggcctgagcaagcacatcaagctggaagaggaacggagaagcgaggacgcccagagcaaggccgccctgaccgactggctgcgggctaaggccagcttcgtgatcgagggcctgaaggaggccgacaaggacgagttctgcagatgcgagctgaagctgcagaagtggtacggggacctgcggggaaagcccttcgccatcgaagccgagaacagcatcctggacatcagcggcttcagcaagcagtacaactgtgccttcatctggcagaaggacggcgtgaagaagctgaacctgtacctgatcatcaactacttcaagggcggcaagctgcggttcaagaagatcaaacctgaagccttcgaagccaacagattctacaccgtgatcaacaaaaagagcggcgagatcgtgcccatggaggtgaacttcaacttcgacgaccccaacctgatcatcctgcctctggcctttggcaagagacagggcagagaattcatctggaacgacctgctgtccctggaaaccggcagcctgaagctggccaacggaagagtgatcgagaagacactgtacaacagaagaacccggcaggatgagcctgccctgttcgtggccctgaccttcgagcggcgggaggtcctggactcctccaatatcaaaccaatgaacctgatcggcgtggcaagaggcgaaaacatccccgccgtgatcgccctgaccgaccccgagggctgcccactgagccggtttaaggatagcctgggaaacccaacccacatcctgagaatcggcgagagctataaggagaagcagcggaccatccaggccaagaaggaggtggagcagcggagagccggcggctacagccggaagtacgccagcaaagccaagaatctggcagacgatatggtgagaaacaccgctagagatctgctgtactacgccgtgacccaggatgccatgctgatcttcgccaacctgagccggggcttcggccggcagggcaagcggaccttcatggccgagagacagtacacacggatggaggactggctgaccgccaagctggcctacgagggcctgagcaagacctacctgtccaagacactggcccagtacacctccaagacatgcagcaactgtgggtttaccatcaccagcgccgactacgacagggtgctggagaagctgaagaagacagcaacaggctggatgaccacaattaacggcaaggagctgaaggtggagggccagattacctactacaacagatacaagagacagaacgtagtcaaggacctgtccgtcgagctggatagactgagcgaagaatctgtgaacaacgacatctcctcctggacaaagggcagaagcggagaagctctgagcctcctgaagaaaagattctcccatagacccgtgcaggagaagttcgtgtgcctgaactgcggcttcgagacacacgcagccgagcaagccgccctgaacatcgccagatcctggctgttcctgcggagccaggagtacaagaaataccagacaaacaagacaaccggcaacaccgataagagagccttcgtcgagacctggcagtccttttaccggaagaagcttaaggaggtgtggaaacctgccgtgcggtctggcggatctggcggaggctccacaagcccccaggagagcgtgaccttcagggacgtggccgtggacttcacctgggaggagtggggccagctggaccccagccagaaggagctgtacagggaggtgatgctggagaactacggcaacctggcctgcctgggcctggccgtgagcaagcccgacgtgatcctgcagctggagaggggcgagatcccctggatgagcgagaggaaggtgcccgagggcatctgccccgactgggaggccaggaccagccccaagaaaaagagaaaagtctaagctgccttctgcggggcttgccttctggccatgcccttcttctctcccttgcacctgtacctcttggtctttgaataaagcctgagtaggaaggctagcaaaaaaaaaaaaaaaaaaaaaaaaaaaaaaaaaaaaaaaaaaaaaaaaaaaaaaaaaaaaaaaaaaaaaaaaaaaaaaaa

SEQ ID NO: 7039 - RNA, 5797 nt, synthetic construct
  source 1..5797: mol_type = other RNA
aggaaataagagagaaaagaagagtaagaagaaatataagagccaccatggcccctaagaagaagcgtaaagtgagccggatggaacgcctcgtctacgaggtgcggcagaagtgcagaaacatcgaggacatctgcatctcctgcggatctctgaacgtgaccctggagcacccactgttcatcggcggcatgtgccagaactgtaaaaactgttttctggagtgtgcctatcaatacgacgatgacggctaccagagctactgcaccatctgttgcggcggaagagaggtgctgatgtgtggaaataacaactgctgccggtgcttctgcgtggaatgcgtggacctgctggtgggccccggcgccgcccaggccgctattaaggaagatccttggaactgctacatgtgcggccacaagggcacatacggcctgctgagacggagagaggactggcctagcagactgcagatgttcttcgccaataaccacgaccaggagttcgacccccctaaggtgtaccctcccgtccccgccgagaagagaaagcccatccgggtcctgagcctgttcgatggcatcgccaccggtctgctggtgctgaaggacctgggcatccaggtggataggtacattgcctccgaggtgtgcgaggactccatcaccgtgggaatggtgcgtcatcagggcaagatcatgtacgtgggcgacgtgcggagcgtgacacagaagcatatccaggagtggggccctttcgacctggtgatcggcggcagcccttgcaatgacctgagcatcgtgaacccagcccggaagggcctgtacgagggaaccggcagactgttcttcgagttttacagactgctgcacgacgcccggcctaaggaaggcgacgaccggcccttcttttggctgttcgagaatgtggtggccatgggagtcagcgacaagcgggatattagccggttcctggagagcaaccccgtgatgatcgatgccaaggaagtgagcgccgcccaccgggccagatacttctggggcaatctgcctggcatgaacagacccctggccagcaccgtgaacgacaagctggagctgcaggagtgcctggagcacggccggatcgccaagttcagcaaggtgagaaccatcaccacccgaagcaacagcatcaaacaaggcaaggaccagcactttcctgtgttcatgaacgagaaggaggacatcctgtggtgtaccgagatggagagagtgttcgggttcccagtccactacacagatgtcagcaacatgtctagactggccagacagagactgctgggaagaagctggtccgtccctgtgatcagacacctgttcgcccctctgaaggagtacttcgcctgcgtgagcagcggcaacagcaacgccaacagccggggccccagcttctctagcggcctggtgccactgtccctgagagggagccacatgggccccatggagatctacaaaaccgtgagcgcctggaagcggcagcctgtgcgcgtgctgagcctgtttcggaatatcgataaagtcctgaaaagcctgggattcctggagagcggctctggctccggcggtggcaccctgaagtacgtggaggatgtgacaaacgtggtcagacgggatgtggagaagtggggccccttcgatctggtgtacggcagcacccaacccctgggcagctcttgtgaccggtgccctggctggtacatgtttcagttccaccggatcctgcagtacgccctgccgagacaggagtcccagcggccattcttttggattttcatggacaacttgctgctgaccgaggatgaccaggaaactaccactcggttcctgcagaccgaagccgtgaccctgcaggacgtgagaggccgggactaccagaacgccatgcgggtgtggtccaacatccctggactgaaaagcaagcacgcacctctgacccctaaagaagaggagtacctgcaggcccaggtgcggagcagaagcaagctggacgcccctaaggtggatctgctggtgaagaattgcctcctgcccctgagagagtacttcaagtatttcagccagaatagtctgcccctgggcggcccaagcagcggcgcccctcctcccagcggcggcagcccagccggctccccaacctctaccgaggagggcacctctgagtccgccacccccgagagcggccctggcacctccaccgagcccagcgagggcagcgcacccggcagccctgccggcagccccacctccacagaggagggaaccagcaccgagcccagcgaaggcagcgccccaggcaccagcaccgagcctagtgagggcggctctggcggcggcagcgcccaggagattaaacggatcaacaagatcagaagaagacttgtgaaagacagcaacaccaagaaggccggcaagacaggccccatgaaaaccctgctggttagagtgatgacacccgatctgagagagcggctggaaaacctgagaaagaagcctgaaaatatcccccagcccatcagcaatacatctagagccaacctgaataagctgctgaccgattacaccgaaatgaagaaggcgatcctgcatgtgtactgggaagagttccagaaggaccctgtgggcctgatgagccgggtggcccagcctgccagcaagaagatcgatcagaacaagctgaaacctgagatggacgagaagggcaacctgaccaccgccggctttgcctgctctcagtgtggccagcccctgttcgtgtacaagctggagcaggtgtctgagaagggcaaggcttacaccaactacttcggacggtgcaatgtggccgagcacgaaaagctgatcctgctggcccagctgaagcccgagaaggatagcgacgaagccgtgacatatagcctgggaaagtttgggcagagggccctggatttctacagcattcatgtgaccaaggagtccacccaccccgtgaagcccctggcccagatcgccggaaacagatacgcctccggacctgtgggaaaggccctgagcgacgcatgtatgggcacaatcgcctccttcctgtctaagtaccaggacatcatcatcgaacaccagaaggtggtgaagggcaaccagaagagactggagagcctgcgggagctggccggcaaggaaaacctggaataccctagcgtgaccctgccacctcagcctcacaccaaggagggcgttgatgcctacaacgaagtgatcgcccgggtgcgaatgtgggtgaacctgaacctgtggcagaagctgaagctaagcagagatgatgccaagcctctgctgagactgaagggattcccttcctttcctctggtcgagagacaggccaacgaagtggactggtgggacatggtgtgtaacgtgaagaagctgatcaacgagaaaaaggaggatggcaaggtgttttggcagaatctggctggctacaagagacaggaagccctgagaccatacctgagcagcgaggaagatcggaagaagggaaagaaattcgctcggtaccagctgggcgacctgctgctgcacctggaaaagaagcacggcgaggactggggaaaggtgtacgacgaggcctgggagcggattgacaagaaagtggaaggcctgagcaagcacatcaagctggaagaggaacggagaagcgaggacgcccagagcaaggccgccctgaccgactggctgcgggctaaggccagcttcgtgatcgagggcctgaaggaggccgacaaggacgagttctgcagatgcgagctgaagctgcagaagtggtacggggacctgcggggaaagcccttcgccatcgaagccgagaacagcatcctggacatcagcggcttcagcaagcagtacaactgtgccttcatctggcagaaggacggcgtgaagaagctgaacctgtacctgatcatcaactacttcaagggcggcaagctgcggttcaagaagatcaaacctgaagccttcgaagccaacagattctacaccgtgatcaacaaaaagagcggcgagatcgtgcccatggaggtgaacttcaacttcgacgaccccaacctgatcatcctgcctctggcctttggcaagagacagggcagagaattcatctggaacgacctgctgtccctggaaaccggcagcctgaagctggccaacggaagagtgatcgagaagacactgtacaacagaagaacccggcaggatgagcctgccctgttcgtggccctgaccttcgagcggcgggaggtcctggactcctccaatatcaaaccaatgaacctgatcggcgtggcaagaggcgaaaacatccccgccgtgatcgccctgaccgaccccgagggctgcccactgagccggtttaaggatagcctgggaaacccaacccacatcctgagaatcggcgagagctataaggagaagcagcggaccatccaggccaagaaggaggtggagcagcggagagccggcggctacagccggaagtacgccagcaaagccaagaatctggcagacgatatggtgagaaacaccgctagagatctgctgtactacgccgtgacccaggatgccatgctgatcttcgccaacctgagccggggcttcggccggcagggcaagcggaccttcatggccgagagacagtacacacggatggaggactggctgaccgccaagctggcctacgagggcctgagcaagacctacctgtccaagacactggcccagtacacctccaagacatgcagcaactgtgggtttaccatcaccagcgccgactacgacagggtgctggagaagctgaagaagacagcaacaggctggatgaccacaattaacggcaaggagctgaaggtggagggccagattacctactacaacagatacaagagacagaacgtagtcaaggacctgtccgtcgagctggatagactgagcgaagaatctgtgaacaacgacatctcctcctggacaaagggcagaagcggagaagctctgagcctcctgaagaaaagattctcccatagacccgtgcaggagaagttcgtgtgcctgaactgcggcttcgagacacacgcagccgagcaagccgccctgaacatcgccagatcctggctgttcctgcggagccaggagtacaagaaataccagacaaacaagacaaccggcaacaccgataagagagccttcgtcgagacctggcagtccttttaccggaagaagcttaaggaggtgtggaaacctgccgtgcggtctggcggatctggcggaggctccacaagcgtggtgctgctggaggccttcgaggacgtggccgtgtacttcacccagaaggagtgggccctgctggacgacggcgacaaggccctgtacagggaccagatgctgaggaactaccaggccctgatcagcctgggctacaggggccccacccccgccctgatcaacaggatccagaggggcgagatggagctgtgggtgtgcgacaaggactacggcgagaagagcagcctggagggcctgttcaccagccccaagaaaaagagaaaagtctaagctgccttctgcggggcttgccttctggccatgcccttcttctctcccttgcacctgtacctcttggtctttgaataaagcctgagtaggaaggctagcaaaaaaaaaaaaaaaaaaaaaaaaaaaaaaaaaaaaaaaaaaaaaaaaaaaaaaaaaaaaaaaaaaaaaaaaaaaaaaaa

SEQ ID NO: 7040 - RNA, 5797 nt, synthetic construct
  source 1..5797: mol_type = other RNA
aggaaataagagagaaaagaagagtaagaagaaatataagagccaccatggcccctaagaagaagcgtaaagtgagccggatggaacgcctcgtctacgaggtgcggcagaagtgcagaaacatcgaggacatctgcatctcctgcggatctctgaacgtgaccctggagcacccactgttcatcggcggcatgtgccagaactgtaaaaactgttttctggagtgtgcctatcaatacgacgatgacggctaccagagctactgcaccatctgttgcggcggaagagaggtgctgatgtgtggaaataacaactgctgccggtgcttctgcgtggaatgcgtggacctgctggtgggccccggcgccgcccaggccgctattaaggaagatccttggaactgctacatgtgcggccacaagggcacatacggcctgctgagacggagagaggactggcctagcagactgcagatgttcttcgccaataaccacgaccaggagttcgacccccctaaggtgtaccctcccgtccccgccgagaagagaaagcccatccgggtcctgagcctgttcgatggcatcgccaccggtctgctggtgctgaaggacctgggcatccaggtggataggtacattgcctccgaggtgtgcgaggactccatcaccgtgggaatggtgcgtcatcagggcaagatcatgtacgtgggcgacgtgcggagcgtgacacagaagcatatccaggagtggggccctttcgacctggtgatcggcggcagcccttgcaatgacctgagcatcgtgaacccagcccggaagggcctgtacgagggaaccggcagactgttcttcgagttttacagactgctgcacgacgcccggcctaaggaaggcgacgaccggcccttcttttggctgttcgagaatgtggtggccatgggagtcagcgacaagcgggatattagccggttcctggagagcaaccccgtgatgatcgatgccaaggaagtgagcgccgcccaccgggccagatacttctggggcaatctgcctggcatgaacagacccctggccagcaccgtgaacgacaagctggagctgcaggagtgcctggagcacggccggatcgccaagttcagcaaggtgagaaccatcaccacccgaagcaacagcatcaaacaaggcaaggaccagcactttcctgtgttcatgaacgagaaggaggacatcctgtggtgtaccgagatggagagagtgttcgggttcccagtccactacacagatgtcagcaacatgtctagactggccagacagagactgctgggaagaagctggtccgtccctgtgatcagacacctgttcgcccctctgaaggagtacttcgcctgcgtgagcagcggcaacagcaacgccaacagccggggccccagcttctctagcggcctggtgccactgtccctgagagggagccacatgggccccatggagatctacaaaaccgtgagcgcctggaagcggcagcctgtgcgcgtgctgagcctgtttcggaatatcgataaagtcctgaaaagcctgggattcctggagagcggctctggctccggcggtggcaccctgaagtacgtggaggatgtgacaaacgtggtcagacgggatgtggagaagtggggccccttcgatctggtgtacggcagcacccaacccctgggcagctcttgtgaccggtgccctggctggtacatgtttcagttccaccggatcctgcagtacgccctgccgagacaggagtcccagcggccattcttttggattttcatggacaacttgctgctgaccgaggatgaccaggaaactaccactcggttcctgcagaccgaagccgtgaccctgcaggacgtgagaggccgggactaccagaacgccatgcgggtgtggtccaacatccctggactgaaaagcaagcacgcacctctgacccctaaagaagaggagtacctgcaggcccaggtgcggagcagaagcaagctggacgcccctaaggtggatctgctggtgaagaattgcctcctgcccctgagagagtacttcaagtatttcagccagaatagtctgcccctgggcggcccaagcagcggcgcccctcctcccagcggcggcagcccagccggctccccaacctctaccgaggagggcacctctgagtccgccacccccgagagcggccctggcacctccaccgagcccagcgagggcagcgcacccggcagccctgccggcagccccacctccacagaggagggaaccagcaccgagcccagcgaaggcagcgccccaggcaccagcaccgagcctagtgagggcggctctggcggcggcagcgcccaggagattaaacggatcaacaagatcagaagaagacttgtgaaagacagcaacaccaagaaggccggcaagacaggccccatgaaaaccctgctggttagagtgatgacacccgatctgagagagcggctggaaaacctgagaaagaagcctgaaaatatcccccagcccatcagcaatacatctagagccaacctgaataagctgctgaccgattacaccgaaatgaagaaggcgatcctgcatgtgtactgggaagagttccagaaggaccctgtgggcctgatgagccgggtggcccagcctgccagcaagaagatcgatcagaacaagctgaaacctgagatggacgagaagggcaacctgaccaccgccggctttgcctgctctcagtgtggccagcccctgttcgtgtacaagctggagcaggtgtctgagaagggcaaggcttacaccaactacttcggacggtgcaatgtggccgagcacgaaaagctgatcctgctggcccagctgaagcccgagaaggatagcgacgaagccgtgacatatagcctgggaaagtttgggcagagggccctggatttctacagcattcatgtgaccaaggagtccacccaccccgtgaagcccctggcccagatcgccggaaacagatacgcctccggacctgtgggaaaggccctgagcgacgcatgtatgggcacaatcgcctccttcctgtctaagtaccaggacatcatcatcgaacaccagaaggtggtgaagggcaaccagaagagactggagagcctgcgggagctggccggcaaggaaaacctggaataccctagcgtgaccctgccacctcagcctcacaccaaggagggcgttgatgcctacaacgaagtgatcgcccgggtgcgaatgtgggtgaacctgaacctgtggcagaagctgaagctaagcagagatgatgccaagcctctgctgagactgaagggattcccttcctttcctctggtcgagagacaggccaacgaagtggactggtgggacatggtgtgtaacgtgaagaagctgatcaacgagaaaaaggaggatggcaaggtgttttggcagaatctggctggctacaagagacaggaagccctgagaccatacctgagcagcgaggaagatcggaagaagggaaagaaattcgctcggtaccagctgggcgacctgctgctgcacctggaaaagaagcacggcgaggactggggaaaggtgtacgacgaggcctgggagcggattgacaagaaagtggaaggcctgagcaagcacatcaagctggaagaggaacggagaagcgaggacgcccagagcaaggccgccctgaccgactggctgcgggctaaggccagcttcgtgatcgagggcctgaaggaggccgacaaggacgagttctgcagatgcgagctgaagctgcagaagtggtacggggacctgcggggaaagcccttcgccatcgaagccgagaacagcatcctggacatcagcggcttcagcaagcagtacaactgtgccttcatctggcagaaggacggcgtgaagaagctgaacctgtacctgatcatcaactacttcaagggcggcaagctgcggttcaagaagatcaaacctgaagccttcgaagccaacagattctacaccgtgatcaacaaaaagagcggcgagatcgtgcccatggaggtgaacttcaacttcgacgaccccaacctgatcatcctgcctctggcctttggcaagagacagggcagagaattcatctggaacgacctgctgtccctggaaaccggcagcctgaagctggccaacggaagagtgatcgagaagacactgtacaacagaagaacccggcaggatgagcctgccctgttcgtggccctgaccttcgagcggcgggaggtcctggactcctccaatatcaaaccaatgaacctgatcggcgtggcaagaggcgaaaacatccccgccgtgatcgccctgaccgaccccgagggctgcccactgagccggtttaaggatagcctgggaaacccaacccacatcctgagaatcggcgagagctataaggagaagcagcggaccatccaggccaagaaggaggtggagcagcggagagccggcggctacagccggaagtacgccagcaaagccaagaatctggcagacgatatggtgagaaacaccgctagagatctgctgtactacgccgtgacccaggatgccatgctgatcttcgccaacctgagccggggcttcggccggcagggcaagcggaccttcatggccgagagacagtacacacggatggaggactggctgaccgccaagctggcctacgagggcctgagcaagacctacctgtccaagacactggcccagtacacctccaagacatgcagcaactgtgggtttaccatcaccagcgccgactacgacagggtgctggagaagctgaagaagacagcaacaggctggatgaccacaattaacggcaaggagctgaaggtggagggccagattacctactacaacagatacaagagacagaacgtagtcaaggacctgtccgtcgagctggatagactgagcgaagaatctgtgaacaacgacatctcctcctggacaaagggcagaagcggagaagctctgagcctcctgaagaaaagattctcccatagacccgtgcaggagaagttcgtgtgcctgaactgcggcttcgagacacacgcagccgagcaagccgccctgaacatcgccagatcctggctgttcctgcggagccaggagtacaagaaataccagacaaacaagacaaccggcaacaccgataagagagccttcgtcgagacctggcagtccttttaccggaagaagcttaaggaggtgtggaaacctgccgtgcggtctggcggatctggcggaggctccacaagccaggccgaggtgaccttcgaggacgtggccgtgctgctgagccaggaggagtggggcctgctgggccccagccagaagggcctgtacagggaggtgatgctggagacctacaggaacctgctgagcctgggcgtgggcctggccgaccccaagcccgaggtgatcgtgcagctggagaggggcgacgagctgtgggtgctggacatgcacggcgccgagcagcccagcgtggacggcagcgccaccagccccaagaaaaagagaaaagtctaagctgccttctgcggggcttgccttctggccatgcccttcttctctcccttgcacctgtacctcttggtctttgaataaagcctgagtaggaaggctagcaaaaaaaaaaaaaaaaaaaaaaaaaaaaaaaaaaaaaaaaaaaaaaaaaaaaaaaaaaaaaaaaaaaaaaaaaaaaaaaa

SEQ ID NO: 7041 - RNA, 5797 nt, synthetic construct
  source 1..5797: mol_type = other RNA
aggaaataagagagaaaagaagagtaagaagaaatataagagccaccatggcccctaagaagaagcgtaaagtgagccggatggaacgcctcgtctacgaggtgcggcagaagtgcagaaacatcgaggacatctgcatctcctgcggatctctgaacgtgaccctggagcacccactgttcatcggcggcatgtgccagaactgtaaaaactgttttctggagtgtgcctatcaatacgacgatgacggctaccagagctactgcaccatctgttgcggcggaagagaggtgctgatgtgtggaaataacaactgctgccggtgcttctgcgtggaatgcgtggacctgctggtgggccccggcgccgcccaggccgctattaaggaagatccttggaactgctacatgtgcggccacaagggcacatacggcctgctgagacggagagaggactggcctagcagactgcagatgttcttcgccaataaccacgaccaggagttcgacccccctaaggtgtaccctcccgtccccgccgagaagagaaagcccatccgggtcctgagcctgttcgatggcatcgccaccggtctgctggtgctgaaggacctgggcatccaggtggataggtacattgcctccgaggtgtgcgaggactccatcaccgtgggaatggtgcgtcatcagggcaagatcatgtacgtgggcgacgtgcggagcgtgacacagaagcatatccaggagtggggccctttcgacctggtgatcggcggcagcccttgcaatgacctgagcatcgtgaacccagcccggaagggcctgtacgagggaaccggcagactgttcttcgagttttacagactgctgcacgacgcccggcctaaggaaggcgacgaccggcccttcttttggctgttcgagaatgtggtggccatgggagtcagcgacaagcgggatattagccggttcctggagagcaaccccgtgatgatcgatgccaaggaagtgagcgccgcccaccgggccagatacttctggggcaatctgcctggcatgaacagacccctggccagcaccgtgaacgacaagctggagctgcaggagtgcctggagcacggccggatcgccaagttcagcaaggtgagaaccatcaccacccgaagcaacagcatcaaacaaggcaaggaccagcactttcctgtgttcatgaacgagaaggaggacatcctgtggtgtaccgagatggagagagtgttcgggttcccagtccactacacagatgtcagcaacatgtctagactggccagacagagactgctgggaagaagctggtccgtccctgtgatcagacacctgttcgcccctctgaaggagtacttcgcctgcgtgagcagcggcaacagcaacgccaacagccggggccccagcttctctagcggcctggtgccactgtccctgagagggagccacatgggccccatggagatctacaaaaccgtgagcgcctggaagcggcagcctgtgcgcgtgctgagcctgtttcggaatatcgataaagtcctgaaaagcctgggattcctggagagcggctctggctccggcggtggcaccctgaagtacgtggaggatgtgacaaacgtggtcagacgggatgtggagaagtggggccccttcgatctggtgtacggcagcacccaacccctgggcagctcttgtgaccggtgccctggctggtacatgtttcagttccaccggatcctgcagtacgccctgccgagacaggagtcccagcggccattcttttggattttcatggacaacttgctgctgaccgaggatgaccaggaaactaccactcggttcctgcagaccgaagccgtgaccctgcaggacgtgagaggccgggactaccagaacgccatgcgggtgtggtccaacatccctggactgaaaagcaagcacgcacctctgacccctaaagaagaggagtacctgcaggcccaggtgcggagcagaagcaagctggacgcccctaaggtggatctgctggtgaagaattgcctcctgcccctgagagagtacttcaagtatttcagccagaatagtctgcccctgggcggcccaagcagcggcgcccctcctcccagcggcggcagcccagccggctccccaacctctaccgaggagggcacctctgagtccgccacccccgagagcggccctggcacctccaccgagcccagcgagggcagcgcacccggcagccctgccggcagccccacctccacagaggagggaaccagcaccgagcccagcgaaggcagcgccccaggcaccagcaccgagcctagtgagggcggctctggcggcggcagcgcccaggagattaaacggatcaacaagatcagaagaagacttgtgaaagacagcaacaccaagaaggccggcaagacaggccccatgaaaaccctgctggttagagtgatgacacccgatctgagagagcggctggaaaacctgagaaagaagcctgaaaatatcccccagcccatcagcaatacatctagagccaacctgaataagctgctgaccgattacaccgaaatgaagaaggcgatcctgcatgtgtactgggaagagttccagaaggaccctgtgggcctgatgagccgggtggcccagcctgccagcaagaagatcgatcagaacaagctgaaacctgagatggacgagaagggcaacctgaccaccgccggctttgcctgctctcagtgtggccagcccctgttcgtgtacaagctggagcaggtgtctgagaagggcaaggcttacaccaactacttcggacggtgcaatgtggccgagcacgaaaagctgatcctgctggcccagctgaagcccgagaaggatagcgacgaagccgtgacatatagcctgggaaagtttgggcagagggccctggatttctacagcattcatgtgaccaaggagtccacccaccccgtgaagcccctggcccagatcgccggaaacagatacgcctccggacctgtgggaaaggccctgagcgacgcatgtatgggcacaatcgcctccttcctgtctaagtaccaggacatcatcatcgaacaccagaaggtggtgaagggcaaccagaagagactggagagcctgcgggagctggccggcaaggaaaacctggaataccctagcgtgaccctgccacctcagcctcacaccaaggagggcgttgatgcctacaacgaagtgatcgcccgggtgcgaatgtgggtgaacctgaacctgtggcagaagctgaagctaagcagagatgatgccaagcctctgctgagactgaagggattcccttcctttcctctggtcgagagacaggccaacgaagtggactggtgggacatggtgtgtaacgtgaagaagctgatcaacgagaaaaaggaggatggcaaggtgttttggcagaatctggctggctacaagagacaggaagccctgagaccatacctgagcagcgaggaagatcggaagaagggaaagaaattcgctcggtaccagctgggcgacctgctgctgcacctggaaaagaagcacggcgaggactggggaaaggtgtacgacgaggcctgggagcggattgacaagaaagtggaaggcctgagcaagcacatcaagctggaagaggaacggagaagcgaggacgcccagagcaaggccgccctgaccgactggctgcgggctaaggccagcttcgtgatcgagggcctgaaggaggccgacaaggacgagttctgcagatgcgagctgaagctgcagaagtggtacggggacctgcggggaaagcccttcgccatcgaagccgagaacagcatcctggacatcagcggcttcagcaagcagtacaactgtgccttcatctggcagaaggacggcgtgaagaagctgaacctgtacctgatcatcaactacttcaagggcggcaagctgcggttcaagaagatcaaacctgaagccttcgaagccaacagattctacaccgtgatcaacaaaaagagcggcgagatcgtgcccatggaggtgaacttcaacttcgacgaccccaacctgatcatcctgcctctggcctttggcaagagacagggcagagaattcatctggaacgacctgctgtccctggaaaccggcagcctgaagctggccaacggaagagtgatcgagaagacactgtacaacagaagaacccggcaggatgagcctgccctgttcgtggccctgaccttcgagcggcgggaggtcctggactcctccaatatcaaaccaatgaacctgatcggcgtggcaagaggcgaaaacatccccgccgtgatcgccctgaccgaccccgagggctgcccactgagccggtttaaggatagcctgggaaacccaacccacatcctgagaatcggcgagagctataaggagaagcagcggaccatccaggccaagaaggaggtggagcagcggagagccggcggctacagccggaagtacgccagcaaagccaagaatctggcagacgatatggtgagaaacaccgctagagatctgctgtactacgccgtgacccaggatgccatgctgatcttcgccaacctgagccggggcttcggccggcagggcaagcggaccttcatggccgagagacagtacacacggatggaggactggctgaccgccaagctggcctacgagggcctgagcaagacctacctgtccaagacactggcccagtacacctccaagacatgcagcaactgtgggtttaccatcaccagcgccgactacgacagggtgctggagaagctgaagaagacagcaacaggctggatgaccacaattaacggcaaggagctgaaggtggagggccagattacctactacaacagatacaagagacagaacgtagtcaaggacctgtccgtcgagctggatagactgagcgaagaatctgtgaacaacgacatctcctcctggacaaagggcagaagcggagaagctctgagcctcctgaagaaaagattctcccatagacccgtgcaggagaagttcgtgtgcctgaactgcggcttcgagacacacgcagccgagcaagccgccctgaacatcgccagatcctggctgttcctgcggagccaggagtacaagaaataccagacaaacaagacaaccggcaacaccgataagagagccttcgtcgagacctggcagtccttttaccggaagaagcttaaggaggtgtggaaacctgccgtgcggtctggcggatctggcggaggctccacaagcccccagagcctgctgagcttcggcgacgtggccgtggacttcagccaggaggagtgggagtacctggactacgaccagaggaccctgtacatggacgtgatgctggagaactacagcaacctggtgttcgtggagaaccacaggatctacggcaagtacgagaaggacctggaccagggcaccaagcacatcgcccacgaggacgtgatcatccaggagaagagctacaagtgcaacgagctgaccagccccaagaaaaagagaaaagtctaagctgccttctgcggggcttgccttctggccatgcccttcttctctcccttgcacctgtacctcttggtctttgaataaagcctgagtaggaaggctagcaaaaaaaaaaaaaaaaaaaaaaaaaaaaaaaaaaaaaaaaaaaaaaaaaaaaaaaaaaaaaaaaaaaaaaaaaaaaaaaa

SEQ ID NO: 7042 - RNA, 5797 nt, synthetic construct
  source 1..5797: mol_type = other RNA
aggaaataagagagaaaagaagagtaagaagaaatataagagccaccatggcccctaagaagaagcgtaaagtgagccggatggaacgcctcgtctacgaggtgcggcagaagtgcagaaacatcgaggacatctgcatctcctgcggatctctgaacgtgaccctggagcacccactgttcatcggcggcatgtgccagaactgtaaaaactgttttctggagtgtgcctatcaatacgacgatgacggctaccagagctactgcaccatctgttgcggcggaagagaggtgctgatgtgtggaaataacaactgctgccggtgcttctgcgtggaatgcgtggacctgctggtgggccccggcgccgcccaggccgctattaaggaagatccttggaactgctacatgtgcggccacaagggcacatacggcctgctgagacggagagaggactggcctagcagactgcagatgttcttcgccaataaccacgaccaggagttcgacccccctaaggtgtaccctcccgtccccgccgagaagagaaagcccatccgggtcctgagcctgttcgatggcatcgccaccggtctgctggtgctgaaggacctgggcatccaggtggataggtacattgcctccgaggtgtgcgaggactccatcaccgtgggaatggtgcgtcatcagggcaagatcatgtacgtgggcgacgtgcggagcgtgacacagaagcatatccaggagtggggccctttcgacctggtgatcggcggcagcccttgcaatgacctgagcatcgtgaacccagcccggaagggcctgtacgagggaaccggcagactgttcttcgagttttacagactgctgcacgacgcccggcctaaggaaggcgacgaccggcccttcttttggctgttcgagaatgtggtggccatgggagtcagcgacaagcgggatattagccggttcctggagagcaaccccgtgatgatcgatgccaaggaagtgagcgccgcccaccgggccagatacttctggggcaatctgcctggcatgaacagacccctggccagcaccgtgaacgacaagctggagctgcaggagtgcctggagcacggccggatcgccaagttcagcaaggtgagaaccatcaccacccgaagcaacagcatcaaacaaggcaaggaccagcactttcctgtgttcatgaacgagaaggaggacatcctgtggtgtaccgagatggagagagtgttcgggttcccagtccactacacagatgtcagcaacatgtctagactggccagacagagactgctgggaagaagctggtccgtccctgtgatcagacacctgttcgcccctctgaaggagtacttcgcctgcgtgagcagcggcaacagcaacgccaacagccggggccccagcttctctagcggcctggtgccactgtccctgagagggagccacatgggccccatggagatctacaaaaccgtgagcgcctggaagcggcagcctgtgcgcgtgctgagcctgtttcggaatatcgataaagtcctgaaaagcctgggattcctggagagcggctctggctccggcggtggcaccctgaagtacgtggaggatgtgacaaacgtggtcagacgggatgtggagaagtggggccccttcgatctggtgtacggcagcacccaacccctgggcagctcttgtgaccggtgccctggctggtacatgtttcagttccaccggatcctgcagtacgccctgccgagacaggagtcccagcggccattcttttggattttcatggacaacttgctgctgaccgaggatgaccaggaaactaccactcggttcctgcagaccgaagccgtgaccctgcaggacgtgagaggccgggactaccagaacgccatgcgggtgtggtccaacatccctggactgaaaagcaagcacgcacctctgacccctaaagaagaggagtacctgcaggcccaggtgcggagcagaagcaagctggacgcccctaaggtggatctgctggtgaagaattgcctcctgcccctgagagagtacttcaagtatttcagccagaatagtctgcccctgggcggcccaagcagcggcgcccctcctcccagcggcggcagcccagccggctccccaacctctaccgaggagggcacctctgagtccgccacccccgagagcggccctggcacctccaccgagcccagcgagggcagcgcacccggcagccctgccggcagccccacctccacagaggagggaaccagcaccgagcccagcgaaggcagcgccccaggcaccagcaccgagcctagtgagggcggctctggcggcggcagcgcccaggagattaaacggatcaacaagatcagaagaagacttgtgaaagacagcaacaccaagaaggccggcaagacaggccccatgaaaaccctgctggttagagtgatgacacccgatctgagagagcggctggaaaacctgagaaagaagcctgaaaatatcccccagcccatcagcaatacatctagagccaacctgaataagctgctgaccgattacaccgaaatgaagaaggcgatcctgcatgtgtactgggaagagttccagaaggaccctgtgggcctgatgagccgggtggcccagcctgccagcaagaagatcgatcagaacaagctgaaacctgagatggacgagaagggcaacctgaccaccgccggctttgcctgctctcagtgtggccagcccctgttcgtgtacaagctggagcaggtgtctgagaagggcaaggcttacaccaactacttcggacggtgcaatgtggccgagcacgaaaagctgatcctgctggcccagctgaagcccgagaaggatagcgacgaagccgtgacatatagcctgggaaagtttgggcagagggccctggatttctacagcattcatgtgaccaaggagtccacccaccccgtgaagcccctggcccagatcgccggaaacagatacgcctccggacctgtgggaaaggccctgagcgacgcatgtatgggcacaatcgcctccttcctgtctaagtaccaggacatcatcatcgaacaccagaaggtggtgaagggcaaccagaagagactggagagcctgcgggagctggccggcaaggaaaacctggaataccctagcgtgaccctgccacctcagcctcacaccaaggagggcgttgatgcctacaacgaagtgatcgcccgggtgcgaatgtgggtgaacctgaacctgtggcagaagctgaagctaagcagagatgatgccaagcctctgctgagactgaagggattcccttcctttcctctggtcgagagacaggccaacgaagtggactggtgggacatggtgtgtaacgtgaagaagctgatcaacgagaaaaaggaggatggcaaggtgttttggcagaatctggctggctacaagagacaggaagccctgagaccatacctgagcagcgaggaagatcggaagaagggaaagaaattcgctcggtaccagctgggcgacctgctgctgcacctggaaaagaagcacggcgaggactggggaaaggtgtacgacgaggcctgggagcggattgacaagaaagtggaaggcctgagcaagcacatcaagctggaagaggaacggagaagcgaggacgcccagagcaaggccgccctgaccgactggctgcgggctaaggccagcttcgtgatcgagggcctgaaggaggccgacaaggacgagttctgcagatgcgagctgaagctgcagaagtggtacggggacctgcggggaaagcccttcgccatcgaagccgagaacagcatcctggacatcagcggcttcagcaagcagtacaactgtgccttcatctggcagaaggacggcgtgaagaagctgaacctgtacctgatcatcaactacttcaagggcggcaagctgcggttcaagaagatcaaacctgaagccttcgaagccaacagattctacaccgtgatcaacaaaaagagcggcgagatcgtgcccatggaggtgaacttcaacttcgacgaccccaacctgatcatcctgcctctggcctttggcaagagacagggcagagaattcatctggaacgacctgctgtccctggaaaccggcagcctgaagctggccaacggaagagtgatcgagaagacactgtacaacagaagaacccggcaggatgagcctgccctgttcgtggccctgaccttcgagcggcgggaggtcctggactcctccaatatcaaaccaatgaacctgatcggcgtggcaagaggcgaaaacatccccgccgtgatcgccctgaccgaccccgagggctgcccactgagccggtttaaggatagcctgggaaacccaacccacatcctgagaatcggcgagagctataaggagaagcagcggaccatccaggccaagaaggaggtggagcagcggagagccggcggctacagccggaagtacgccagcaaagccaagaatctggcagacgatatggtgagaaacaccgctagagatctgctgtactacgccgtgacccaggatgccatgctgatcttcgccaacctgagccggggcttcggccggcagggcaagcggaccttcatggccgagagacagtacacacggatggaggactggctgaccgccaagctggcctacgagggcctgagcaagacctacctgtccaagacactggcccagtacacctccaagacatgcagcaactgtgggtttaccatcaccagcgccgactacgacagggtgctggagaagctgaagaagacagcaacaggctggatgaccacaattaacggcaaggagctgaaggtggagggccagattacctactacaacagatacaagagacagaacgtagtcaaggacctgtccgtcgagctggatagactgagcgaagaatctgtgaacaacgacatctcctcctggacaaagggcagaagcggagaagctctgagcctcctgaagaaaagattctcccatagacccgtgcaggagaagttcgtgtgcctgaactgcggcttcgagacacacgcagccgagcaagccgccctgaacatcgccagatcctggctgttcctgcggagccaggagtacaagaaataccagacaaacaagacaaccggcaacaccgataagagagccttcgtcgagacctggcagtccttttaccggaagaagcttaaggaggtgtggaaacctgccgtgcggtctggcggatctggcggaggctccacaagcgccaggggcctggtgaccttcgaggacgtggccgtgtacttcagcagggaggagtggggcctgctgaacctgacccagaggagcctgtacagggacgtgatgctggagaacttcgccctgatcggcagcctgggcttcgcccccagcaggagccacgtggtggcccagctggagagcgaggaggagctgtgggtgcccagcatggtggacctgaccctgggcagcagggccgaggccaggaggaccagccccaagaaaaagagaaaagtctaagctgccttctgcggggcttgccttctggccatgcccttcttctctcccttgcacctgtacctcttggtctttgaataaagcctgagtaggaaggctagcaaaaaaaaaaaaaaaaaaaaaaaaaaaaaaaaaaaaaaaaaaaaaaaaaaaaaaaaaaaaaaaaaaaaaaaaaaaaaaaa

SEQ ID NO: 7043 - RNA, 5797 nt, synthetic construct
  source 1..5797: mol_type = other RNA
aggaaataagagagaaaagaagagtaagaagaaatataagagccaccatggcccctaagaagaagcgtaaagtgagccggatggaacgcctcgtctacgaggtgcggcagaagtgcagaaacatcgaggacatctgcatctcctgcggatctctgaacgtgaccctggagcacccactgttcatcggcggcatgtgccagaactgtaaaaactgttttctggagtgtgcctatcaatacgacgatgacggctaccagagctactgcaccatctgttgcggcggaagagaggtgctgatgtgtggaaataacaactgctgccggtgcttctgcgtggaatgcgtggacctgctggtgggccccggcgccgcccaggccgctattaaggaagatccttggaactgctacatgtgcggccacaagggcacatacggcctgctgagacggagagaggactggcctagcagactgcagatgttcttcgccaataaccacgaccaggagttcgacccccctaaggtgtaccctcccgtccccgccgagaagagaaagcccatccgggtcctgagcctgttcgatggcatcgccaccggtctgctggtgctgaaggacctgggcatccaggtggataggtacattgcctccgaggtgtgcgaggactccatcaccgtgggaatggtgcgtcatcagggcaagatcatgtacgtgggcgacgtgcggagcgtgacacagaagcatatccaggagtggggccctttcgacctggtgatcggcggcagcccttgcaatgacctgagcatcgtgaacccagcccggaagggcctgtacgagggaaccggcagactgttcttcgagttttacagactgctgcacgacgcccggcctaaggaaggcgacgaccggcccttcttttggctgttcgagaatgtggtggccatgggagtcagcgacaagcgggatattagccggttcctggagagcaaccccgtgatgatcgatgccaaggaagtgagcgccgcccaccgggccagatacttctggggcaatctgcctggcatgaacagacccctggccagcaccgtgaacgacaagctggagctgcaggagtgcctggagcacggccggatcgccaagttcagcaaggtgagaaccatcaccacccgaagcaacagcatcaaacaaggcaaggaccagcactttcctgtgttcatgaacgagaaggaggacatcctgtggtgtaccgagatggagagagtgttcgggttcccagtccactacacagatgtcagcaacatgtctagactggccagacagagactgctgggaagaagctggtccgtccctgtgatcagacacctgttcgcccctctgaaggagtacttcgcctgcgtgagcagcggcaacagcaacgccaacagccggggccccagcttctctagcggcctggtgccactgtccctgagagggagccacatgggccccatggagatctacaaaaccgtgagcgcctggaagcggcagcctgtgcgcgtgctgagcctgtttcggaatatcgataaagtcctgaaaagcctgggattcctggagagcggctctggctccggcggtggcaccctgaagtacgtggaggatgtgacaaacgtggtcagacgggatgtggagaagtggggccccttcgatctggtgtacggcagcacccaacccctgggcagctcttgtgaccggtgccctggctggtacatgtttcagttccaccggatcctgcagtacgccctgccgagacaggagtcccagcggccattcttttggattttcatggacaacttgctgctgaccgaggatgaccaggaaactaccactcggttcctgcagaccgaagccgtgaccctgcaggacgtgagaggccgggactaccagaacgccatgcgggtgtggtccaacatccctggactgaaaagcaagcacgcacctctgacccctaaagaagaggagtacctgcaggcccaggtgcggagcagaagcaagctggacgcccctaaggtggatctgctggtgaagaattgcctcctgcccctgagagagtacttcaagtatttcagccagaatagtctgcccctgggcggcccaagcagcggcgcccctcctcccagcggcggcagcccagccggctccccaacctctaccgaggagggcacctctgagtccgccacccccgagagcggccctggcacctccaccgagcccagcgagggcagcgcacccggcagccctgccggcagccccacctccacagaggagggaaccagcaccgagcccagcgaaggcagcgccccaggcaccagcaccgagcctagtgagggcggctctggcggcggcagcgcccaggagattaaacggatcaacaagatcagaagaagacttgtgaaagacagcaacaccaagaaggccggcaagacaggccccatgaaaaccctgctggttagagtgatgacacccgatctgagagagcggctggaaaacctgagaaagaagcctgaaaatatcccccagcccatcagcaatacatctagagccaacctgaataagctgctgaccgattacaccgaaatgaagaaggcgatcctgcatgtgtactgggaagagttccagaaggaccctgtgggcctgatgagccgggtggcccagcctgccagcaagaagatcgatcagaacaagctgaaacctgagatggacgagaagggcaacctgaccaccgccggctttgcctgctctcagtgtggccagcccctgttcgtgtacaagctggagcaggtgtctgagaagggcaaggcttacaccaactacttcggacggtgcaatgtggccgagcacgaaaagctgatcctgctggcccagctgaagcccgagaaggatagcgacgaagccgtgacatatagcctgggaaagtttgggcagagggccctggatttctacagcattcatgtgaccaaggagtccacccaccccgtgaagcccctggcccagatcgccggaaacagatacgcctccggacctgtgggaaaggccctgagcgacgcatgtatgggcacaatcgcctccttcctgtctaagtaccaggacatcatcatcgaacaccagaaggtggtgaagggcaaccagaagagactggagagcctgcgggagctggccggcaaggaaaacctggaataccctagcgtgaccctgccacctcagcctcacaccaaggagggcgttgatgcctacaacgaagtgatcgcccgggtgcgaatgtgggtgaacctgaacctgtggcagaagctgaagctaagcagagatgatgccaagcctctgctgagactgaagggattcccttcctttcctctggtcgagagacaggccaacgaagtggactggtgggacatggtgtgtaacgtgaagaagctgatcaacgagaaaaaggaggatggcaaggtgttttggcagaatctggctggctacaagagacaggaagccctgagaccatacctgagcagcgaggaagatcggaagaagggaaagaaattcgctcggtaccagctgggcgacctgctgctgcacctggaaaagaagcacggcgaggactggggaaaggtgtacgacgaggcctgggagcggattgacaagaaagtggaaggcctgagcaagcacatcaagctggaagaggaacggagaagcgaggacgcccagagcaaggccgccctgaccgactggctgcgggctaaggccagcttcgtgatcgagggcctgaaggaggccgacaaggacgagttctgcagatgcgagctgaagctgcagaagtggtacggggacctgcggggaaagcccttcgccatcgaagccgagaacagcatcctggacatcagcggcttcagcaagcagtacaactgtgccttcatctggcagaaggacggcgtgaagaagctgaacctgtacctgatcatcaactacttcaagggcggcaagctgcggttcaagaagatcaaacctgaagccttcgaagccaacagattctacaccgtgatcaacaaaaagagcggcgagatcgtgcccatggaggtgaacttcaacttcgacgaccccaacctgatcatcctgcctctggcctttggcaagagacagggcagagaattcatctggaacgacctgctgtccctggaaaccggcagcctgaagctggccaacggaagagtgatcgagaagacactgtacaacagaagaacccggcaggatgagcctgccctgttcgtggccctgaccttcgagcggcgggaggtcctggactcctccaatatcaaaccaatgaacctgatcggcgtggcaagaggcgaaaacatccccgccgtgatcgccctgaccgaccccgagggctgcccactgagccggtttaaggatagcctgggaaacccaacccacatcctgagaatcggcgagagctataaggagaagcagcggaccatccaggccaagaaggaggtggagcagcggagagccggcggctacagccggaagtacgccagcaaagccaagaatctggcagacgatatggtgagaaacaccgctagagatctgctgtactacgccgtgacccaggatgccatgctgatcttcgccaacctgagccggggcttcggccggcagggcaagcggaccttcatggccgagagacagtacacacggatggaggactggctgaccgccaagctggcctacgagggcctgagcaagacctacctgtccaagacactggcccagtacacctccaagacatgcagcaactgtgggtttaccatcaccagcgccgactacgacagggtgctggagaagctgaagaagacagcaacaggctggatgaccacaattaacggcaaggagctgaaggtggagggccagattacctactacaacagatacaagagacagaacgtagtcaaggacctgtccgtcgagctggatagactgagcgaagaatctgtgaacaacgacatctcctcctggacaaagggcagaagcggagaagctctgagcctcctgaagaaaagattctcccatagacccgtgcaggagaagttcgtgtgcctgaactgcggcttcgagacacacgcagccgagcaagccgccctgaacatcgccagatcctggctgttcctgcggagccaggagtacaagaaataccagacaaacaagacaaccggcaacaccgataagagagccttcgtcgagacctggcagtccttttaccggaagaagcttaaggaggtgtggaaacctgccgtgcggtctggcggatctggcggaggctccacaagcccccaggagagcgtgaccttcaaggacgtggccgtggacttcacctgggaggagtggggctacctggacaccagccagaaggagctgtactgggaggtgatgctggagaactacaggaacctggtgagcctgggcctggccgacagcaacgtggacatgatcagccagctggagagcggcgaggcccagggcatccccgtggacagcgtgctgaccagctgctggcccgacggcgacaggaggaccagccccaagaaaaagagaaaagtctaagctgccttctgcggggcttgccttctggccatgcccttcttctctcccttgcacctgtacctcttggtctttgaataaagcctgagtaggaaggctagcaaaaaaaaaaaaaaaaaaaaaaaaaaaaaaaaaaaaaaaaaaaaaaaaaaaaaaaaaaaaaaaaaaaaaaaaaaaaaaaa

SEQ ID NO: 7044 - RNA, 5797 nt, synthetic construct
  source 1..5797: mol_type = other RNA
aggaaataagagagaaaagaagagtaagaagaaatataagagccaccatggcccctaagaagaagcgtaaagtgagccggatggaacgcctcgtctacgaggtgcggcagaagtgcagaaacatcgaggacatctgcatctcctgcggatctctgaacgtgaccctggagcacccactgttcatcggcggcatgtgccagaactgtaaaaactgttttctggagtgtgcctatcaatacgacgatgacggctaccagagctactgcaccatctgttgcggcggaagagaggtgctgatgtgtggaaataacaactgctgccggtgcttctgcgtggaatgcgtggacctgctggtgggccccggcgccgcccaggccgctattaaggaagatccttggaactgctacatgtgcggccacaagggcacatacggcctgctgagacggagagaggactggcctagcagactgcagatgttcttcgccaataaccacgaccaggagttcgacccccctaaggtgtaccctcccgtccccgccgagaagagaaagcccatccgggtcctgagcctgttcgatggcatcgccaccggtctgctggtgctgaaggacctgggcatccaggtggataggtacattgcctccgaggtgtgcgaggactccatcaccgtgggaatggtgcgtcatcagggcaagatcatgtacgtgggcgacgtgcggagcgtgacacagaagcatatccaggagtggggccctttcgacctggtgatcggcggcagcccttgcaatgacctgagcatcgtgaacccagcccggaagggcctgtacgagggaaccggcagactgttcttcgagttttacagactgctgcacgacgcccggcctaaggaaggcgacgaccggcccttcttttggctgttcgagaatgtggtggccatgggagtcagcgacaagcgggatattagccggttcctggagagcaaccccgtgatgatcgatgccaaggaagtgagcgccgcccaccgggccagatacttctggggcaatctgcctggcatgaacagacccctggccagcaccgtgaacgacaagctggagctgcaggagtgcctggagcacggccggatcgccaagttcagcaaggtgagaaccatcaccacccgaagcaacagcatcaaacaaggcaaggaccagcactttcctgtgttcatgaacgagaaggaggacatcctgtggtgtaccgagatggagagagtgttcgggttcccagtccactacacagatgtcagcaacatgtctagactggccagacagagactgctgggaagaagctggtccgtccctgtgatcagacacctgttcgcccctctgaaggagtacttcgcctgcgtgagcagcggcaacagcaacgccaacagccggggccccagcttctctagcggcctggtgccactgtccctgagagggagccacatgggccccatggagatctacaaaaccgtgagcgcctggaagcggcagcctgtgcgcgtgctgagcctgtttcggaatatcgataaagtcctgaaaagcctgggattcctggagagcggctctggctccggcggtggcaccctgaagtacgtggaggatgtgacaaacgtggtcagacgggatgtggagaagtggggccccttcgatctggtgtacggcagcacccaacccctgggcagctcttgtgaccggtgccctggctggtacatgtttcagttccaccggatcctgcagtacgccctgccgagacaggagtcccagcggccattcttttggattttcatggacaacttgctgctgaccgaggatgaccaggaaactaccactcggttcctgcagaccgaagccgtgaccctgcaggacgtgagaggccgggactaccagaacgccatgcgggtgtggtccaacatccctggactgaaaagcaagcacgcacctctgacccctaaagaagaggagtacctgcaggcccaggtgcggagcagaagcaagctggacgcccctaaggtggatctgctggtgaagaattgcctcctgcccctgagagagtacttcaagtatttcagccagaatagtctgcccctgggcggcccaagcagcggcgcccctcctcccagcggcggcagcccagccggctccccaacctctaccgaggagggcacctctgagtccgccacccccgagagcggccctggcacctccaccgagcccagcgagggcagcgcacccggcagccctgccggcagccccacctccacagaggagggaaccagcaccgagcccagcgaaggcagcgccccaggcaccagcaccgagcctagtgagggcggctctggcggcggcagcgcccaggagattaaacggatcaacaagatcagaagaagacttgtgaaagacagcaacaccaagaaggccggcaagacaggccccatgaaaaccctgctggttagagtgatgacacccgatctgagagagcggctggaaaacctgagaaagaagcctgaaaatatcccccagcccatcagcaatacatctagagccaacctgaataagctgctgaccgattacaccgaaatgaagaaggcgatcctgcatgtgtactgggaagagttccagaaggaccctgtgggcctgatgagccgggtggcccagcctgccagcaagaagatcgatcagaacaagctgaaacctgagatggacgagaagggcaacctgaccaccgccggctttgcctgctctcagtgtggccagcccctgttcgtgtacaagctggagcaggtgtctgagaagggcaaggcttacaccaactacttcggacggtgcaatgtggccgagcacgaaaagctgatcctgctggcccagctgaagcccgagaaggatagcgacgaagccgtgacatatagcctgggaaagtttgggcagagggccctggatttctacagcattcatgtgaccaaggagtccacccaccccgtgaagcccctggcccagatcgccggaaacagatacgcctccggacctgtgggaaaggccctgagcgacgcatgtatgggcacaatcgcctccttcctgtctaagtaccaggacatcatcatcgaacaccagaaggtggtgaagggcaaccagaagagactggagagcctgcgggagctggccggcaaggaaaacctggaataccctagcgtgaccctgccacctcagcctcacaccaaggagggcgttgatgcctacaacgaagtgatcgcccgggtgcgaatgtgggtgaacctgaacctgtggcagaagctgaagctaagcagagatgatgccaagcctctgctgagactgaagggattcccttcctttcctctggtcgagagacaggccaacgaagtggactggtgggacatggtgtgtaacgtgaagaagctgatcaacgagaaaaaggaggatggcaaggtgttttggcagaatctggctggctacaagagacaggaagccctgagaccatacctgagcagcgaggaagatcggaagaagggaaagaaattcgctcggtaccagctgggcgacctgctgctgcacctggaaaagaagcacggcgaggactggggaaaggtgtacgacgaggcctgggagcggattgacaagaaagtggaaggcctgagcaagcacatcaagctggaagaggaacggagaagcgaggacgcccagagcaaggccgccctgaccgactggctgcgggctaaggccagcttcgtgatcgagggcctgaaggaggccgacaaggacgagttctgcagatgcgagctgaagctgcagaagtggtacggggacctgcggggaaagcccttcgccatcgaagccgagaacagcatcctggacatcagcggcttcagcaagcagtacaactgtgccttcatctggcagaaggacggcgtgaagaagctgaacctgtacctgatcatcaactacttcaagggcggcaagctgcggttcaagaagatcaaacctgaagccttcgaagccaacagattctacaccgtgatcaacaaaaagagcggcgagatcgtgcccatggaggtgaacttcaacttcgacgaccccaacctgatcatcctgcctctggcctttggcaagagacagggcagagaattcatctggaacgacctgctgtccctggaaaccggcagcctgaagctggccaacggaagagtgatcgagaagacactgtacaacagaagaacccggcaggatgagcctgccctgttcgtggccctgaccttcgagcggcgggaggtcctggactcctccaatatcaaaccaatgaacctgatcggcgtggcaagaggcgaaaacatccccgccgtgatcgccctgaccgaccccgagggctgcccactgagccggtttaaggatagcctgggaaacccaacccacatcctgagaatcggcgagagctataaggagaagcagcggaccatccaggccaagaaggaggtggagcagcggagagccggcggctacagccggaagtacgccagcaaagccaagaatctggcagacgatatggtgagaaacaccgctagagatctgctgtactacgccgtgacccaggatgccatgctgatcttcgccaacctgagccggggcttcggccggcagggcaagcggaccttcatggccgagagacagtacacacggatggaggactggctgaccgccaagctggcctacgagggcctgagcaagacctacctgtccaagacactggcccagtacacctccaagacatgcagcaactgtgggtttaccatcaccagcgccgactacgacagggtgctggagaagctgaagaagacagcaacaggctggatgaccacaattaacggcaaggagctgaaggtggagggccagattacctactacaacagatacaagagacagaacgtagtcaaggacctgtccgtcgagctggatagactgagcgaagaatctgtgaacaacgacatctcctcctggacaaagggcagaagcggagaagctctgagcctcctgaagaaaagattctcccatagacccgtgcaggagaagttcgtgtgcctgaactgcggcttcgagacacacgcagccgagcaagccgccctgaacatcgccagatcctggctgttcctgcggagccaggagtacaagaaataccagacaaacaagacaaccggcaacaccgataagagagccttcgtcgagacctggcagtccttttaccggaagaagcttaaggaggtgtggaaacctgccgtgcggtctggcggatctggcggaggctccacaagcgcccaggtgctggtgaccttccaggacgtggccgtggacttcacccaggaggagtggaggctgctggacctgggccagaaggagctgtacaaggaggtgatgctggagaacgtgcagaacatgctgttcctgggcctgcccgtgcccagggaggactggatcagccacttcgaccagggcagggccccctggatgctggagggcgagggccccagcaacagcaggctggacggccagaggaggaccagccccaagaaaaagagaaaagtctaagctgccttctgcggggcttgccttctggccatgcccttcttctctcccttgcacctgtacctcttggtctttgaataaagcctgagtaggaaggctagcaaaaaaaaaaaaaaaaaaaaaaaaaaaaaaaaaaaaaaaaaaaaaaaaaaaaaaaaaaaaaaaaaaaaaaaaaaaaaaaa

SEQ ID NO: 7045 - RNA, 5797 nt, synthetic construct
  source 1..5797: mol_type = other RNA
aggaaataagagagaaaagaagagtaagaagaaatataagagccaccatggcccctaagaagaagcgtaaagtgagccggatggaacgcctcgtctacgaggtgcggcagaagtgcagaaacatcgaggacatctgcatctcctgcggatctctgaacgtgaccctggagcacccactgttcatcggcggcatgtgccagaactgtaaaaactgttttctggagtgtgcctatcaatacgacgatgacggctaccagagctactgcaccatctgttgcggcggaagagaggtgctgatgtgtggaaataacaactgctgccggtgcttctgcgtggaatgcgtggacctgctggtgggccccggcgccgcccaggccgctattaaggaagatccttggaactgctacatgtgcggccacaagggcacatacggcctgctgagacggagagaggactggcctagcagactgcagatgttcttcgccaataaccacgaccaggagttcgacccccctaaggtgtaccctcccgtccccgccgagaagagaaagcccatccgggtcctgagcctgttcgatggcatcgccaccggtctgctggtgctgaaggacctgggcatccaggtggataggtacattgcctccgaggtgtgcgaggactccatcaccgtgggaatggtgcgtcatcagggcaagatcatgtacgtgggcgacgtgcggagcgtgacacagaagcatatccaggagtggggccctttcgacctggtgatcggcggcagcccttgcaatgacctgagcatcgtgaacccagcccggaagggcctgtacgagggaaccggcagactgttcttcgagttttacagactgctgcacgacgcccggcctaaggaaggcgacgaccggcccttcttttggctgttcgagaatgtggtggccatgggagtcagcgacaagcgggatattagccggttcctggagagcaaccccgtgatgatcgatgccaaggaagtgagcgccgcccaccgggccagatacttctggggcaatctgcctggcatgaacagacccctggccagcaccgtgaacgacaagctggagctgcaggagtgcctggagcacggccggatcgccaagttcagcaaggtgagaaccatcaccacccgaagcaacagcatcaaacaaggcaaggaccagcactttcctgtgttcatgaacgagaaggaggacatcctgtggtgtaccgagatggagagagtgttcgggttcccagtccactacacagatgtcagcaacatgtctagactggccagacagagactgctgggaagaagctggtccgtccctgtgatcagacacctgttcgcccctctgaaggagtacttcgcctgcgtgagcagcggcaacagcaacgccaacagccggggccccagcttctctagcggcctggtgccactgtccctgagagggagccacatgggccccatggagatctacaaaaccgtgagcgcctggaagcggcagcctgtgcgcgtgctgagcctgtttcggaatatcgataaagtcctgaaaagcctgggattcctggagagcggctctggctccggcggtggcaccctgaagtacgtggaggatgtgacaaacgtggtcagacgggatgtggagaagtggggccccttcgatctggtgtacggcagcacccaacccctgggcagctcttgtgaccggtgccctggctggtacatgtttcagttccaccggatcctgcagtacgccctgccgagacaggagtcccagcggccattcttttggattttcatggacaacttgctgctgaccgaggatgaccaggaaactaccactcggttcctgcagaccgaagccgtgaccctgcaggacgtgagaggccgggactaccagaacgccatgcgggtgtggtccaacatccctggactgaaaagcaagcacgcacctctgacccctaaagaagaggagtacctgcaggcccaggtgcggagcagaagcaagctggacgcccctaaggtggatctgctggtgaagaattgcctcctgcccctgagagagtacttcaagtatttcagccagaatagtctgcccctgggcggcccaagcagcggcgcccctcctcccagcggcggcagcccagccggctccccaacctctaccgaggagggcacctctgagtccgccacccccgagagcggccctggcacctccaccgagcccagcgagggcagcgcacccggcagccctgccggcagccccacctccacagaggagggaaccagcaccgagcccagcgaaggcagcgccccaggcaccagcaccgagcctagtgagggcggctctggcggcggcagcgcccaggagattaaacggatcaacaagatcagaagaagacttgtgaaagacagcaacaccaagaaggccggcaagacaggccccatgaaaaccctgctggttagagtgatgacacccgatctgagagagcggctggaaaacctgagaaagaagcctgaaaatatcccccagcccatcagcaatacatctagagccaacctgaataagctgctgaccgattacaccgaaatgaagaaggcgatcctgcatgtgtactgggaagagttccagaaggaccctgtgggcctgatgagccgggtggcccagcctgccagcaagaagatcgatcagaacaagctgaaacctgagatggacgagaagggcaacctgaccaccgccggctttgcctgctctcagtgtggccagcccctgttcgtgtacaagctggagcaggtgtctgagaagggcaaggcttacaccaactacttcggacggtgcaatgtggccgagcacgaaaagctgatcctgctggcccagctgaagcccgagaaggatagcgacgaagccgtgacatatagcctgggaaagtttgggcagagggccctggatttctacagcattcatgtgaccaaggagtccacccaccccgtgaagcccctggcccagatcgccggaaacagatacgcctccggacctgtgggaaaggccctgagcgacgcatgtatgggcacaatcgcctccttcctgtctaagtaccaggacatcatcatcgaacaccagaaggtggtgaagggcaaccagaagagactggagagcctgcgggagctggccggcaaggaaaacctggaataccctagcgtgaccctgccacctcagcctcacaccaaggagggcgttgatgcctacaacgaagtgatcgcccgggtgcgaatgtgggtgaacctgaacctgtggcagaagctgaagctaagcagagatgatgccaagcctctgctgagactgaagggattcccttcctttcctctggtcgagagacaggccaacgaagtggactggtgggacatggtgtgtaacgtgaagaagctgatcaacgagaaaaaggaggatggcaaggtgttttggcagaatctggctggctacaagagacaggaagccctgagaccatacctgagcagcgaggaagatcggaagaagggaaagaaattcgctcggtaccagctgggcgacctgctgctgcacctggaaaagaagcacggcgaggactggggaaaggtgtacgacgaggcctgggagcggattgacaagaaagtggaaggcctgagcaagcacatcaagctggaagaggaacggagaagcgaggacgcccagagcaaggccgccctgaccgactggctgcgggctaaggccagcttcgtgatcgagggcctgaaggaggccgacaaggacgagttctgcagatgcgagctgaagctgcagaagtggtacggggacctgcggggaaagcccttcgccatcgaagccgagaacagcatcctggacatcagcggcttcagcaagcagtacaactgtgccttcatctggcagaaggacggcgtgaagaagctgaacctgtacctgatcatcaactacttcaagggcggcaagctgcggttcaagaagatcaaacctgaagccttcgaagccaacagattctacaccgtgatcaacaaaaagagcggcgagatcgtgcccatggaggtgaacttcaacttcgacgaccccaacctgatcatcctgcctctggcctttggcaagagacagggcagagaattcatctggaacgacctgctgtccctggaaaccggcagcctgaagctggccaacggaagagtgatcgagaagacactgtacaacagaagaacccggcaggatgagcctgccctgttcgtggccctgaccttcgagcggcgggaggtcctggactcctccaatatcaaaccaatgaacctgatcggcgtggcaagaggcgaaaacatccccgccgtgatcgccctgaccgaccccgagggctgcccactgagccggtttaaggatagcctgggaaacccaacccacatcctgagaatcggcgagagctataaggagaagcagcggaccatccaggccaagaaggaggtggagcagcggagagccggcggctacagccggaagtacgccagcaaagccaagaatctggcagacgatatggtgagaaacaccgctagagatctgctgtactacgccgtgacccaggatgccatgctgatcttcgccaacctgagccggggcttcggccggcagggcaagcggaccttcatggccgagagacagtacacacggatggaggactggctgaccgccaagctggcctacgagggcctgagcaagacctacctgtccaagacactggcccagtacacctccaagacatgcagcaactgtgggtttaccatcaccagcgccgactacgacagggtgctggagaagctgaagaagacagcaacaggctggatgaccacaattaacggcaaggagctgaaggtggagggccagattacctactacaacagatacaagagacagaacgtagtcaaggacctgtccgtcgagctggatagactgagcgaagaatctgtgaacaacgacatctcctcctggacaaagggcagaagcggagaagctctgagcctcctgaagaaaagattctcccatagacccgtgcaggagaagttcgtgtgcctgaactgcggcttcgagacacacgcagccgagcaagccgccctgaacatcgccagatcctggctgttcctgcggagccaggagtacaagaaataccagacaaacaagacaaccggcaacaccgataagagagccttcgtcgagacctggcagtccttttaccggaagaagcttaaggaggtgtggaaacctgccgtgcggtctggcggatctggcggaggctccacaagcatgcccctgaaggccaggtaccaggagatggtgaccttcgaggacgtggccgtgcacttcaccaagaccgagtggaccggcctgagccccgcccagagggccctgtacaggagcgtgatgctggagaacttcggcaacctgaccgccctgggctaccccgtgcccaagcccgccctgatcagcctgctggagggcggcgacatggactggggcctggaggcccaggacgacccccccgccgagaccagccccaagaaaaagagaaaagtctaagctgccttctgcggggcttgccttctggccatgcccttcttctctcccttgcacctgtacctcttggtctttgaataaagcctgagtaggaaggctagcaaaaaaaaaaaaaaaaaaaaaaaaaaaaaaaaaaaaaaaaaaaaaaaaaaaaaaaaaaaaaaaaaaaaaaaaaaaaaaaa

SEQ ID NO: 7046 - RNA, 5797 nt, synthetic construct
  source 1..5797: mol_type = other RNA
aggaaataagagagaaaagaagagtaagaagaaatataagagccaccatggcccctaagaagaagcgtaaagtgagccggatggaacgcctcgtctacgaggtgcggcagaagtgcagaaacatcgaggacatctgcatctcctgcggatctctgaacgtgaccctggagcacccactgttcatcggcggcatgtgccagaactgtaaaaactgttttctggagtgtgcctatcaatacgacgatgacggctaccagagctactgcaccatctgttgcggcggaagagaggtgctgatgtgtggaaataacaactgctgccggtgcttctgcgtggaatgcgtggacctgctggtgggccccggcgccgcccaggccgctattaaggaagatccttggaactgctacatgtgcggccacaagggcacatacggcctgctgagacggagagaggactggcctagcagactgcagatgttcttcgccaataaccacgaccaggagttcgacccccctaaggtgtaccctcccgtccccgccgagaagagaaagcccatccgggtcctgagcctgttcgatggcatcgccaccggtctgctggtgctgaaggacctgggcatccaggtggataggtacattgcctccgaggtgtgcgaggactccatcaccgtgggaatggtgcgtcatcagggcaagatcatgtacgtgggcgacgtgcggagcgtgacacagaagcatatccaggagtggggccctttcgacctggtgatcggcggcagcccttgcaatgacctgagcatcgtgaacccagcccggaagggcctgtacgagggaaccggcagactgttcttcgagttttacagactgctgcacgacgcccggcctaaggaaggcgacgaccggcccttcttttggctgttcgagaatgtggtggccatgggagtcagcgacaagcgggatattagccggttcctggagagcaaccccgtgatgatcgatgccaaggaagtgagcgccgcccaccgggccagatacttctggggcaatctgcctggcatgaacagacccctggccagcaccgtgaacgacaagctggagctgcaggagtgcctggagcacggccggatcgccaagttcagcaaggtgagaaccatcaccacccgaagcaacagcatcaaacaaggcaaggaccagcactttcctgtgttcatgaacgagaaggaggacatcctgtggtgtaccgagatggagagagtgttcgggttcccagtccactacacagatgtcagcaacatgtctagactggccagacagagactgctgggaagaagctggtccgtccctgtgatcagacacctgttcgcccctctgaaggagtacttcgcctgcgtgagcagcggcaacagcaacgccaacagccggggccccagcttctctagcggcctggtgccactgtccctgagagggagccacatgggccccatggagatctacaaaaccgtgagcgcctggaagcggcagcctgtgcgcgtgctgagcctgtttcggaatatcgataaagtcctgaaaagcctgggattcctggagagcggctctggctccggcggtggcaccctgaagtacgtggaggatgtgacaaacgtggtcagacgggatgtggagaagtggggccccttcgatctggtgtacggcagcacccaacccctgggcagctcttgtgaccggtgccctggctggtacatgtttcagttccaccggatcctgcagtacgccctgccgagacaggagtcccagcggccattcttttggattttcatggacaacttgctgctgaccgaggatgaccaggaaactaccactcggttcctgcagaccgaagccgtgaccctgcaggacgtgagaggccgggactaccagaacgccatgcgggtgtggtccaacatccctggactgaaaagcaagcacgcacctctgacccctaaagaagaggagtacctgcaggcccaggtgcggagcagaagcaagctggacgcccctaaggtggatctgctggtgaagaattgcctcctgcccctgagagagtacttcaagtatttcagccagaatagtctgcccctgggcggcccaagcagcggcgcccctcctcccagcggcggcagcccagccggctccccaacctctaccgaggagggcacctctgagtccgccacccccgagagcggccctggcacctccaccgagcccagcgagggcagcgcacccggcagccctgccggcagccccacctccacagaggagggaaccagcaccgagcccagcgaaggcagcgccccaggcaccagcaccgagcctagtgagggcggctctggcggcggcagcgcccaggagattaaacggatcaacaagatcagaagaagacttgtgaaagacagcaacaccaagaaggccggcaagacaggccccatgaaaaccctgctggttagagtgatgacacccgatctgagagagcggctggaaaacctgagaaagaagcctgaaaatatcccccagcccatcagcaatacatctagagccaacctgaataagctgctgaccgattacaccgaaatgaagaaggcgatcctgcatgtgtactgggaagagttccagaaggaccctgtgggcctgatgagccgggtggcccagcctgccagcaagaagatcgatcagaacaagctgaaacctgagatggacgagaagggcaacctgaccaccgccggctttgcctgctctcagtgtggccagcccctgttcgtgtacaagctggagcaggtgtctgagaagggcaaggcttacaccaactacttcggacggtgcaatgtggccgagcacgaaaagctgatcctgctggcccagctgaagcccgagaaggatagcgacgaagccgtgacatatagcctgggaaagtttgggcagagggccctggatttctacagcattcatgtgaccaaggagtccacccaccccgtgaagcccctggcccagatcgccggaaacagatacgcctccggacctgtgggaaaggccctgagcgacgcatgtatgggcacaatcgcctccttcctgtctaagtaccaggacatcatcatcgaacaccagaaggtggtgaagggcaaccagaagagactggagagcctgcgggagctggccggcaaggaaaacctggaataccctagcgtgaccctgccacctcagcctcacaccaaggagggcgttgatgcctacaacgaagtgatcgcccgggtgcgaatgtgggtgaacctgaacctgtggcagaagctgaagctaagcagagatgatgccaagcctctgctgagactgaagggattcccttcctttcctctggtcgagagacaggccaacgaagtggactggtgggacatggtgtgtaacgtgaagaagctgatcaacgagaaaaaggaggatggcaaggtgttttggcagaatctggctggctacaagagacaggaagccctgagaccatacctgagcagcgaggaagatcggaagaagggaaagaaattcgctcggtaccagctgggcgacctgctgctgcacctggaaaagaagcacggcgaggactggggaaaggtgtacgacgaggcctgggagcggattgacaagaaagtggaaggcctgagcaagcacatcaagctggaagaggaacggagaagcgaggacgcccagagcaaggccgccctgaccgactggctgcgggctaaggccagcttcgtgatcgagggcctgaaggaggccgacaaggacgagttctgcagatgcgagctgaagctgcagaagtggtacggggacctgcggggaaagcccttcgccatcgaagccgagaacagcatcctggacatcagcggcttcagcaagcagtacaactgtgccttcatctggcagaaggacggcgtgaagaagctgaacctgtacctgatcatcaactacttcaagggcggcaagctgcggttcaagaagatcaaacctgaagccttcgaagccaacagattctacaccgtgatcaacaaaaagagcggcgagatcgtgcccatggaggtgaacttcaacttcgacgaccccaacctgatcatcctgcctctggcctttggcaagagacagggcagagaattcatctggaacgacctgctgtccctggaaaccggcagcctgaagctggccaacggaagagtgatcgagaagacactgtacaacagaagaacccggcaggatgagcctgccctgttcgtggccctgaccttcgagcggcgggaggtcctggactcctccaatatcaaaccaatgaacctgatcggcgtggcaagaggcgaaaacatccccgccgtgatcgccctgaccgaccccgagggctgcccactgagccggtttaaggatagcctgggaaacccaacccacatcctgagaatcggcgagagctataaggagaagcagcggaccatccaggccaagaaggaggtggagcagcggagagccggcggctacagccggaagtacgccagcaaagccaagaatctggcagacgatatggtgagaaacaccgctagagatctgctgtactacgccgtgacccaggatgccatgctgatcttcgccaacctgagccggggcttcggccggcagggcaagcggaccttcatggccgagagacagtacacacggatggaggactggctgaccgccaagctggcctacgagggcctgagcaagacctacctgtccaagacactggcccagtacacctccaagacatgcagcaactgtgggtttaccatcaccagcgccgactacgacagggtgctggagaagctgaagaagacagcaacaggctggatgaccacaattaacggcaaggagctgaaggtggagggccagattacctactacaacagatacaagagacagaacgtagtcaaggacctgtccgtcgagctggatagactgagcgaagaatctgtgaacaacgacatctcctcctggacaaagggcagaagcggagaagctctgagcctcctgaagaaaagattctcccatagacccgtgcaggagaagttcgtgtgcctgaactgcggcttcgagacacacgcagccgagcaagccgccctgaacatcgccagatcctggctgttcctgcggagccaggagtacaagaaataccagacaaacaagacaaccggcaacaccgataagagagccttcgtcgagacctggcagtccttttaccggaagaagcttaaggaggtgtggaaacctgccgtgcggtctggcggatctggcggaggctccacaagcgagctggtgaccttcagggacgtggtgatcagcttcagccaggaggagtgggagtacctggacagcgcccagagggacctgtactgggacgtgatgatggagaactacagcaacctggtgagcctggacctggagagcaagtacgacaagaagaccctgagcaccgagaaggacatcatcgagaagaacgacagccagtgggaggtgatcgagagcagcaagctggtgggcctggccaacagcaccagccccaagaaaaagagaaaagtctaagctgccttctgcggggcttgccttctggccatgcccttcttctctcccttgcacctgtacctcttggtctttgaataaagcctgagtaggaaggctagcaaaaaaaaaaaaaaaaaaaaaaaaaaaaaaaaaaaaaaaaaaaaaaaaaaaaaaaaaaaaaaaaaaaaaaaaaaaaaaaa

SEQ ID NO: 7047 - RNA, 5797 nt, synthetic construct
  source 1..5797: mol_type = other RNA
aggaaataagagagaaaagaagagtaagaagaaatataagagccaccatggcccctaagaagaagcgtaaagtgagccggatggaacgcctcgtctacgaggtgcggcagaagtgcagaaacatcgaggacatctgcatctcctgcggatctctgaacgtgaccctggagcacccactgttcatcggcggcatgtgccagaactgtaaaaactgttttctggagtgtgcctatcaatacgacgatgacggctaccagagctactgcaccatctgttgcggcggaagagaggtgctgatgtgtggaaataacaactgctgccggtgcttctgcgtggaatgcgtggacctgctggtgggccccggcgccgcccaggccgctattaaggaagatccttggaactgctacatgtgcggccacaagggcacatacggcctgctgagacggagagaggactggcctagcagactgcagatgttcttcgccaataaccacgaccaggagttcgacccccctaaggtgtaccctcccgtccccgccgagaagagaaagcccatccgggtcctgagcctgttcgatggcatcgccaccggtctgctggtgctgaaggacctgggcatccaggtggataggtacattgcctccgaggtgtgcgaggactccatcaccgtgggaatggtgcgtcatcagggcaagatcatgtacgtgggcgacgtgcggagcgtgacacagaagcatatccaggagtggggccctttcgacctggtgatcggcggcagcccttgcaatgacctgagcatcgtgaacccagcccggaagggcctgtacgagggaaccggcagactgttcttcgagttttacagactgctgcacgacgcccggcctaaggaaggcgacgaccggcccttcttttggctgttcgagaatgtggtggccatgggagtcagcgacaagcgggatattagccggttcctggagagcaaccccgtgatgatcgatgccaaggaagtgagcgccgcccaccgggccagatacttctggggcaatctgcctggcatgaacagacccctggccagcaccgtgaacgacaagctggagctgcaggagtgcctggagcacggccggatcgccaagttcagcaaggtgagaaccatcaccacccgaagcaacagcatcaaacaaggcaaggaccagcactttcctgtgttcatgaacgagaaggaggacatcctgtggtgtaccgagatggagagagtgttcgggttcccagtccactacacagatgtcagcaacatgtctagactggccagacagagactgctgggaagaagctggtccgtccctgtgatcagacacctgttcgcccctctgaaggagtacttcgcctgcgtgagcagcggcaacagcaacgccaacagccggggccccagcttctctagcggcctggtgccactgtccctgagagggagccacatgggccccatggagatctacaaaaccgtgagcgcctggaagcggcagcctgtgcgcgtgctgagcctgtttcggaatatcgataaagtcctgaaaagcctgggattcctggagagcggctctggctccggcggtggcaccctgaagtacgtggaggatgtgacaaacgtggtcagacgggatgtggagaagtggggccccttcgatctggtgtacggcagcacccaacccctgggcagctcttgtgaccggtgccctggctggtacatgtttcagttccaccggatcctgcagtacgccctgccgagacaggagtcccagcggccattcttttggattttcatggacaacttgctgctgaccgaggatgaccaggaaactaccactcggttcctgcagaccgaagccgtgaccctgcaggacgtgagaggccgggactaccagaacgccatgcgggtgtggtccaacatccctggactgaaaagcaagcacgcacctctgacccctaaagaagaggagtacctgcaggcccaggtgcggagcagaagcaagctggacgcccctaaggtggatctgctggtgaagaattgcctcctgcccctgagagagtacttcaagtatttcagccagaatagtctgcccctgggcggcccaagcagcggcgcccctcctcccagcggcggcagcccagccggctccccaacctctaccgaggagggcacctctgagtccgccacccccgagagcggccctggcacctccaccgagcccagcgagggcagcgcacccggcagccctgccggcagccccacctccacagaggagggaaccagcaccgagcccagcgaaggcagcgccccaggcaccagcaccgagcctagtgagggcggctctggcggcggcagcgcccaggagattaaacggatcaacaagatcagaagaagacttgtgaaagacagcaacaccaagaaggccggcaagacaggccccatgaaaaccctgctggttagagtgatgacacccgatctgagagagcggctggaaaacctgagaaagaagcctgaaaatatcccccagcccatcagcaatacatctagagccaacctgaataagctgctgaccgattacaccgaaatgaagaaggcgatcctgcatgtgtactgggaagagttccagaaggaccctgtgggcctgatgagccgggtggcccagcctgccagcaagaagatcgatcagaacaagctgaaacctgagatggacgagaagggcaacctgaccaccgccggctttgcctgctctcagtgtggccagcccctgttcgtgtacaagctggagcaggtgtctgagaagggcaaggcttacaccaactacttcggacggtgcaatgtggccgagcacgaaaagctgatcctgctggcccagctgaagcccgagaaggatagcgacgaagccgtgacatatagcctgggaaagtttgggcagagggccctggatttctacagcattcatgtgaccaaggagtccacccaccccgtgaagcccctggcccagatcgccggaaacagatacgcctccggacctgtgggaaaggccctgagcgacgcatgtatgggcacaatcgcctccttcctgtctaagtaccaggacatcatcatcgaacaccagaaggtggtgaagggcaaccagaagagactggagagcctgcgggagctggccggcaaggaaaacctggaataccctagcgtgaccctgccacctcagcctcacaccaaggagggcgttgatgcctacaacgaagtgatcgcccgggtgcgaatgtgggtgaacctgaacctgtggcagaagctgaagctaagcagagatgatgccaagcctctgctgagactgaagggattcccttcctttcctctggtcgagagacaggccaacgaagtggactggtgggacatggtgtgtaacgtgaagaagctgatcaacgagaaaaaggaggatggcaaggtgttttggcagaatctggctggctacaagagacaggaagccctgagaccatacctgagcagcgaggaagatcggaagaagggaaagaaattcgctcggtaccagctgggcgacctgctgctgcacctggaaaagaagcacggcgaggactggggaaaggtgtacgacgaggcctgggagcggattgacaagaaagtggaaggcctgagcaagcacatcaagctggaagaggaacggagaagcgaggacgcccagagcaaggccgccctgaccgactggctgcgggctaaggccagcttcgtgatcgagggcctgaaggaggccgacaaggacgagttctgcagatgcgagctgaagctgcagaagtggtacggggacctgcggggaaagcccttcgccatcgaagccgagaacagcatcctggacatcagcggcttcagcaagcagtacaactgtgccttcatctggcagaaggacggcgtgaagaagctgaacctgtacctgatcatcaactacttcaagggcggcaagctgcggttcaagaagatcaaacctgaagccttcgaagccaacagattctacaccgtgatcaacaaaaagagcggcgagatcgtgcccatggaggtgaacttcaacttcgacgaccccaacctgatcatcctgcctctggcctttggcaagagacagggcagagaattcatctggaacgacctgctgtccctggaaaccggcagcctgaagctggccaacggaagagtgatcgagaagacactgtacaacagaagaacccggcaggatgagcctgccctgttcgtggccctgaccttcgagcggcgggaggtcctggactcctccaatatcaaaccaatgaacctgatcggcgtggcaagaggcgaaaacatccccgccgtgatcgccctgaccgaccccgagggctgcccactgagccggtttaaggatagcctgggaaacccaacccacatcctgagaatcggcgagagctataaggagaagcagcggaccatccaggccaagaaggaggtggagcagcggagagccggcggctacagccggaagtacgccagcaaagccaagaatctggcagacgatatggtgagaaacaccgctagagatctgctgtactacgccgtgacccaggatgccatgctgatcttcgccaacctgagccggggcttcggccggcagggcaagcggaccttcatggccgagagacagtacacacggatggaggactggctgaccgccaagctggcctacgagggcctgagcaagacctacctgtccaagacactggcccagtacacctccaagacatgcagcaactgtgggtttaccatcaccagcgccgactacgacagggtgctggagaagctgaagaagacagcaacaggctggatgaccacaattaacggcaaggagctgaaggtggagggccagattacctactacaacagatacaagagacagaacgtagtcaaggacctgtccgtcgagctggatagactgagcgaagaatctgtgaacaacgacatctcctcctggacaaagggcagaagcggagaagctctgagcctcctgaagaaaagattctcccatagacccgtgcaggagaagttcgtgtgcctgaactgcggcttcgagacacacgcagccgagcaagccgccctgaacatcgccagatcctggctgttcctgcggagccaggagtacaagaaataccagacaaacaagacaaccggcaacaccgataagagagccttcgtcgagacctggcagtccttttaccggaagaagcttaaggaggtgtggaaacctgccgtgcggtctggcggatctggcggaggctccacaagcgcctgcgagagcatcaccttcggcgacgtggccatcgacttcagccaccaggagtgggagtacctgaacctggtgcagaagaccctgtaccaggaggtgatgatggagaactacgacaacctggtgagcctgggccacagcatcagcaagcccgacctgatcaccctgctggagcagggcaaggagccctggatgatcgtgggcgaggagaccaggggcgagtgcaccgacctggacagcaggaccagccccaagaaaaagagaaaagtctaagctgccttctgcggggcttgccttctggccatgcccttcttctctcccttgcacctgtacctcttggtctttgaataaagcctgagtaggaaggctagcaaaaaaaaaaaaaaaaaaaaaaaaaaaaaaaaaaaaaaaaaaaaaaaaaaaaaaaaaaaaaaaaaaaaaaaaaaaaaaaa

SEQ ID NO: 7048 - RNA, 5794 nt, synthetic construct
  source 1..5794: mol_type = other RNA
aggaaataagagagaaaagaagagtaagaagaaatataagagccaccatggcccctaagaagaagcgtaaagtgagccggatggaacgcctcgtctacgaggtgcggcagaagtgcagaaacatcgaggacatctgcatctcctgcggatctctgaacgtgaccctggagcacccactgttcatcggcggcatgtgccagaactgtaaaaactgttttctggagtgtgcctatcaatacgacgatgacggctaccagagctactgcaccatctgttgcggcggaagagaggtgctgatgtgtggaaataacaactgctgccggtgcttctgcgtggaatgcgtggacctgctggtgggccccggcgccgcccaggccgctattaaggaagatccttggaactgctacatgtgcggccacaagggcacatacggcctgctgagacggagagaggactggcctagcagactgcagatgttcttcgccaataaccacgaccaggagttcgacccccctaaggtgtaccctcccgtccccgccgagaagagaaagcccatccgggtcctgagcctgttcgatggcatcgccaccggtctgctggtgctgaaggacctgggcatccaggtggataggtacattgcctccgaggtgtgcgaggactccatcaccgtgggaatggtgcgtcatcagggcaagatcatgtacgtgggcgacgtgcggagcgtgacacagaagcatatccaggagtggggccctttcgacctggtgatcggcggcagcccttgcaatgacctgagcatcgtgaacccagcccggaagggcctgtacgagggaaccggcagactgttcttcgagttttacagactgctgcacgacgcccggcctaaggaaggcgacgaccggcccttcttttggctgttcgagaatgtggtggccatgggagtcagcgacaagcgggatattagccggttcctggagagcaaccccgtgatgatcgatgccaaggaagtgagcgccgcccaccgggccagatacttctggggcaatctgcctggcatgaacagacccctggccagcaccgtgaacgacaagctggagctgcaggagtgcctggagcacggccggatcgccaagttcagcaaggtgagaaccatcaccacccgaagcaacagcatcaaacaaggcaaggaccagcactttcctgtgttcatgaacgagaaggaggacatcctgtggtgtaccgagatggagagagtgttcgggttcccagtccactacacagatgtcagcaacatgtctagactggccagacagagactgctgggaagaagctggtccgtccctgtgatcagacacctgttcgcccctctgaaggagtacttcgcctgcgtgagcagcggcaacagcaacgccaacagccggggccccagcttctctagcggcctggtgccactgtccctgagagggagccacatgggccccatggagatctacaaaaccgtgagcgcctggaagcggcagcctgtgcgcgtgctgagcctgtttcggaatatcgataaagtcctgaaaagcctgggattcctggagagcggctctggctccggcggtggcaccctgaagtacgtggaggatgtgacaaacgtggtcagacgggatgtggagaagtggggccccttcgatctggtgtacggcagcacccaacccctgggcagctcttgtgaccggtgccctggctggtacatgtttcagttccaccggatcctgcagtacgccctgccgagacaggagtcccagcggccattcttttggattttcatggacaacttgctgctgaccgaggatgaccaggaaactaccactcggttcctgcagaccgaagccgtgaccctgcaggacgtgagaggccgggactaccagaacgccatgcgggtgtggtccaacatccctggactgaaaagcaagcacgcacctctgacccctaaagaagaggagtacctgcaggcccaggtgcggagcagaagcaagctggacgcccctaaggtggatctgctggtgaagaattgcctcctgcccctgagagagtacttcaagtatttcagccagaatagtctgcccctgggcggcccaagcagcggcgcccctcctcccagcggcggcagcccagccggctccccaacctctaccgaggagggcacctctgagtccgccacccccgagagcggccctggcacctccaccgagcccagcgagggcagcgcacccggcagccctgccggcagccccacctccacagaggagggaaccagcaccgagcccagcgaaggcagcgccccaggcaccagcaccgagcctagtgagggcggctctggcggcggcagcgcccaggagattaaacggatcaacaagatcagaagaagacttgtgaaagacagcaacaccaagaaggccggcaagacaggccccatgaaaaccctgctggttagagtgatgacacccgatctgagagagcggctggaaaacctgagaaagaagcctgaaaatatcccccagcccatcagcaatacatctagagccaacctgaataagctgctgaccgattacaccgaaatgaagaaggcgatcctgcatgtgtactgggaagagttccagaaggaccctgtgggcctgatgagccgggtggcccagcctgccagcaagaagatcgatcagaacaagctgaaacctgagatggacgagaagggcaacctgaccaccgccggctttgcctgctctcagtgtggccagcccctgttcgtgtacaagctggagcaggtgtctgagaagggcaaggcttacaccaactacttcggacggtgcaatgtggccgagcacgaaaagctgatcctgctggcccagctgaagcccgagaaggatagcgacgaagccgtgacatatagcctgggaaagtttgggcagagggccctggatttctacagcattcatgtgaccaaggagtccacccaccccgtgaagcccctggcccagatcgccggaaacagatacgcctccggacctgtgggaaaggccctgagcgacgcatgtatgggcacaatcgcctccttcctgtctaagtaccaggacatcatcatcgaacaccagaaggtggtgaagggcaaccagaagagactggagagcctgcgggagctggccggcaaggaaaacctggaataccctagcgtgaccctgccacctcagcctcacaccaaggagggcgttgatgcctacaacgaagtgatcgcccgggtgcgaatgtgggtgaacctgaacctgtggcagaagctgaagctaagcagagatgatgccaagcctctgctgagactgaagggattcccttcctttcctctggtcgagagacaggccaacgaagtggactggtgggacatggtgtgtaacgtgaagaagctgatcaacgagaaaaaggaggatggcaaggtgttttggcagaatctggctggctacaagagacaggaagccctgagaccatacctgagcagcgaggaagatcggaagaagggaaagaaattcgctcggtaccagctgggcgacctgctgctgcacctggaaaagaagcacggcgaggactggggaaaggtgtacgacgaggcctgggagcggattgacaagaaagtggaaggcctgagcaagcacatcaagctggaagaggaacggagaagcgaggacgcccagagcaaggccgccctgaccgactggctgcgggctaaggccagcttcgtgatcgagggcctgaaggaggccgacaaggacgagttctgcagatgcgagctgaagctgcagaagtggtacggggacctgcggggaaagcccttcgccatcgaagccgagaacagcatcctggacatcagcggcttcagcaagcagtacaactgtgccttcatctggcagaaggacggcgtgaagaagctgaacctgtacctgatcatcaactacttcaagggcggcaagctgcggttcaagaagatcaaacctgaagccttcgaagccaacagattctacaccgtgatcaacaaaaagagcggcgagatcgtgcccatggaggtgaacttcaacttcgacgaccccaacctgatcatcctgcctctggcctttggcaagagacagggcagagaattcatctggaacgacctgctgtccctggaaaccggcagcctgaagctggccaacggaagagtgatcgagaagacactgtacaacagaagaacccggcaggatgagcctgccctgttcgtggccctgaccttcgagcggcgggaggtcctggactcctccaatatcaaaccaatgaacctgatcggcgtggcaagaggcgaaaacatccccgccgtgatcgccctgaccgaccccgagggctgcccactgagccggtttaaggatagcctgggaaacccaacccacatcctgagaatcggcgagagctataaggagaagcagcggaccatccaggccaagaaggaggtggagcagcggagagccggcggctacagccggaagtacgccagcaaagccaagaatctggcagacgatatggtgagaaacaccgctagagatctgctgtactacgccgtgacccaggatgccatgctgatcttcgccaacctgagccggggcttcggccggcagggcaagcggaccttcatggccgagagacagtacacacggatggaggactggctgaccgccaagctggcctacgagggcctgagcaagacctacctgtccaagacactggcccagtacacctccaagacatgcagcaactgtgggtttaccatcaccagcgccgactacgacagggtgctggagaagctgaagaagacagcaacaggctggatgaccacaattaacggcaaggagctgaaggtggagggccagattacctactacaacagatacaagagacagaacgtagtcaaggacctgtccgtcgagctggatagactgagcgaagaatctgtgaacaacgacatctcctcctggacaaagggcagaagcggagaagctctgagcctcctgaagaaaagattctcccatagacccgtgcaggagaagttcgtgtgcctgaactgcggcttcgagacacacgcagccgagcaagccgccctgaacatcgccagatcctggctgttcctgcggagccaggagtacaagaaataccagacaaacaagacaaccggcaacaccgataagagagccttcgtcgagacctggcagtccttttaccggaagaagcttaaggaggtgtggaaacctgccgtgcggtctggcggatctggcggaggctccacaagcctgcagggcctgctgaccttcggcgacgtggccatcgagttcagccaggaggagtggaggtgcctgagccacacccagagggagctgtacagggacgtgatgctggagaactacggccacctgctgttcctgggcctgaccgtgagcaagcccgacctggtgagcttcctggagcagaggaaggagccctgggacgagaagaggaacaagaccgccggcttcgacgccagcaggtgggagaccagccccaagaaaaagagaaaagtctaagctgccttctgcggggcttgccttctggccatgcccttcttctctcccttgcacctgtacctcttggtctttgaataaagcctgagtaggaaggctagcaaaaaaaaaaaaaaaaaaaaaaaaaaaaaaaaaaaaaaaaaaaaaaaaaaaaaaaaaaaaaaaaaaaaaaaaaaaaaaaa

SEQ ID NO: 7049 - RNA, 5797 nt, synthetic construct
  source 1..5797: mol_type = other RNA
aggaaataagagagaaaagaagagtaagaagaaatataagagccaccatggcccctaagaagaagcgtaaagtgagccggatggaacgcctcgtctacgaggtgcggcagaagtgcagaaacatcgaggacatctgcatctcctgcggatctctgaacgtgaccctggagcacccactgttcatcggcggcatgtgccagaactgtaaaaactgttttctggagtgtgcctatcaatacgacgatgacggctaccagagctactgcaccatctgttgcggcggaagagaggtgctgatgtgtggaaataacaactgctgccggtgcttctgcgtggaatgcgtggacctgctggtgggccccggcgccgcccaggccgctattaaggaagatccttggaactgctacatgtgcggccacaagggcacatacggcctgctgagacggagagaggactggcctagcagactgcagatgttcttcgccaataaccacgaccaggagttcgacccccctaaggtgtaccctcccgtccccgccgagaagagaaagcccatccgggtcctgagcctgttcgatggcatcgccaccggtctgctggtgctgaaggacctgggcatccaggtggataggtacattgcctccgaggtgtgcgaggactccatcaccgtgggaatggtgcgtcatcagggcaagatcatgtacgtgggcgacgtgcggagcgtgacacagaagcatatccaggagtggggccctttcgacctggtgatcggcggcagcccttgcaatgacctgagcatcgtgaacccagcccggaagggcctgtacgagggaaccggcagactgttcttcgagttttacagactgctgcacgacgcccggcctaaggaaggcgacgaccggcccttcttttggctgttcgagaatgtggtggccatgggagtcagcgacaagcgggatattagccggttcctggagagcaaccccgtgatgatcgatgccaaggaagtgagcgccgcccaccgggccagatacttctggggcaatctgcctggcatgaacagacccctggccagcaccgtgaacgacaagctggagctgcaggagtgcctggagcacggccggatcgccaagttcagcaaggtgagaaccatcaccacccgaagcaacagcatcaaacaaggcaaggaccagcactttcctgtgttcatgaacgagaaggaggacatcctgtggtgtaccgagatggagagagtgttcgggttcccagtccactacacagatgtcagcaacatgtctagactggccagacagagactgctgggaagaagctggtccgtccctgtgatcagacacctgttcgcccctctgaaggagtacttcgcctgcgtgagcagcggcaacagcaacgccaacagccggggccccagcttctctagcggcctggtgccactgtccctgagagggagccacatgggccccatggagatctacaaaaccgtgagcgcctggaagcggcagcctgtgcgcgtgctgagcctgtttcggaatatcgataaagtcctgaaaagcctgggattcctggagagcggctctggctccggcggtggcaccctgaagtacgtggaggatgtgacaaacgtggtcagacgggatgtggagaagtggggccccttcgatctggtgtacggcagcacccaacccctgggcagctcttgtgaccggtgccctggctggtacatgtttcagttccaccggatcctgcagtacgccctgccgagacaggagtcccagcggccattcttttggattttcatggacaacttgctgctgaccgaggatgaccaggaaactaccactcggttcctgcagaccgaagccgtgaccctgcaggacgtgagaggccgggactaccagaacgccatgcgggtgtggtccaacatccctggactgaaaagcaagcacgcacctctgacccctaaagaagaggagtacctgcaggcccaggtgcggagcagaagcaagctggacgcccctaaggtggatctgctggtgaagaattgcctcctgcccctgagagagtacttcaagtatttcagccagaatagtctgcccctgggcggcccaagcagcggcgcccctcctcccagcggcggcagcccagccggctccccaacctctaccgaggagggcacctctgagtccgccacccccgagagcggccctggcacctccaccgagcccagcgagggcagcgcacccggcagccctgccggcagccccacctccacagaggagggaaccagcaccgagcccagcgaaggcagcgccccaggcaccagcaccgagcctagtgagggcggctctggcggcggcagcgcccaggagattaaacggatcaacaagatcagaagaagacttgtgaaagacagcaacaccaagaaggccggcaagacaggccccatgaaaaccctgctggttagagtgatgacacccgatctgagagagcggctggaaaacctgagaaagaagcctgaaaatatcccccagcccatcagcaatacatctagagccaacctgaataagctgctgaccgattacaccgaaatgaagaaggcgatcctgcatgtgtactgggaagagttccagaaggaccctgtgggcctgatgagccgggtggcccagcctgccagcaagaagatcgatcagaacaagctgaaacctgagatggacgagaagggcaacctgaccaccgccggctttgcctgctctcagtgtggccagcccctgttcgtgtacaagctggagcaggtgtctgagaagggcaaggcttacaccaactacttcggacggtgcaatgtggccgagcacgaaaagctgatcctgctggcccagctgaagcccgagaaggatagcgacgaagccgtgacatatagcctgggaaagtttgggcagagggccctggatttctacagcattcatgtgaccaaggagtccacccaccccgtgaagcccctggcccagatcgccggaaacagatacgcctccggacctgtgggaaaggccctgagcgacgcatgtatgggcacaatcgcctccttcctgtctaagtaccaggacatcatcatcgaacaccagaaggtggtgaagggcaaccagaagagactggagagcctgcgggagctggccggcaaggaaaacctggaataccctagcgtgaccctgccacctcagcctcacaccaaggagggcgttgatgcctacaacgaagtgatcgcccgggtgcgaatgtgggtgaacctgaacctgtggcagaagctgaagctaagcagagatgatgccaagcctctgctgagactgaagggattcccttcctttcctctggtcgagagacaggccaacgaagtggactggtgggacatggtgtgtaacgtgaagaagctgatcaacgagaaaaaggaggatggcaaggtgttttggcagaatctggctggctacaagagacaggaagccctgagaccatacctgagcagcgaggaagatcggaagaagggaaagaaattcgctcggtaccagctgggcgacctgctgctgcacctggaaaagaagcacggcgaggactggggaaaggtgtacgacgaggcctgggagcggattgacaagaaagtggaaggcctgagcaagcacatcaagctggaagaggaacggagaagcgaggacgcccagagcaaggccgccctgaccgactggctgcgggctaaggccagcttcgtgatcgagggcctgaaggaggccgacaaggacgagttctgcagatgcgagctgaagctgcagaagtggtacggggacctgcggggaaagcccttcgccatcgaagccgagaacagcatcctggacatcagcggcttcagcaagcagtacaactgtgccttcatctggcagaaggacggcgtgaagaagctgaacctgtacctgatcatcaactacttcaagggcggcaagctgcggttcaagaagatcaaacctgaagccttcgaagccaacagattctacaccgtgatcaacaaaaagagcggcgagatcgtgcccatggaggtgaacttcaacttcgacgaccccaacctgatcatcctgcctctggcctttggcaagagacagggcagagaattcatctggaacgacctgctgtccctggaaaccggcagcctgaagctggccaacggaagagtgatcgagaagacactgtacaacagaagaacccggcaggatgagcctgccctgttcgtggccctgaccttcgagcggcgggaggtcctggactcctccaatatcaaaccaatgaacctgatcggcgtggcaagaggcgaaaacatccccgccgtgatcgccctgaccgaccccgagggctgcccactgagccggtttaaggatagcctgggaaacccaacccacatcctgagaatcggcgagagctataaggagaagcagcggaccatccaggccaagaaggaggtggagcagcggagagccggcggctacagccggaagtacgccagcaaagccaagaatctggcagacgatatggtgagaaacaccgctagagatctgctgtactacgccgtgacccaggatgccatgctgatcttcgccaacctgagccggggcttcggccggcagggcaagcggaccttcatggccgagagacagtacacacggatggaggactggctgaccgccaagctggcctacgagggcctgagcaagacctacctgtccaagacactggcccagtacacctccaagacatgcagcaactgtgggtttaccatcaccagcgccgactacgacagggtgctggagaagctgaagaagacagcaacaggctggatgaccacaattaacggcaaggagctgaaggtggagggccagattacctactacaacagatacaagagacagaacgtagtcaaggacctgtccgtcgagctggatagactgagcgaagaatctgtgaacaacgacatctcctcctggacaaagggcagaagcggagaagctctgagcctcctgaagaaaagattctcccatagacccgtgcaggagaagttcgtgtgcctgaactgcggcttcgagacacacgcagccgagcaagccgccctgaacatcgccagatcctggctgttcctgcggagccaggagtacaagaaataccagacaaacaagacaaccggcaacaccgataagagagccttcgtcgagacctggcagtccttttaccggaagaagcttaaggaggtgtggaaacctgccgtgcggtctggcggatctggcggaggctccacaagcgtgcacggcagcgtgaccttcagggacgtggccatcgacttcagccaggaggagtgggagtgcctgcagcccgaccagaggaacctgtacagggacgtgatgctggagaactacagccacctgatcagcctgggcagcagcatcagcaagcccgacgtgatcaccctgctggagcaggagaaggagccctggatcgtggtgaggaaggagaccagcaggtggtaccccgacctggagagcaagaccagccccaagaaaaagagaaaagtctaagctgccttctgcggggcttgccttctggccatgcccttcttctctcccttgcacctgtacctcttggtctttgaataaagcctgagtaggaaggctagcaaaaaaaaaaaaaaaaaaaaaaaaaaaaaaaaaaaaaaaaaaaaaaaaaaaaaaaaaaaaaaaaaaaaaaaaaaaaaaaa

SEQ ID NO: 7050 - RNA, 5797 nt, synthetic construct
  source 1..5797: mol_type = other RNA
aggaaataagagagaaaagaagagtaagaagaaatataagagccaccatggcccctaagaagaagcgtaaagtgagccggatggaacgcctcgtctacgaggtgcggcagaagtgcagaaacatcgaggacatctgcatctcctgcggatctctgaacgtgaccctggagcacccactgttcatcggcggcatgtgccagaactgtaaaaactgttttctggagtgtgcctatcaatacgacgatgacggctaccagagctactgcaccatctgttgcggcggaagagaggtgctgatgtgtggaaataacaactgctgccggtgcttctgcgtggaatgcgtggacctgctggtgggccccggcgccgcccaggccgctattaaggaagatccttggaactgctacatgtgcggccacaagggcacatacggcctgctgagacggagagaggactggcctagcagactgcagatgttcttcgccaataaccacgaccaggagttcgacccccctaaggtgtaccctcccgtccccgccgagaagagaaagcccatccgggtcctgagcctgttcgatggcatcgccaccggtctgctggtgctgaaggacctgggcatccaggtggataggtacattgcctccgaggtgtgcgaggactccatcaccgtgggaatggtgcgtcatcagggcaagatcatgtacgtgggcgacgtgcggagcgtgacacagaagcatatccaggagtggggccctttcgacctggtgatcggcggcagcccttgcaatgacctgagcatcgtgaacccagcccggaagggcctgtacgagggaaccggcagactgttcttcgagttttacagactgctgcacgacgcccggcctaaggaaggcgacgaccggcccttcttttggctgttcgagaatgtggtggccatgggagtcagcgacaagcgggatattagccggttcctggagagcaaccccgtgatgatcgatgccaaggaagtgagcgccgcccaccgggccagatacttctggggcaatctgcctggcatgaacagacccctggccagcaccgtgaacgacaagctggagctgcaggagtgcctggagcacggccggatcgccaagttcagcaaggtgagaaccatcaccacccgaagcaacagcatcaaacaaggcaaggaccagcactttcctgtgttcatgaacgagaaggaggacatcctgtggtgtaccgagatggagagagtgttcgggttcccagtccactacacagatgtcagcaacatgtctagactggccagacagagactgctgggaagaagctggtccgtccctgtgatcagacacctgttcgcccctctgaaggagtacttcgcctgcgtgagcagcggcaacagcaacgccaacagccggggccccagcttctctagcggcctggtgccactgtccctgagagggagccacatgggccccatggagatctacaaaaccgtgagcgcctggaagcggcagcctgtgcgcgtgctgagcctgtttcggaatatcgataaagtcctgaaaagcctgggattcctggagagcggctctggctccggcggtggcaccctgaagtacgtggaggatgtgacaaacgtggtcagacgggatgtggagaagtggggccccttcgatctggtgtacggcagcacccaacccctgggcagctcttgtgaccggtgccctggctggtacatgtttcagttccaccggatcctgcagtacgccctgccgagacaggagtcccagcggccattcttttggattttcatggacaacttgctgctgaccgaggatgaccaggaaactaccactcggttcctgcagaccgaagccgtgaccctgcaggacgtgagaggccgggactaccagaacgccatgcgggtgtggtccaacatccctggactgaaaagcaagcacgcacctctgacccctaaagaagaggagtacctgcaggcccaggtgcggagcagaagcaagctggacgcccctaaggtggatctgctggtgaagaattgcctcctgcccctgagagagtacttcaagtatttcagccagaatagtctgcccctgggcggcccaagcagcggcgcccctcctcccagcggcggcagcccagccggctccccaacctctaccgaggagggcacctctgagtccgccacccccgagagcggccctggcacctccaccgagcccagcgagggcagcgcacccggcagccctgccggcagccccacctccacagaggagggaaccagcaccgagcccagcgaaggcagcgccccaggcaccagcaccgagcctagtgagggcggctctggcggcggcagcgcccaggagattaaacggatcaacaagatcagaagaagacttgtgaaagacagcaacaccaagaaggccggcaagacaggccccatgaaaaccctgctggttagagtgatgacacccgatctgagagagcggctggaaaacctgagaaagaagcctgaaaatatcccccagcccatcagcaatacatctagagccaacctgaataagctgctgaccgattacaccgaaatgaagaaggcgatcctgcatgtgtactgggaagagttccagaaggaccctgtgggcctgatgagccgggtggcccagcctgccagcaagaagatcgatcagaacaagctgaaacctgagatggacgagaagggcaacctgaccaccgccggctttgcctgctctcagtgtggccagcccctgttcgtgtacaagctggagcaggtgtctgagaagggcaaggcttacaccaactacttcggacggtgcaatgtggccgagcacgaaaagctgatcctgctggcccagctgaagcccgagaaggatagcgacgaagccgtgacatatagcctgggaaagtttgggcagagggccctggatttctacagcattcatgtgaccaaggagtccacccaccccgtgaagcccctggcccagatcgccggaaacagatacgcctccggacctgtgggaaaggccctgagcgacgcatgtatgggcacaatcgcctccttcctgtctaagtaccaggacatcatcatcgaacaccagaaggtggtgaagggcaaccagaagagactggagagcctgcgggagctggccggcaaggaaaacctggaataccctagcgtgaccctgccacctcagcctcacaccaaggagggcgttgatgcctacaacgaagtgatcgcccgggtgcgaatgtgggtgaacctgaacctgtggcagaagctgaagctaagcagagatgatgccaagcctctgctgagactgaagggattcccttcctttcctctggtcgagagacaggccaacgaagtggactggtgggacatggtgtgtaacgtgaagaagctgatcaacgagaaaaaggaggatggcaaggtgttttggcagaatctggctggctacaagagacaggaagccctgagaccatacctgagcagcgaggaagatcggaagaagggaaagaaattcgctcggtaccagctgggcgacctgctgctgcacctggaaaagaagcacggcgaggactggggaaaggtgtacgacgaggcctgggagcggattgacaagaaagtggaaggcctgagcaagcacatcaagctggaagaggaacggagaagcgaggacgcccagagcaaggccgccctgaccgactggctgcgggctaaggccagcttcgtgatcgagggcctgaaggaggccgacaaggacgagttctgcagatgcgagctgaagctgcagaagtggtacggggacctgcggggaaagcccttcgccatcgaagccgagaacagcatcctggacatcagcggcttcagcaagcagtacaactgtgccttcatctggcagaaggacggcgtgaagaagctgaacctgtacctgatcatcaactacttcaagggcggcaagctgcggttcaagaagatcaaacctgaagccttcgaagccaacagattctacaccgtgatcaacaaaaagagcggcgagatcgtgcccatggaggtgaacttcaacttcgacgaccccaacctgatcatcctgcctctggcctttggcaagagacagggcagagaattcatctggaacgacctgctgtccctggaaaccggcagcctgaagctggccaacggaagagtgatcgagaagacactgtacaacagaagaacccggcaggatgagcctgccctgttcgtggccctgaccttcgagcggcgggaggtcctggactcctccaatatcaaaccaatgaacctgatcggcgtggcaagaggcgaaaacatccccgccgtgatcgccctgaccgaccccgagggctgcccactgagccggtttaaggatagcctgggaaacccaacccacatcctgagaatcggcgagagctataaggagaagcagcggaccatccaggccaagaaggaggtggagcagcggagagccggcggctacagccggaagtacgccagcaaagccaagaatctggcagacgatatggtgagaaacaccgctagagatctgctgtactacgccgtgacccaggatgccatgctgatcttcgccaacctgagccggggcttcggccggcagggcaagcggaccttcatggccgagagacagtacacacggatggaggactggctgaccgccaagctggcctacgagggcctgagcaagacctacctgtccaagacactggcccagtacacctccaagacatgcagcaactgtgggtttaccatcaccagcgccgactacgacagggtgctggagaagctgaagaagacagcaacaggctggatgaccacaattaacggcaaggagctgaaggtggagggccagattacctactacaacagatacaagagacagaacgtagtcaaggacctgtccgtcgagctggatagactgagcgaagaatctgtgaacaacgacatctcctcctggacaaagggcagaagcggagaagctctgagcctcctgaagaaaagattctcccatagacccgtgcaggagaagttcgtgtgcctgaactgcggcttcgagacacacgcagccgagcaagccgccctgaacatcgccagatcctggctgttcctgcggagccaggagtacaagaaataccagacaaacaagacaaccggcaacaccgataagagagccttcgtcgagacctggcagtccttttaccggaagaagcttaaggaggtgtggaaacctgccgtgcggtctggcggatctggcggaggctccacaagcatgggccccctgcagttcagggacgtggccatcgagttcagcctggaggagtggcactgcctggacaccacccagaggaacctgtacagggacgtgatgctggagaactacaggaacctggtgttcctgggcatcgtggtgagcaagcccgacctgatcacctgcctggagcagggcaagaagcccctgaccatgaagaggcacgagatgatcgccaagccccccggccaggcccagtggctgaccagccccaagaaaaagagaaaagtctaagctgccttctgcggggcttgccttctggccatgcccttcttctctcccttgcacctgtacctcttggtctttgaataaagcctgagtaggaaggctagcaaaaaaaaaaaaaaaaaaaaaaaaaaaaaaaaaaaaaaaaaaaaaaaaaaaaaaaaaaaaaaaaaaaaaaaaaaaaaaaa

SEQ ID NO: 7051 - RNA, 5797 nt, synthetic construct
  source 1..5797: mol_type = other RNA
aggaaataagagagaaaagaagagtaagaagaaatataagagccaccatggcccctaagaagaagcgtaaagtgagccggatggaacgcctcgtctacgaggtgcggcagaagtgcagaaacatcgaggacatctgcatctcctgcggatctctgaacgtgaccctggagcacccactgttcatcggcggcatgtgccagaactgtaaaaactgttttctggagtgtgcctatcaatacgacgatgacggctaccagagctactgcaccatctgttgcggcggaagagaggtgctgatgtgtggaaataacaactgctgccggtgcttctgcgtggaatgcgtggacctgctggtgggccccggcgccgcccaggccgctattaaggaagatccttggaactgctacatgtgcggccacaagggcacatacggcctgctgagacggagagaggactggcctagcagactgcagatgttcttcgccaataaccacgaccaggagttcgacccccctaaggtgtaccctcccgtccccgccgagaagagaaagcccatccgggtcctgagcctgttcgatggcatcgccaccggtctgctggtgctgaaggacctgggcatccaggtggataggtacattgcctccgaggtgtgcgaggactccatcaccgtgggaatggtgcgtcatcagggcaagatcatgtacgtgggcgacgtgcggagcgtgacacagaagcatatccaggagtggggccctttcgacctggtgatcggcggcagcccttgcaatgacctgagcatcgtgaacccagcccggaagggcctgtacgagggaaccggcagactgttcttcgagttttacagactgctgcacgacgcccggcctaaggaaggcgacgaccggcccttcttttggctgttcgagaatgtggtggccatgggagtcagcgacaagcgggatattagccggttcctggagagcaaccccgtgatgatcgatgccaaggaagtgagcgccgcccaccgggccagatacttctggggcaatctgcctggcatgaacagacccctggccagcaccgtgaacgacaagctggagctgcaggagtgcctggagcacggccggatcgccaagttcagcaaggtgagaaccatcaccacccgaagcaacagcatcaaacaaggcaaggaccagcactttcctgtgttcatgaacgagaaggaggacatcctgtggtgtaccgagatggagagagtgttcgggttcccagtccactacacagatgtcagcaacatgtctagactggccagacagagactgctgggaagaagctggtccgtccctgtgatcagacacctgttcgcccctctgaaggagtacttcgcctgcgtgagcagcggcaacagcaacgccaacagccggggccccagcttctctagcggcctggtgccactgtccctgagagggagccacatgggccccatggagatctacaaaaccgtgagcgcctggaagcggcagcctgtgcgcgtgctgagcctgtttcggaatatcgataaagtcctgaaaagcctgggattcctggagagcggctctggctccggcggtggcaccctgaagtacgtggaggatgtgacaaacgtggtcagacgggatgtggagaagtggggccccttcgatctggtgtacggcagcacccaacccctgggcagctcttgtgaccggtgccctggctggtacatgtttcagttccaccggatcctgcagtacgccctgccgagacaggagtcccagcggccattcttttggattttcatggacaacttgctgctgaccgaggatgaccaggaaactaccactcggttcctgcagaccgaagccgtgaccctgcaggacgtgagaggccgggactaccagaacgccatgcgggtgtggtccaacatccctggactgaaaagcaagcacgcacctctgacccctaaagaagaggagtacctgcaggcccaggtgcggagcagaagcaagctggacgcccctaaggtggatctgctggtgaagaattgcctcctgcccctgagagagtacttcaagtatttcagccagaatagtctgcccctgggcggcccaagcagcggcgcccctcctcccagcggcggcagcccagccggctccccaacctctaccgaggagggcacctctgagtccgccacccccgagagcggccctggcacctccaccgagcccagcgagggcagcgcacccggcagccctgccggcagccccacctccacagaggagggaaccagcaccgagcccagcgaaggcagcgccccaggcaccagcaccgagcctagtgagggcggctctggcggcggcagcgcccaggagattaaacggatcaacaagatcagaagaagacttgtgaaagacagcaacaccaagaaggccggcaagacaggccccatgaaaaccctgctggttagagtgatgacacccgatctgagagagcggctggaaaacctgagaaagaagcctgaaaatatcccccagcccatcagcaatacatctagagccaacctgaataagctgctgaccgattacaccgaaatgaagaaggcgatcctgcatgtgtactgggaagagttccagaaggaccctgtgggcctgatgagccgggtggcccagcctgccagcaagaagatcgatcagaacaagctgaaacctgagatggacgagaagggcaacctgaccaccgccggctttgcctgctctcagtgtggccagcccctgttcgtgtacaagctggagcaggtgtctgagaagggcaaggcttacaccaactacttcggacggtgcaatgtggccgagcacgaaaagctgatcctgctggcccagctgaagcccgagaaggatagcgacgaagccgtgacatatagcctgggaaagtttgggcagagggccctggatttctacagcattcatgtgaccaaggagtccacccaccccgtgaagcccctggcccagatcgccggaaacagatacgcctccggacctgtgggaaaggccctgagcgacgcatgtatgggcacaatcgcctccttcctgtctaagtaccaggacatcatcatcgaacaccagaaggtggtgaagggcaaccagaagagactggagagcctgcgggagctggccggcaaggaaaacctggaataccctagcgtgaccctgccacctcagcctcacaccaaggagggcgttgatgcctacaacgaagtgatcgcccgggtgcgaatgtgggtgaacctgaacctgtggcagaagctgaagctaagcagagatgatgccaagcctctgctgagactgaagggattcccttcctttcctctggtcgagagacaggccaacgaagtggactggtgggacatggtgtgtaacgtgaagaagctgatcaacgagaaaaaggaggatggcaaggtgttttggcagaatctggctggctacaagagacaggaagccctgagaccatacctgagcagcgaggaagatcggaagaagggaaagaaattcgctcggtaccagctgggcgacctgctgctgcacctggaaaagaagcacggcgaggactggggaaaggtgtacgacgaggcctgggagcggattgacaagaaagtggaaggcctgagcaagcacatcaagctggaagaggaacggagaagcgaggacgcccagagcaaggccgccctgaccgactggctgcgggctaaggccagcttcgtgatcgagggcctgaaggaggccgacaaggacgagttctgcagatgcgagctgaagctgcagaagtggtacggggacctgcggggaaagcccttcgccatcgaagccgagaacagcatcctggacatcagcggcttcagcaagcagtacaactgtgccttcatctggcagaaggacggcgtgaagaagctgaacctgtacctgatcatcaactacttcaagggcggcaagctgcggttcaagaagatcaaacctgaagccttcgaagccaacagattctacaccgtgatcaacaaaaagagcggcgagatcgtgcccatggaggtgaacttcaacttcgacgaccccaacctgatcatcctgcctctggcctttggcaagagacagggcagagaattcatctggaacgacctgctgtccctggaaaccggcagcctgaagctggccaacggaagagtgatcgagaagacactgtacaacagaagaacccggcaggatgagcctgccctgttcgtggccctgaccttcgagcggcgggaggtcctggactcctccaatatcaaaccaatgaacctgatcggcgtggcaagaggcgaaaacatccccgccgtgatcgccctgaccgaccccgagggctgcccactgagccggtttaaggatagcctgggaaacccaacccacatcctgagaatcggcgagagctataaggagaagcagcggaccatccaggccaagaaggaggtggagcagcggagagccggcggctacagccggaagtacgccagcaaagccaagaatctggcagacgatatggtgagaaacaccgctagagatctgctgtactacgccgtgacccaggatgccatgctgatcttcgccaacctgagccggggcttcggccggcagggcaagcggaccttcatggccgagagacagtacacacggatggaggactggctgaccgccaagctggcctacgagggcctgagcaagacctacctgtccaagacactggcccagtacacctccaagacatgcagcaactgtgggtttaccatcaccagcgccgactacgacagggtgctggagaagctgaagaagacagcaacaggctggatgaccacaattaacggcaaggagctgaaggtggagggccagattacctactacaacagatacaagagacagaacgtagtcaaggacctgtccgtcgagctggatagactgagcgaagaatctgtgaacaacgacatctcctcctggacaaagggcagaagcggagaagctctgagcctcctgaagaaaagattctcccatagacccgtgcaggagaagttcgtgtgcctgaactgcggcttcgagacacacgcagccgagcaagccgccctgaacatcgccagatcctggctgttcctgcggagccaggagtacaagaaataccagacaaacaagacaaccggcaacaccgataagagagccttcgtcgagacctggcagtccttttaccggaagaagcttaaggaggtgtggaaacctgccgtgcggtctggcggatctggcggaggctccacaagcgccagcggcaccctgaccttcgacgacgtggccctgtacttcagcgagcaggagtgggagatcctggagaagtggcagaagcagatgtacaagcaggagatgaagaccaactacgagaccctggacagcctgggctacgccttcagcaagcccgacctgatcacctggatggagaagggcaggatgctgctgatcagcgaccagggcaggctgcacaagaccaagaggaccgccggcccccccaccagccccaagaaaaagagaaaagtctaagctgccttctgcggggcttgccttctggccatgcccttcttctctcccttgcacctgtacctcttggtctttgaataaagcctgagtaggaaggctagcaaaaaaaaaaaaaaaaaaaaaaaaaaaaaaaaaaaaaaaaaaaaaaaaaaaaaaaaaaaaaaaaaaaaaaaaaaaaaaaa

SEQ ID NO: 7052 - RNA, 5797 nt, synthetic construct
  source 1..5797: mol_type = other RNA
aggaaataagagagaaaagaagagtaagaagaaatataagagccaccatggcccctaagaagaagcgtaaagtgagccggatggaacgcctcgtctacgaggtgcggcagaagtgcagaaacatcgaggacatctgcatctcctgcggatctctgaacgtgaccctggagcacccactgttcatcggcggcatgtgccagaactgtaaaaactgttttctggagtgtgcctatcaatacgacgatgacggctaccagagctactgcaccatctgttgcggcggaagagaggtgctgatgtgtggaaataacaactgctgccggtgcttctgcgtggaatgcgtggacctgctggtgggccccggcgccgcccaggccgctattaaggaagatccttggaactgctacatgtgcggccacaagggcacatacggcctgctgagacggagagaggactggcctagcagactgcagatgttcttcgccaataaccacgaccaggagttcgacccccctaaggtgtaccctcccgtccccgccgagaagagaaagcccatccgggtcctgagcctgttcgatggcatcgccaccggtctgctggtgctgaaggacctgggcatccaggtggataggtacattgcctccgaggtgtgcgaggactccatcaccgtgggaatggtgcgtcatcagggcaagatcatgtacgtgggcgacgtgcggagcgtgacacagaagcatatccaggagtggggccctttcgacctggtgatcggcggcagcccttgcaatgacctgagcatcgtgaacccagcccggaagggcctgtacgagggaaccggcagactgttcttcgagttttacagactgctgcacgacgcccggcctaaggaaggcgacgaccggcccttcttttggctgttcgagaatgtggtggccatgggagtcagcgacaagcgggatattagccggttcctggagagcaaccccgtgatgatcgatgccaaggaagtgagcgccgcccaccgggccagatacttctggggcaatctgcctggcatgaacagacccctggccagcaccgtgaacgacaagctggagctgcaggagtgcctggagcacggccggatcgccaagttcagcaaggtgagaaccatcaccacccgaagcaacagcatcaaacaaggcaaggaccagcactttcctgtgttcatgaacgagaaggaggacatcctgtggtgtaccgagatggagagagtgttcgggttcccagtccactacacagatgtcagcaacatgtctagactggccagacagagactgctgggaagaagctggtccgtccctgtgatcagacacctgttcgcccctctgaaggagtacttcgcctgcgtgagcagcggcaacagcaacgccaacagccggggccccagcttctctagcggcctggtgccactgtccctgagagggagccacatgggccccatggagatctacaaaaccgtgagcgcctggaagcggcagcctgtgcgcgtgctgagcctgtttcggaatatcgataaagtcctgaaaagcctgggattcctggagagcggctctggctccggcggtggcaccctgaagtacgtggaggatgtgacaaacgtggtcagacgggatgtggagaagtggggccccttcgatctggtgtacggcagcacccaacccctgggcagctcttgtgaccggtgccctggctggtacatgtttcagttccaccggatcctgcagtacgccctgccgagacaggagtcccagcggccattcttttggattttcatggacaacttgctgctgaccgaggatgaccaggaaactaccactcggttcctgcagaccgaagccgtgaccctgcaggacgtgagaggccgggactaccagaacgccatgcgggtgtggtccaacatccctggactgaaaagcaagcacgcacctctgacccctaaagaagaggagtacctgcaggcccaggtgcggagcagaagcaagctggacgcccctaaggtggatctgctggtgaagaattgcctcctgcccctgagagagtacttcaagtatttcagccagaatagtctgcccctgggcggcccaagcagcggcgcccctcctcccagcggcggcagcccagccggctccccaacctctaccgaggagggcacctctgagtccgccacccccgagagcggccctggcacctccaccgagcccagcgagggcagcgcacccggcagccctgccggcagccccacctccacagaggagggaaccagcaccgagcccagcgaaggcagcgccccaggcaccagcaccgagcctagtgagggcggctctggcggcggcagcgcccaggagattaaacggatcaacaagatcagaagaagacttgtgaaagacagcaacaccaagaaggccggcaagacaggccccatgaaaaccctgctggttagagtgatgacacccgatctgagagagcggctggaaaacctgagaaagaagcctgaaaatatcccccagcccatcagcaatacatctagagccaacctgaataagctgctgaccgattacaccgaaatgaagaaggcgatcctgcatgtgtactgggaagagttccagaaggaccctgtgggcctgatgagccgggtggcccagcctgccagcaagaagatcgatcagaacaagctgaaacctgagatggacgagaagggcaacctgaccaccgccggctttgcctgctctcagtgtggccagcccctgttcgtgtacaagctggagcaggtgtctgagaagggcaaggcttacaccaactacttcggacggtgcaatgtggccgagcacgaaaagctgatcctgctggcccagctgaagcccgagaaggatagcgacgaagccgtgacatatagcctgggaaagtttgggcagagggccctggatttctacagcattcatgtgaccaaggagtccacccaccccgtgaagcccctggcccagatcgccggaaacagatacgcctccggacctgtgggaaaggccctgagcgacgcatgtatgggcacaatcgcctccttcctgtctaagtaccaggacatcatcatcgaacaccagaaggtggtgaagggcaaccagaagagactggagagcctgcgggagctggccggcaaggaaaacctggaataccctagcgtgaccctgccacctcagcctcacaccaaggagggcgttgatgcctacaacgaagtgatcgcccgggtgcgaatgtgggtgaacctgaacctgtggcagaagctgaagctaagcagagatgatgccaagcctctgctgagactgaagggattcccttcctttcctctggtcgagagacaggccaacgaagtggactggtgggacatggtgtgtaacgtgaagaagctgatcaacgagaaaaaggaggatggcaaggtgttttggcagaatctggctggctacaagagacaggaagccctgagaccatacctgagcagcgaggaagatcggaagaagggaaagaaattcgctcggtaccagctgggcgacctgctgctgcacctggaaaagaagcacggcgaggactggggaaaggtgtacgacgaggcctgggagcggattgacaagaaagtggaaggcctgagcaagcacatcaagctggaagaggaacggagaagcgaggacgcccagagcaaggccgccctgaccgactggctgcgggctaaggccagcttcgtgatcgagggcctgaaggaggccgacaaggacgagttctgcagatgcgagctgaagctgcagaagtggtacggggacctgcggggaaagcccttcgccatcgaagccgagaacagcatcctggacatcagcggcttcagcaagcagtacaactgtgccttcatctggcagaaggacggcgtgaagaagctgaacctgtacctgatcatcaactacttcaagggcggcaagctgcggttcaagaagatcaaacctgaagccttcgaagccaacagattctacaccgtgatcaacaaaaagagcggcgagatcgtgcccatggaggtgaacttcaacttcgacgaccccaacctgatcatcctgcctctggcctttggcaagagacagggcagagaattcatctggaacgacctgctgtccctggaaaccggcagcctgaagctggccaacggaagagtgatcgagaagacactgtacaacagaagaacccggcaggatgagcctgccctgttcgtggccctgaccttcgagcggcgggaggtcctggactcctccaatatcaaaccaatgaacctgatcggcgtggcaagaggcgaaaacatccccgccgtgatcgccctgaccgaccccgagggctgcccactgagccggtttaaggatagcctgggaaacccaacccacatcctgagaatcggcgagagctataaggagaagcagcggaccatccaggccaagaaggaggtggagcagcggagagccggcggctacagccggaagtacgccagcaaagccaagaatctggcagacgatatggtgagaaacaccgctagagatctgctgtactacgccgtgacccaggatgccatgctgatcttcgccaacctgagccggggcttcggccggcagggcaagcggaccttcatggccgagagacagtacacacggatggaggactggctgaccgccaagctggcctacgagggcctgagcaagacctacctgtccaagacactggcccagtacacctccaagacatgcagcaactgtgggtttaccatcaccagcgccgactacgacagggtgctggagaagctgaagaagacagcaacaggctggatgaccacaattaacggcaaggagctgaaggtggagggccagattacctactacaacagatacaagagacagaacgtagtcaaggacctgtccgtcgagctggatagactgagcgaagaatctgtgaacaacgacatctcctcctggacaaagggcagaagcggagaagctctgagcctcctgaagaaaagattctcccatagacccgtgcaggagaagttcgtgtgcctgaactgcggcttcgagacacacgcagccgagcaagccgccctgaacatcgccagatcctggctgttcctgcggagccaggagtacaagaaataccagacaaacaagacaaccggcaacaccgataagagagccttcgtcgagacctggcagtccttttaccggaagaagcttaaggaggtgtggaaacctgccgtgcggtctggcggatctggcggaggctccacaagcggccccctgaccttcagggacgtggccatcgagttcagccaggaggagtggaagagcctggaccccgtgcagaaggccctgtactgggacgtgatgctggagaactacaggaacctggtgttcctgggcatcctgcccaagtgcatgaccaaggagctgccccccatcggcaacagcaacaccggcgagaagttccagagggtgatgctggagaggcacgagtgctacgacatcgagaacttcaccagccccaagaaaaagagaaaagtctaagctgccttctgcggggcttgccttctggccatgcccttcttctctcccttgcacctgtacctcttggtctttgaataaagcctgagtaggaaggctagcaaaaaaaaaaaaaaaaaaaaaaaaaaaaaaaaaaaaaaaaaaaaaaaaaaaaaaaaaaaaaaaaaaaaaaaaaaaaaaaa

SEQ ID NO: 7053 - RNA, 5797 nt, synthetic construct
  source 1..5797: mol_type = other RNA
aggaaataagagagaaaagaagagtaagaagaaatataagagccaccatggcccctaagaagaagcgtaaagtgagccggatggaacgcctcgtctacgaggtgcggcagaagtgcagaaacatcgaggacatctgcatctcctgcggatctctgaacgtgaccctggagcacccactgttcatcggcggcatgtgccagaactgtaaaaactgttttctggagtgtgcctatcaatacgacgatgacggctaccagagctactgcaccatctgttgcggcggaagagaggtgctgatgtgtggaaataacaactgctgccggtgcttctgcgtggaatgcgtggacctgctggtgggccccggcgccgcccaggccgctattaaggaagatccttggaactgctacatgtgcggccacaagggcacatacggcctgctgagacggagagaggactggcctagcagactgcagatgttcttcgccaataaccacgaccaggagttcgacccccctaaggtgtaccctcccgtccccgccgagaagagaaagcccatccgggtcctgagcctgttcgatggcatcgccaccggtctgctggtgctgaaggacctgggcatccaggtggataggtacattgcctccgaggtgtgcgaggactccatcaccgtgggaatggtgcgtcatcagggcaagatcatgtacgtgggcgacgtgcggagcgtgacacagaagcatatccaggagtggggccctttcgacctggtgatcggcggcagcccttgcaatgacctgagcatcgtgaacccagcccggaagggcctgtacgagggaaccggcagactgttcttcgagttttacagactgctgcacgacgcccggcctaaggaaggcgacgaccggcccttcttttggctgttcgagaatgtggtggccatgggagtcagcgacaagcgggatattagccggttcctggagagcaaccccgtgatgatcgatgccaaggaagtgagcgccgcccaccgggccagatacttctggggcaatctgcctggcatgaacagacccctggccagcaccgtgaacgacaagctggagctgcaggagtgcctggagcacggccggatcgccaagttcagcaaggtgagaaccatcaccacccgaagcaacagcatcaaacaaggcaaggaccagcactttcctgtgttcatgaacgagaaggaggacatcctgtggtgtaccgagatggagagagtgttcgggttcccagtccactacacagatgtcagcaacatgtctagactggccagacagagactgctgggaagaagctggtccgtccctgtgatcagacacctgttcgcccctctgaaggagtacttcgcctgcgtgagcagcggcaacagcaacgccaacagccggggccccagcttctctagcggcctggtgccactgtccctgagagggagccacatgggccccatggagatctacaaaaccgtgagcgcctggaagcggcagcctgtgcgcgtgctgagcctgtttcggaatatcgataaagtcctgaaaagcctgggattcctggagagcggctctggctccggcggtggcaccctgaagtacgtggaggatgtgacaaacgtggtcagacgggatgtggagaagtggggccccttcgatctggtgtacggcagcacccaacccctgggcagctcttgtgaccggtgccctggctggtacatgtttcagttccaccggatcctgcagtacgccctgccgagacaggagtcccagcggccattcttttggattttcatggacaacttgctgctgaccgaggatgaccaggaaactaccactcggttcctgcagaccgaagccgtgaccctgcaggacgtgagaggccgggactaccagaacgccatgcgggtgtggtccaacatccctggactgaaaagcaagcacgcacctctgacccctaaagaagaggagtacctgcaggcccaggtgcggagcagaagcaagctggacgcccctaaggtggatctgctggtgaagaattgcctcctgcccctgagagagtacttcaagtatttcagccagaatagtctgcccctgggcggcccaagcagcggcgcccctcctcccagcggcggcagcccagccggctccccaacctctaccgaggagggcacctctgagtccgccacccccgagagcggccctggcacctccaccgagcccagcgagggcagcgcacccggcagccctgccggcagccccacctccacagaggagggaaccagcaccgagcccagcgaaggcagcgccccaggcaccagcaccgagcctagtgagggcggctctggcggcggcagcgcccaggagattaaacggatcaacaagatcagaagaagacttgtgaaagacagcaacaccaagaaggccggcaagacaggccccatgaaaaccctgctggttagagtgatgacacccgatctgagagagcggctggaaaacctgagaaagaagcctgaaaatatcccccagcccatcagcaatacatctagagccaacctgaataagctgctgaccgattacaccgaaatgaagaaggcgatcctgcatgtgtactgggaagagttccagaaggaccctgtgggcctgatgagccgggtggcccagcctgccagcaagaagatcgatcagaacaagctgaaacctgagatggacgagaagggcaacctgaccaccgccggctttgcctgctctcagtgtggccagcccctgttcgtgtacaagctggagcaggtgtctgagaagggcaaggcttacaccaactacttcggacggtgcaatgtggccgagcacgaaaagctgatcctgctggcccagctgaagcccgagaaggatagcgacgaagccgtgacatatagcctgggaaagtttgggcagagggccctggatttctacagcattcatgtgaccaaggagtccacccaccccgtgaagcccctggcccagatcgccggaaacagatacgcctccggacctgtgggaaaggccctgagcgacgcatgtatgggcacaatcgcctccttcctgtctaagtaccaggacatcatcatcgaacaccagaaggtggtgaagggcaaccagaagagactggagagcctgcgggagctggccggcaaggaaaacctggaataccctagcgtgaccctgccacctcagcctcacaccaaggagggcgttgatgcctacaacgaagtgatcgcccgggtgcgaatgtgggtgaacctgaacctgtggcagaagctgaagctaagcagagatgatgccaagcctctgctgagactgaagggattcccttcctttcctctggtcgagagacaggccaacgaagtggactggtgggacatggtgtgtaacgtgaagaagctgatcaacgagaaaaaggaggatggcaaggtgttttggcagaatctggctggctacaagagacaggaagccctgagaccatacctgagcagcgaggaagatcggaagaagggaaagaaattcgctcggtaccagctgggcgacctgctgctgcacctggaaaagaagcacggcgaggactggggaaaggtgtacgacgaggcctgggagcggattgacaagaaagtggaaggcctgagcaagcacatcaagctggaagaggaacggagaagcgaggacgcccagagcaaggccgccctgaccgactggctgcgggctaaggccagcttcgtgatcgagggcctgaaggaggccgacaaggacgagttctgcagatgcgagctgaagctgcagaagtggtacggggacctgcggggaaagcccttcgccatcgaagccgagaacagcatcctggacatcagcggcttcagcaagcagtacaactgtgccttcatctggcagaaggacggcgtgaagaagctgaacctgtacctgatcatcaactacttcaagggcggcaagctgcggttcaagaagatcaaacctgaagccttcgaagccaacagattctacaccgtgatcaacaaaaagagcggcgagatcgtgcccatggaggtgaacttcaacttcgacgaccccaacctgatcatcctgcctctggcctttggcaagagacagggcagagaattcatctggaacgacctgctgtccctggaaaccggcagcctgaagctggccaacggaagagtgatcgagaagacactgtacaacagaagaacccggcaggatgagcctgccctgttcgtggccctgaccttcgagcggcgggaggtcctggactcctccaatatcaaaccaatgaacctgatcggcgtggcaagaggcgaaaacatccccgccgtgatcgccctgaccgaccccgagggctgcccactgagccggtttaaggatagcctgggaaacccaacccacatcctgagaatcggcgagagctataaggagaagcagcggaccatccaggccaagaaggaggtggagcagcggagagccggcggctacagccggaagtacgccagcaaagccaagaatctggcagacgatatggtgagaaacaccgctagagatctgctgtactacgccgtgacccaggatgccatgctgatcttcgccaacctgagccggggcttcggccggcagggcaagcggaccttcatggccgagagacagtacacacggatggaggactggctgaccgccaagctggcctacgagggcctgagcaagacctacctgtccaagacactggcccagtacacctccaagacatgcagcaactgtgggtttaccatcaccagcgccgactacgacagggtgctggagaagctgaagaagacagcaacaggctggatgaccacaattaacggcaaggagctgaaggtggagggccagattacctactacaacagatacaagagacagaacgtagtcaaggacctgtccgtcgagctggatagactgagcgaagaatctgtgaacaacgacatctcctcctggacaaagggcagaagcggagaagctctgagcctcctgaagaaaagattctcccatagacccgtgcaggagaagttcgtgtgcctgaactgcggcttcgagacacacgcagccgagcaagccgccctgaacatcgccagatcctggctgttcctgcggagccaggagtacaagaaataccagacaaacaagacaaccggcaacaccgataagagagccttcgtcgagacctggcagtccttttaccggaagaagcttaaggaggtgtggaaacctgccgtgcggtctggcggatctggcggaggctccacaagcttccagggcagcgtgaccttcagggacgtgagcatcgacttcagccaggaggagtgggagtggctgcagcccgcccagagggacctgtacaggcacgtgatgctggagaactacggccacctggtgagcctgggcctgaacatgagcaagcccgacgtggtgagcctgctggagcagggcaaggagccctggctgggcaacggcgacgtgagcagggagctgttccccgccagcaagagcaacaccagccccaagaaaaagagaaaagtctaagctgccttctgcggggcttgccttctggccatgcccttcttctctcccttgcacctgtacctcttggtctttgaataaagcctgagtaggaaggctagcaaaaaaaaaaaaaaaaaaaaaaaaaaaaaaaaaaaaaaaaaaaaaaaaaaaaaaaaaaaaaaaaaaaaaaaaaaaaaaaa

SEQ ID NO: 7054 - RNA, 5797 nt, synthetic construct
  source 1..5797: mol_type = other RNA
aggaaataagagagaaaagaagagtaagaagaaatataagagccaccatggcccctaagaagaagcgtaaagtgagccggatggaacgcctcgtctacgaggtgcggcagaagtgcagaaacatcgaggacatctgcatctcctgcggatctctgaacgtgaccctggagcacccactgttcatcggcggcatgtgccagaactgtaaaaactgttttctggagtgtgcctatcaatacgacgatgacggctaccagagctactgcaccatctgttgcggcggaagagaggtgctgatgtgtggaaataacaactgctgccggtgcttctgcgtggaatgcgtggacctgctggtgggccccggcgccgcccaggccgctattaaggaagatccttggaactgctacatgtgcggccacaagggcacatacggcctgctgagacggagagaggactggcctagcagactgcagatgttcttcgccaataaccacgaccaggagttcgacccccctaaggtgtaccctcccgtccccgccgagaagagaaagcccatccgggtcctgagcctgttcgatggcatcgccaccggtctgctggtgctgaaggacctgggcatccaggtggataggtacattgcctccgaggtgtgcgaggactccatcaccgtgggaatggtgcgtcatcagggcaagatcatgtacgtgggcgacgtgcggagcgtgacacagaagcatatccaggagtggggccctttcgacctggtgatcggcggcagcccttgcaatgacctgagcatcgtgaacccagcccggaagggcctgtacgagggaaccggcagactgttcttcgagttttacagactgctgcacgacgcccggcctaaggaaggcgacgaccggcccttcttttggctgttcgagaatgtggtggccatgggagtcagcgacaagcgggatattagccggttcctggagagcaaccccgtgatgatcgatgccaaggaagtgagcgccgcccaccgggccagatacttctggggcaatctgcctggcatgaacagacccctggccagcaccgtgaacgacaagctggagctgcaggagtgcctggagcacggccggatcgccaagttcagcaaggtgagaaccatcaccacccgaagcaacagcatcaaacaaggcaaggaccagcactttcctgtgttcatgaacgagaaggaggacatcctgtggtgtaccgagatggagagagtgttcgggttcccagtccactacacagatgtcagcaacatgtctagactggccagacagagactgctgggaagaagctggtccgtccctgtgatcagacacctgttcgcccctctgaaggagtacttcgcctgcgtgagcagcggcaacagcaacgccaacagccggggccccagcttctctagcggcctggtgccactgtccctgagagggagccacatgggccccatggagatctacaaaaccgtgagcgcctggaagcggcagcctgtgcgcgtgctgagcctgtttcggaatatcgataaagtcctgaaaagcctgggattcctggagagcggctctggctccggcggtggcaccctgaagtacgtggaggatgtgacaaacgtggtcagacgggatgtggagaagtggggccccttcgatctggtgtacggcagcacccaacccctgggcagctcttgtgaccggtgccctggctggtacatgtttcagttccaccggatcctgcagtacgccctgccgagacaggagtcccagcggccattcttttggattttcatggacaacttgctgctgaccgaggatgaccaggaaactaccactcggttcctgcagaccgaagccgtgaccctgcaggacgtgagaggccgggactaccagaacgccatgcgggtgtggtccaacatccctggactgaaaagcaagcacgcacctctgacccctaaagaagaggagtacctgcaggcccaggtgcggagcagaagcaagctggacgcccctaaggtggatctgctggtgaagaattgcctcctgcccctgagagagtacttcaagtatttcagccagaatagtctgcccctgggcggcccaagcagcggcgcccctcctcccagcggcggcagcccagccggctccccaacctctaccgaggagggcacctctgagtccgccacccccgagagcggccctggcacctccaccgagcccagcgagggcagcgcacccggcagccctgccggcagccccacctccacagaggagggaaccagcaccgagcccagcgaaggcagcgccccaggcaccagcaccgagcctagtgagggcggctctggcggcggcagcgcccaggagattaaacggatcaacaagatcagaagaagacttgtgaaagacagcaacaccaagaaggccggcaagacaggccccatgaaaaccctgctggttagagtgatgacacccgatctgagagagcggctggaaaacctgagaaagaagcctgaaaatatcccccagcccatcagcaatacatctagagccaacctgaataagctgctgaccgattacaccgaaatgaagaaggcgatcctgcatgtgtactgggaagagttccagaaggaccctgtgggcctgatgagccgggtggcccagcctgccagcaagaagatcgatcagaacaagctgaaacctgagatggacgagaagggcaacctgaccaccgccggctttgcctgctctcagtgtggccagcccctgttcgtgtacaagctggagcaggtgtctgagaagggcaaggcttacaccaactacttcggacggtgcaatgtggccgagcacgaaaagctgatcctgctggcccagctgaagcccgagaaggatagcgacgaagccgtgacatatagcctgggaaagtttgggcagagggccctggatttctacagcattcatgtgaccaaggagtccacccaccccgtgaagcccctggcccagatcgccggaaacagatacgcctccggacctgtgggaaaggccctgagcgacgcatgtatgggcacaatcgcctccttcctgtctaagtaccaggacatcatcatcgaacaccagaaggtggtgaagggcaaccagaagagactggagagcctgcgggagctggccggcaaggaaaacctggaataccctagcgtgaccctgccacctcagcctcacaccaaggagggcgttgatgcctacaacgaagtgatcgcccgggtgcgaatgtgggtgaacctgaacctgtggcagaagctgaagctaagcagagatgatgccaagcctctgctgagactgaagggattcccttcctttcctctggtcgagagacaggccaacgaagtggactggtgggacatggtgtgtaacgtgaagaagctgatcaacgagaaaaaggaggatggcaaggtgttttggcagaatctggctggctacaagagacaggaagccctgagaccatacctgagcagcgaggaagatcggaagaagggaaagaaattcgctcggtaccagctgggcgacctgctgctgcacctggaaaagaagcacggcgaggactggggaaaggtgtacgacgaggcctgggagcggattgacaagaaagtggaaggcctgagcaagcacatcaagctggaagaggaacggagaagcgaggacgcccagagcaaggccgccctgaccgactggctgcgggctaaggccagcttcgtgatcgagggcctgaaggaggccgacaaggacgagttctgcagatgcgagctgaagctgcagaagtggtacggggacctgcggggaaagcccttcgccatcgaagccgagaacagcatcctggacatcagcggcttcagcaagcagtacaactgtgccttcatctggcagaaggacggcgtgaagaagctgaacctgtacctgatcatcaactacttcaagggcggcaagctgcggttcaagaagatcaaacctgaagccttcgaagccaacagattctacaccgtgatcaacaaaaagagcggcgagatcgtgcccatggaggtgaacttcaacttcgacgaccccaacctgatcatcctgcctctggcctttggcaagagacagggcagagaattcatctggaacgacctgctgtccctggaaaccggcagcctgaagctggccaacggaagagtgatcgagaagacactgtacaacagaagaacccggcaggatgagcctgccctgttcgtggccctgaccttcgagcggcgggaggtcctggactcctccaatatcaaaccaatgaacctgatcggcgtggcaagaggcgaaaacatccccgccgtgatcgccctgaccgaccccgagggctgcccactgagccggtttaaggatagcctgggaaacccaacccacatcctgagaatcggcgagagctataaggagaagcagcggaccatccaggccaagaaggaggtggagcagcggagagccggcggctacagccggaagtacgccagcaaagccaagaatctggcagacgatatggtgagaaacaccgctagagatctgctgtactacgccgtgacccaggatgccatgctgatcttcgccaacctgagccggggcttcggccggcagggcaagcggaccttcatggccgagagacagtacacacggatggaggactggctgaccgccaagctggcctacgagggcctgagcaagacctacctgtccaagacactggcccagtacacctccaagacatgcagcaactgtgggtttaccatcaccagcgccgactacgacagggtgctggagaagctgaagaagacagcaacaggctggatgaccacaattaacggcaaggagctgaaggtggagggccagattacctactacaacagatacaagagacagaacgtagtcaaggacctgtccgtcgagctggatagactgagcgaagaatctgtgaacaacgacatctcctcctggacaaagggcagaagcggagaagctctgagcctcctgaagaaaagattctcccatagacccgtgcaggagaagttcgtgtgcctgaactgcggcttcgagacacacgcagccgagcaagccgccctgaacatcgccagatcctggctgttcctgcggagccaggagtacaagaaataccagacaaacaagacaaccggcaacaccgataagagagccttcgtcgagacctggcagtccttttaccggaagaagcttaaggaggtgtggaaacctgccgtgcggtctggcggatctggcggaggctccacaagccagggcagcgtgaccttcgaggacgtggccgtgcacttcagctgggacgagtggcacctgctggacaaggcccagaggtgcctgtacagggacgtgatggccgagaacctggccctgatcaccagcctgggcctgtggcccggcgtgggcgacgccgaggccagcagcgagcagagcgccagcctgaagggcatgagccaggtgaggaccttcagggagggcctgagcccccagagggcccagaccagccccaagaaaaagagaaaagtctaagctgccttctgcggggcttgccttctggccatgcccttcttctctcccttgcacctgtacctcttggtctttgaataaagcctgagtaggaaggctagcaaaaaaaaaaaaaaaaaaaaaaaaaaaaaaaaaaaaaaaaaaaaaaaaaaaaaaaaaaaaaaaaaaaaaaaaaaaaaaaa

SEQ ID NO: 7055 - RNA, 5797 nt, synthetic construct
  source 1..5797: mol_type = other RNA
aggaaataagagagaaaagaagagtaagaagaaatataagagccaccatggcccctaagaagaagcgtaaagtgagccggatggaacgcctcgtctacgaggtgcggcagaagtgcagaaacatcgaggacatctgcatctcctgcggatctctgaacgtgaccctggagcacccactgttcatcggcggcatgtgccagaactgtaaaaactgttttctggagtgtgcctatcaatacgacgatgacggctaccagagctactgcaccatctgttgcggcggaagagaggtgctgatgtgtggaaataacaactgctgccggtgcttctgcgtggaatgcgtggacctgctggtgggccccggcgccgcccaggccgctattaaggaagatccttggaactgctacatgtgcggccacaagggcacatacggcctgctgagacggagagaggactggcctagcagactgcagatgttcttcgccaataaccacgaccaggagttcgacccccctaaggtgtaccctcccgtccccgccgagaagagaaagcccatccgggtcctgagcctgttcgatggcatcgccaccggtctgctggtgctgaaggacctgggcatccaggtggataggtacattgcctccgaggtgtgcgaggactccatcaccgtgggaatggtgcgtcatcagggcaagatcatgtacgtgggcgacgtgcggagcgtgacacagaagcatatccaggagtggggccctttcgacctggtgatcggcggcagcccttgcaatgacctgagcatcgtgaacccagcccggaagggcctgtacgagggaaccggcagactgttcttcgagttttacagactgctgcacgacgcccggcctaaggaaggcgacgaccggcccttcttttggctgttcgagaatgtggtggccatgggagtcagcgacaagcgggatattagccggttcctggagagcaaccccgtgatgatcgatgccaaggaagtgagcgccgcccaccgggccagatacttctggggcaatctgcctggcatgaacagacccctggccagcaccgtgaacgacaagctggagctgcaggagtgcctggagcacggccggatcgccaagttcagcaaggtgagaaccatcaccacccgaagcaacagcatcaaacaaggcaaggaccagcactttcctgtgttcatgaacgagaaggaggacatcctgtggtgtaccgagatggagagagtgttcgggttcccagtccactacacagatgtcagcaacatgtctagactggccagacagagactgctgggaagaagctggtccgtccctgtgatcagacacctgttcgcccctctgaaggagtacttcgcctgcgtgagcagcggcaacagcaacgccaacagccggggccccagcttctctagcggcctggtgccactgtccctgagagggagccacatgggccccatggagatctacaaaaccgtgagcgcctggaagcggcagcctgtgcgcgtgctgagcctgtttcggaatatcgataaagtcctgaaaagcctgggattcctggagagcggctctggctccggcggtggcaccctgaagtacgtggaggatgtgacaaacgtggtcagacgggatgtggagaagtggggccccttcgatctggtgtacggcagcacccaacccctgggcagctcttgtgaccggtgccctggctggtacatgtttcagttccaccggatcctgcagtacgccctgccgagacaggagtcccagcggccattcttttggattttcatggacaacttgctgctgaccgaggatgaccaggaaactaccactcggttcctgcagaccgaagccgtgaccctgcaggacgtgagaggccgggactaccagaacgccatgcgggtgtggtccaacatccctggactgaaaagcaagcacgcacctctgacccctaaagaagaggagtacctgcaggcccaggtgcggagcagaagcaagctggacgcccctaaggtggatctgctggtgaagaattgcctcctgcccctgagagagtacttcaagtatttcagccagaatagtctgcccctgggcggcccaagcagcggcgcccctcctcccagcggcggcagcccagccggctccccaacctctaccgaggagggcacctctgagtccgccacccccgagagcggccctggcacctccaccgagcccagcgagggcagcgcacccggcagccctgccggcagccccacctccacagaggagggaaccagcaccgagcccagcgaaggcagcgccccaggcaccagcaccgagcctagtgagggcggctctggcggcggcagcgcccaggagattaaacggatcaacaagatcagaagaagacttgtgaaagacagcaacaccaagaaggccggcaagacaggccccatgaaaaccctgctggttagagtgatgacacccgatctgagagagcggctggaaaacctgagaaagaagcctgaaaatatcccccagcccatcagcaatacatctagagccaacctgaataagctgctgaccgattacaccgaaatgaagaaggcgatcctgcatgtgtactgggaagagttccagaaggaccctgtgggcctgatgagccgggtggcccagcctgccagcaagaagatcgatcagaacaagctgaaacctgagatggacgagaagggcaacctgaccaccgccggctttgcctgctctcagtgtggccagcccctgttcgtgtacaagctggagcaggtgtctgagaagggcaaggcttacaccaactacttcggacggtgcaatgtggccgagcacgaaaagctgatcctgctggcccagctgaagcccgagaaggatagcgacgaagccgtgacatatagcctgggaaagtttgggcagagggccctggatttctacagcattcatgtgaccaaggagtccacccaccccgtgaagcccctggcccagatcgccggaaacagatacgcctccggacctgtgggaaaggccctgagcgacgcatgtatgggcacaatcgcctccttcctgtctaagtaccaggacatcatcatcgaacaccagaaggtggtgaagggcaaccagaagagactggagagcctgcgggagctggccggcaaggaaaacctggaataccctagcgtgaccctgccacctcagcctcacaccaaggagggcgttgatgcctacaacgaagtgatcgcccgggtgcgaatgtgggtgaacctgaacctgtggcagaagctgaagctaagcagagatgatgccaagcctctgctgagactgaagggattcccttcctttcctctggtcgagagacaggccaacgaagtggactggtgggacatggtgtgtaacgtgaagaagctgatcaacgagaaaaaggaggatggcaaggtgttttggcagaatctggctggctacaagagacaggaagccctgagaccatacctgagcagcgaggaagatcggaagaagggaaagaaattcgctcggtaccagctgggcgacctgctgctgcacctggaaaagaagcacggcgaggactggggaaaggtgtacgacgaggcctgggagcggattgacaagaaagtggaaggcctgagcaagcacatcaagctggaagaggaacggagaagcgaggacgcccagagcaaggccgccctgaccgactggctgcgggctaaggccagcttcgtgatcgagggcctgaaggaggccgacaaggacgagttctgcagatgcgagctgaagctgcagaagtggtacggggacctgcggggaaagcccttcgccatcgaagccgagaacagcatcctggacatcagcggcttcagcaagcagtacaactgtgccttcatctggcagaaggacggcgtgaagaagctgaacctgtacctgatcatcaactacttcaagggcggcaagctgcggttcaagaagatcaaacctgaagccttcgaagccaacagattctacaccgtgatcaacaaaaagagcggcgagatcgtgcccatggaggtgaacttcaacttcgacgaccccaacctgatcatcctgcctctggcctttggcaagagacagggcagagaattcatctggaacgacctgctgtccctggaaaccggcagcctgaagctggccaacggaagagtgatcgagaagacactgtacaacagaagaacccggcaggatgagcctgccctgttcgtggccctgaccttcgagcggcgggaggtcctggactcctccaatatcaaaccaatgaacctgatcggcgtggcaagaggcgaaaacatccccgccgtgatcgccctgaccgaccccgagggctgcccactgagccggtttaaggatagcctgggaaacccaacccacatcctgagaatcggcgagagctataaggagaagcagcggaccatccaggccaagaaggaggtggagcagcggagagccggcggctacagccggaagtacgccagcaaagccaagaatctggcagacgatatggtgagaaacaccgctagagatctgctgtactacgccgtgacccaggatgccatgctgatcttcgccaacctgagccggggcttcggccggcagggcaagcggaccttcatggccgagagacagtacacacggatggaggactggctgaccgccaagctggcctacgagggcctgagcaagacctacctgtccaagacactggcccagtacacctccaagacatgcagcaactgtgggtttaccatcaccagcgccgactacgacagggtgctggagaagctgaagaagacagcaacaggctggatgaccacaattaacggcaaggagctgaaggtggagggccagattacctactacaacagatacaagagacagaacgtagtcaaggacctgtccgtcgagctggatagactgagcgaagaatctgtgaacaacgacatctcctcctggacaaagggcagaagcggagaagctctgagcctcctgaagaaaagattctcccatagacccgtgcaggagaagttcgtgtgcctgaactgcggcttcgagacacacgcagccgagcaagccgccctgaacatcgccagatcctggctgttcctgcggagccaggagtacaagaaataccagacaaacaagacaaccggcaacaccgataagagagccttcgtcgagacctggcagtccttttaccggaagaagcttaaggaggtgtggaaacctgccgtgcggtctggcggatctggcggaggctccacaagccaccagatcagcgtgaccttcgacgacgtggccctggacttcacccaggaggagtggatcctgctggacctgagccagaggaacctgtacaggaacgtgatgctggagaactaccagaacctggtgaccgtggagtaccagctgagcaagcccaagctgatcgcctggctggagcagcaggagctgagggccgtggagcagggcatcctgcaggagtgggagaccggcctgcagaccaagggcaccagccccaagaaaaagagaaaagtctaagctgccttctgcggggcttgccttctggccatgcccttcttctctcccttgcacctgtacctcttggtctttgaataaagcctgagtaggaaggctagcaaaaaaaaaaaaaaaaaaaaaaaaaaaaaaaaaaaaaaaaaaaaaaaaaaaaaaaaaaaaaaaaaaaaaaaaaaaaaaaa

SEQ ID NO: 7056 - RNA, 5797 nt, synthetic construct
  source 1..5797: mol_type = other RNA
aggaaataagagagaaaagaagagtaagaagaaatataagagccaccatggcccctaagaagaagcgtaaagtgagccggatggaacgcctcgtctacgaggtgcggcagaagtgcagaaacatcgaggacatctgcatctcctgcggatctctgaacgtgaccctggagcacccactgttcatcggcggcatgtgccagaactgtaaaaactgttttctggagtgtgcctatcaatacgacgatgacggctaccagagctactgcaccatctgttgcggcggaagagaggtgctgatgtgtggaaataacaactgctgccggtgcttctgcgtggaatgcgtggacctgctggtgggccccggcgccgcccaggccgctattaaggaagatccttggaactgctacatgtgcggccacaagggcacatacggcctgctgagacggagagaggactggcctagcagactgcagatgttcttcgccaataaccacgaccaggagttcgacccccctaaggtgtaccctcccgtccccgccgagaagagaaagcccatccgggtcctgagcctgttcgatggcatcgccaccggtctgctggtgctgaaggacctgggcatccaggtggataggtacattgcctccgaggtgtgcgaggactccatcaccgtgggaatggtgcgtcatcagggcaagatcatgtacgtgggcgacgtgcggagcgtgacacagaagcatatccaggagtggggccctttcgacctggtgatcggcggcagcccttgcaatgacctgagcatcgtgaacccagcccggaagggcctgtacgagggaaccggcagactgttcttcgagttttacagactgctgcacgacgcccggcctaaggaaggcgacgaccggcccttcttttggctgttcgagaatgtggtggccatgggagtcagcgacaagcgggatattagccggttcctggagagcaaccccgtgatgatcgatgccaaggaagtgagcgccgcccaccgggccagatacttctggggcaatctgcctggcatgaacagacccctggccagcaccgtgaacgacaagctggagctgcaggagtgcctggagcacggccggatcgccaagttcagcaaggtgagaaccatcaccacccgaagcaacagcatcaaacaaggcaaggaccagcactttcctgtgttcatgaacgagaaggaggacatcctgtggtgtaccgagatggagagagtgttcgggttcccagtccactacacagatgtcagcaacatgtctagactggccagacagagactgctgggaagaagctggtccgtccctgtgatcagacacctgttcgcccctctgaaggagtacttcgcctgcgtgagcagcggcaacagcaacgccaacagccggggccccagcttctctagcggcctggtgccactgtccctgagagggagccacatgggccccatggagatctacaaaaccgtgagcgcctggaagcggcagcctgtgcgcgtgctgagcctgtttcggaatatcgataaagtcctgaaaagcctgggattcctggagagcggctctggctccggcggtggcaccctgaagtacgtggaggatgtgacaaacgtggtcagacgggatgtggagaagtggggccccttcgatctggtgtacggcagcacccaacccctgggcagctcttgtgaccggtgccctggctggtacatgtttcagttccaccggatcctgcagtacgccctgccgagacaggagtcccagcggccattcttttggattttcatggacaacttgctgctgaccgaggatgaccaggaaactaccactcggttcctgcagaccgaagccgtgaccctgcaggacgtgagaggccgggactaccagaacgccatgcgggtgtggtccaacatccctggactgaaaagcaagcacgcacctctgacccctaaagaagaggagtacctgcaggcccaggtgcggagcagaagcaagctggacgcccctaaggtggatctgctggtgaagaattgcctcctgcccctgagagagtacttcaagtatttcagccagaatagtctgcccctgggcggcccaagcagcggcgcccctcctcccagcggcggcagcccagccggctccccaacctctaccgaggagggcacctctgagtccgccacccccgagagcggccctggcacctccaccgagcccagcgagggcagcgcacccggcagccctgccggcagccccacctccacagaggagggaaccagcaccgagcccagcgaaggcagcgccccaggcaccagcaccgagcctagtgagggcggctctggcggcggcagcgcccaggagattaaacggatcaacaagatcagaagaagacttgtgaaagacagcaacaccaagaaggccggcaagacaggccccatgaaaaccctgctggttagagtgatgacacccgatctgagagagcggctggaaaacctgagaaagaagcctgaaaatatcccccagcccatcagcaatacatctagagccaacctgaataagctgctgaccgattacaccgaaatgaagaaggcgatcctgcatgtgtactgggaagagttccagaaggaccctgtgggcctgatgagccgggtggcccagcctgccagcaagaagatcgatcagaacaagctgaaacctgagatggacgagaagggcaacctgaccaccgccggctttgcctgctctcagtgtggccagcccctgttcgtgtacaagctggagcaggtgtctgagaagggcaaggcttacaccaactacttcggacggtgcaatgtggccgagcacgaaaagctgatcctgctggcccagctgaagcccgagaaggatagcgacgaagccgtgacatatagcctgggaaagtttgggcagagggccctggatttctacagcattcatgtgaccaaggagtccacccaccccgtgaagcccctggcccagatcgccggaaacagatacgcctccggacctgtgggaaaggccctgagcgacgcatgtatgggcacaatcgcctccttcctgtctaagtaccaggacatcatcatcgaacaccagaaggtggtgaagggcaaccagaagagactggagagcctgcgggagctggccggcaaggaaaacctggaataccctagcgtgaccctgccacctcagcctcacaccaaggagggcgttgatgcctacaacgaagtgatcgcccgggtgcgaatgtgggtgaacctgaacctgtggcagaagctgaagctaagcagagatgatgccaagcctctgctgagactgaagggattcccttcctttcctctggtcgagagacaggccaacgaagtggactggtgggacatggtgtgtaacgtgaagaagctgatcaacgagaaaaaggaggatggcaaggtgttttggcagaatctggctggctacaagagacaggaagccctgagaccatacctgagcagcgaggaagatcggaagaagggaaagaaattcgctcggtaccagctgggcgacctgctgctgcacctggaaaagaagcacggcgaggactggggaaaggtgtacgacgaggcctgggagcggattgacaagaaagtggaaggcctgagcaagcacatcaagctggaagaggaacggagaagcgaggacgcccagagcaaggccgccctgaccgactggctgcgggctaaggccagcttcgtgatcgagggcctgaaggaggccgacaaggacgagttctgcagatgcgagctgaagctgcagaagtggtacggggacctgcggggaaagcccttcgccatcgaagccgagaacagcatcctggacatcagcggcttcagcaagcagtacaactgtgccttcatctggcagaaggacggcgtgaagaagctgaacctgtacctgatcatcaactacttcaagggcggcaagctgcggttcaagaagatcaaacctgaagccttcgaagccaacagattctacaccgtgatcaacaaaaagagcggcgagatcgtgcccatggaggtgaacttcaacttcgacgaccccaacctgatcatcctgcctctggcctttggcaagagacagggcagagaattcatctggaacgacctgctgtccctggaaaccggcagcctgaagctggccaacggaagagtgatcgagaagacactgtacaacagaagaacccggcaggatgagcctgccctgttcgtggccctgaccttcgagcggcgggaggtcctggactcctccaatatcaaaccaatgaacctgatcggcgtggcaagaggcgaaaacatccccgccgtgatcgccctgaccgaccccgagggctgcccactgagccggtttaaggatagcctgggaaacccaacccacatcctgagaatcggcgagagctataaggagaagcagcggaccatccaggccaagaaggaggtggagcagcggagagccggcggctacagccggaagtacgccagcaaagccaagaatctggcagacgatatggtgagaaacaccgctagagatctgctgtactacgccgtgacccaggatgccatgctgatcttcgccaacctgagccggggcttcggccggcagggcaagcggaccttcatggccgagagacagtacacacggatggaggactggctgaccgccaagctggcctacgagggcctgagcaagacctacctgtccaagacactggcccagtacacctccaagacatgcagcaactgtgggtttaccatcaccagcgccgactacgacagggtgctggagaagctgaagaagacagcaacaggctggatgaccacaattaacggcaaggagctgaaggtggagggccagattacctactacaacagatacaagagacagaacgtagtcaaggacctgtccgtcgagctggatagactgagcgaagaatctgtgaacaacgacatctcctcctggacaaagggcagaagcggagaagctctgagcctcctgaagaaaagattctcccatagacccgtgcaggagaagttcgtgtgcctgaactgcggcttcgagacacacgcagccgagcaagccgccctgaacatcgccagatcctggctgttcctgcggagccaggagtacaagaaataccagacaaacaagacaaccggcaacaccgataagagagccttcgtcgagacctggcagtccttttaccggaagaagcttaaggaggtgtggaaacctgccgtgcggtctggcggatctggcggaggctccacaagcgccagctgcggcctgctgaccttcagggacgtggccatcgagttcagccaggaggagtggaggtgcctgagccacacccagagggagctgtacagggacgtgatgctggagaactacggccacctgctgttcctgggcctgatcgtgagcaagcccgacctggtgagcttcctggagctgaggaaggacccctgggacgtgaagaggaggaagaccgccggcttcgaccccggcaggtggcagaccagccccaagaaaaagagaaaagtctaagctgccttctgcggggcttgccttctggccatgcccttcttctctcccttgcacctgtacctcttggtctttgaataaagcctgagtaggaaggctagcaaaaaaaaaaaaaaaaaaaaaaaaaaaaaaaaaaaaaaaaaaaaaaaaaaaaaaaaaaaaaaaaaaaaaaaaaaaaaaaa

SEQ ID NO: 7057 - RNA, 5833 nt, synthetic construct
  source 1..5833: mol_type = other RNA
aggaaataagagagaaaagaagagtaagaagaaatataagagccaccatggcccctaagaagaagcgtaaagtgagccggatggaacgcctcgtctacgaggtgcggcagaagtgcagaaacatcgaggacatctgcatctcctgcggatctctgaacgtgaccctggagcacccactgttcatcggcggcatgtgccagaactgtaaaaactgttttctggagtgtgcctatcaatacgacgatgacggctaccagagctactgcaccatctgttgcggcggaagagaggtgctgatgtgtggaaataacaactgctgccggtgcttctgcgtggaatgcgtggacctgctggtgggccccggcgccgcccaggccgctattaaggaagatccttggaactgctacatgtgcggccacaagggcacatacggcctgctgagacggagagaggactggcctagcagactgcagatgttcttcgccaataaccacgaccaggagttcgacccccctaaggtgtaccctcccgtccccgccgagaagagaaagcccatccgggtcctgagcctgttcgatggcatcgccaccggtctgctggtgctgaaggacctgggcatccaggtggataggtacattgcctccgaggtgtgcgaggactccatcaccgtgggaatggtgcgtcatcagggcaagatcatgtacgtgggcgacgtgcggagcgtgacacagaagcatatccaggagtggggccctttcgacctggtgatcggcggcagcccttgcaatgacctgagcatcgtgaacccagcccggaagggcctgtacgagggaaccggcagactgttcttcgagttttacagactgctgcacgacgcccggcctaaggaaggcgacgaccggcccttcttttggctgttcgagaatgtggtggccatgggagtcagcgacaagcgggatattagccggttcctggagagcaaccccgtgatgatcgatgccaaggaagtgagcgccgcccaccgggccagatacttctggggcaatctgcctggcatgaacagacccctggccagcaccgtgaacgacaagctggagctgcaggagtgcctggagcacggccggatcgccaagttcagcaaggtgagaaccatcaccacccgaagcaacagcatcaaacaaggcaaggaccagcactttcctgtgttcatgaacgagaaggaggacatcctgtggtgtaccgagatggagagagtgttcgggttcccagtccactacacagatgtcagcaacatgtctagactggccagacagagactgctgggaagaagctggtccgtccctgtgatcagacacctgttcgcccctctgaaggagtacttcgcctgcgtgagcagcggcaacagcaacgccaacagccggggccccagcttctctagcggcctggtgccactgtccctgagagggagccacatgggccccatggagatctacaaaaccgtgagcgcctggaagcggcagcctgtgcgcgtgctgagcctgtttcggaatatcgataaagtcctgaaaagcctgggattcctggagagcggctctggctccggcggtggcaccctgaagtacgtggaggatgtgacaaacgtggtcagacgggatgtggagaagtggggccccttcgatctggtgtacggcagcacccaacccctgggcagctcttgtgaccggtgccctggctggtacatgtttcagttccaccggatcctgcagtacgccctgccgagacaggagtcccagcggccattcttttggattttcatggacaacttgctgctgaccgaggatgaccaggaaactaccactcggttcctgcagaccgaagccgtgaccctgcaggacgtgagaggccgggactaccagaacgccatgcgggtgtggtccaacatccctggactgaaaagcaagcacgcacctctgacccctaaagaagaggagtacctgcaggcccaggtgcggagcagaagcaagctggacgcccctaaggtggatctgctggtgaagaattgcctcctgcccctgagagagtacttcaagtatttcagccagaatagtctgcccctgggcggcccaagcagcggcgcccctcctcccagcggcggcagcccagccggctccccaacctctaccgaggagggcacctctgagtccgccacccccgagagcggccctggcacctccaccgagcccagcgagggcagcgcacccggcagccctgccggcagccccacctccacagaggagggaaccagcaccgagcccagcgaaggcagcgccccaggcaccagcaccgagcctagtgagggcggctctggcggcggcagcgcccaggagattaaacggatcaacaagatcagaagaagacttgtgaaagacagcaacaccaagaaggccggcaagacaggccccatgaaaaccctgctggttagagtgatgacacccgatctgagagagcggctggaaaacctgagaaagaagcctgaaaatatcccccagcccatcagcaatacatctagagccaacctgaataagctgctgaccgattacaccgaaatgaagaaggcgatcctgcatgtgtactgggaagagttccagaaggaccctgtgggcctgatgagccgggtggcccagcctgccagcaagaagatcgatcagaacaagctgaaacctgagatggacgagaagggcaacctgaccaccgccggctttgcctgctctcagtgtggccagcccctgttcgtgtacaagctggagcaggtgtctgagaagggcaaggcttacaccaactacttcggacggtgcaatgtggccgagcacgaaaagctgatcctgctggcccagctgaagcccgagaaggatagcgacgaagccgtgacatatagcctgggaaagtttgggcagagggccctggatttctacagcattcatgtgaccaaggagtccacccaccccgtgaagcccctggcccagatcgccggaaacagatacgcctccggacctgtgggaaaggccctgagcgacgcatgtatgggcacaatcgcctccttcctgtctaagtaccaggacatcatcatcgaacaccagaaggtggtgaagggcaaccagaagagactggagagcctgcgggagctggccggcaaggaaaacctggaataccctagcgtgaccctgccacctcagcctcacaccaaggagggcgttgatgcctacaacgaagtgatcgcccgggtgcgaatgtgggtgaacctgaacctgtggcagaagctgaagctaagcagagatgatgccaagcctctgctgagactgaagggattcccttcctttcctctggtcgagagacaggccaacgaagtggactggtgggacatggtgtgtaacgtgaagaagctgatcaacgagaaaaaggaggatggcaaggtgttttggcagaatctggctggctacaagagacaggaagccctgagaccatacctgagcagcgaggaagatcggaagaagggaaagaaattcgctcggtaccagctgggcgacctgctgctgcacctggaaaagaagcacggcgaggactggggaaaggtgtacgacgaggcctgggagcggattgacaagaaagtggaaggcctgagcaagcacatcaagctggaagaggaacggagaagcgaggacgcccagagcaaggccgccctgaccgactggctgcgggctaaggccagcttcgtgatcgagggcctgaaggaggccgacaaggacgagttctgcagatgcgagctgaagctgcagaagtggtacggggacctgcggggaaagcccttcgccatcgaagccgagaacagcatcctggacatcagcggcttcagcaagcagtacaactgtgccttcatctggcagaaggacggcgtgaagaagctgaacctgtacctgatcatcaactacttcaagggcggcaagctgcggttcaagaagatcaaacctgaagccttcgaagccaacagattctacaccgtgatcaacaaaaagagcggcgagatcgtgcccatggaggtgaacttcaacttcgacgaccccaacctgatcatcctgcctctggcctttggcaagagacagggcagagaattcatctggaacgacctgctgtccctggaaaccggcagcctgaagctggccaacggaagagtgatcgagaagacactgtacaacagaagaacccggcaggatgagcctgccctgttcgtggccctgaccttcgagcggcgggaggtcctggactcctccaatatcaaaccaatgaacctgatcggcgtggcaagaggcgaaaacatccccgccgtgatcgccctgaccgaccccgagggctgcccactgagccggtttaaggatagcctgggaaacccaacccacatcctgagaatcggcgagagctataaggagaagcagcggaccatccaggccaagaaggaggtggagcagcggagagccggcggctacagccggaagtacgccagcaaagccaagaatctggcagacgatatggtgagaaacaccgctagagatctgctgtactacgccgtgacccaggatgccatgctgatcttcgccaacctgagccggggcttcggccggcagggcaagcggaccttcatggccgagagacagtacacacggatggaggactggctgaccgccaagctggcctacgagggcctgagcaagacctacctgtccaagacactggcccagtacacctccaagacatgcagcaactgtgggtttaccatcaccagcgccgactacgacagggtgctggagaagctgaagaagacagcaacaggctggatgaccacaattaacggcaaggagctgaaggtggagggccagattacctactacaacagatacaagagacagaacgtagtcaaggacctgtccgtcgagctggatagactgagcgaagaatctgtgaacaacgacatctcctcctggacaaagggcagaagcggagaagctctgagcctcctgaagaaaagattctcccatagacccgtgcaggagaagttcgtgtgcctgaactgcggcttcgagacacacgcagccgagcaagccgccctgaacatcgccagatcctggctgttcctgcggagccaggagtacaagaaataccagacaaacaagacaaccggcaacaccgataagagagccttcgtcgagacctggcagtccttttaccggaagaagcttaaggaggtgtggaaacctgccgtgcggtctggcggatctggcggaggctccacaagcgtgaccttccaggaggtggccgtgtgcttcaccgaggaggagtgggccctgctggaccccggccagagggccctgtacagggtggtgatgcaggagaactacgaggccgtgaccagcctggtggccaagggcaacaagaacagcctgtgccagaccttctgcctgtgctggggcagccccagcagcatgctgttctgcagccccagcctgctgcagggcctgcagaagccccaggactgcaggggcctgtacggcggcgccccccagtgccagaccgtgaccagccccaagaaaaagagaaaagtctaagctgccttctgcggggcttgccttctggccatgcccttcttctctcccttgcacctgtacctcttggtctttgaataaagcctgagtaggaaggctagcaaaaaaaaaaaaaaaaaaaaaaaaaaaaaaaaaaaaaaaaaaaaaaaaaaaaaaaaaaaaaaaaaaaaaaaaaaaaaaaa

SEQ ID NO: 7058 - RNA, 5797 nt, synthetic construct
  source 1..5797: mol_type = other RNA
aggaaataagagagaaaagaagagtaagaagaaatataagagccaccatggcccctaagaagaagcgtaaagtgagccggatggaacgcctcgtctacgaggtgcggcagaagtgcagaaacatcgaggacatctgcatctcctgcggatctctgaacgtgaccctggagcacccactgttcatcggcggcatgtgccagaactgtaaaaactgttttctggagtgtgcctatcaatacgacgatgacggctaccagagctactgcaccatctgttgcggcggaagagaggtgctgatgtgtggaaataacaactgctgccggtgcttctgcgtggaatgcgtggacctgctggtgggccccggcgccgcccaggccgctattaaggaagatccttggaactgctacatgtgcggccacaagggcacatacggcctgctgagacggagagaggactggcctagcagactgcagatgttcttcgccaataaccacgaccaggagttcgacccccctaaggtgtaccctcccgtccccgccgagaagagaaagcccatccgggtcctgagcctgttcgatggcatcgccaccggtctgctggtgctgaaggacctgggcatccaggtggataggtacattgcctccgaggtgtgcgaggactccatcaccgtgggaatggtgcgtcatcagggcaagatcatgtacgtgggcgacgtgcggagcgtgacacagaagcatatccaggagtggggccctttcgacctggtgatcggcggcagcccttgcaatgacctgagcatcgtgaacccagcccggaagggcctgtacgagggaaccggcagactgttcttcgagttttacagactgctgcacgacgcccggcctaaggaaggcgacgaccggcccttcttttggctgttcgagaatgtggtggccatgggagtcagcgacaagcgggatattagccggttcctggagagcaaccccgtgatgatcgatgccaaggaagtgagcgccgcccaccgggccagatacttctggggcaatctgcctggcatgaacagacccctggccagcaccgtgaacgacaagctggagctgcaggagtgcctggagcacggccggatcgccaagttcagcaaggtgagaaccatcaccacccgaagcaacagcatcaaacaaggcaaggaccagcactttcctgtgttcatgaacgagaaggaggacatcctgtggtgtaccgagatggagagagtgttcgggttcccagtccactacacagatgtcagcaacatgtctagactggccagacagagactgctgggaagaagctggtccgtccctgtgatcagacacctgttcgcccctctgaaggagtacttcgcctgcgtgagcagcggcaacagcaacgccaacagccggggccccagcttctctagcggcctggtgccactgtccctgagagggagccacatgggccccatggagatctacaaaaccgtgagcgcctggaagcggcagcctgtgcgcgtgctgagcctgtttcggaatatcgataaagtcctgaaaagcctgggattcctggagagcggctctggctccggcggtggcaccctgaagtacgtggaggatgtgacaaacgtggtcagacgggatgtggagaagtggggccccttcgatctggtgtacggcagcacccaacccctgggcagctcttgtgaccggtgccctggctggtacatgtttcagttccaccggatcctgcagtacgccctgccgagacaggagtcccagcggccattcttttggattttcatggacaacttgctgctgaccgaggatgaccaggaaactaccactcggttcctgcagaccgaagccgtgaccctgcaggacgtgagaggccgggactaccagaacgccatgcgggtgtggtccaacatccctggactgaaaagcaagcacgcacctctgacccctaaagaagaggagtacctgcaggcccaggtgcggagcagaagcaagctggacgcccctaaggtggatctgctggtgaagaattgcctcctgcccctgagagagtacttcaagtatttcagccagaatagtctgcccctgggcggcccaagcagcggcgcccctcctcccagcggcggcagcccagccggctccccaacctctaccgaggagggcacctctgagtccgccacccccgagagcggccctggcacctccaccgagcccagcgagggcagcgcacccggcagccctgccggcagccccacctccacagaggagggaaccagcaccgagcccagcgaaggcagcgccccaggcaccagcaccgagcctagtgagggcggctctggcggcggcagcgcccaggagattaaacggatcaacaagatcagaagaagacttgtgaaagacagcaacaccaagaaggccggcaagacaggccccatgaaaaccctgctggttagagtgatgacacccgatctgagagagcggctggaaaacctgagaaagaagcctgaaaatatcccccagcccatcagcaatacatctagagccaacctgaataagctgctgaccgattacaccgaaatgaagaaggcgatcctgcatgtgtactgggaagagttccagaaggaccctgtgggcctgatgagccgggtggcccagcctgccagcaagaagatcgatcagaacaagctgaaacctgagatggacgagaagggcaacctgaccaccgccggctttgcctgctctcagtgtggccagcccctgttcgtgtacaagctggagcaggtgtctgagaagggcaaggcttacaccaactacttcggacggtgcaatgtggccgagcacgaaaagctgatcctgctggcccagctgaagcccgagaaggatagcgacgaagccgtgacatatagcctgggaaagtttgggcagagggccctggatttctacagcattcatgtgaccaaggagtccacccaccccgtgaagcccctggcccagatcgccggaaacagatacgcctccggacctgtgggaaaggccctgagcgacgcatgtatgggcacaatcgcctccttcctgtctaagtaccaggacatcatcatcgaacaccagaaggtggtgaagggcaaccagaagagactggagagcctgcgggagctggccggcaaggaaaacctggaataccctagcgtgaccctgccacctcagcctcacaccaaggagggcgttgatgcctacaacgaagtgatcgcccgggtgcgaatgtgggtgaacctgaacctgtggcagaagctgaagctaagcagagatgatgccaagcctctgctgagactgaagggattcccttcctttcctctggtcgagagacaggccaacgaagtggactggtgggacatggtgtgtaacgtgaagaagctgatcaacgagaaaaaggaggatggcaaggtgttttggcagaatctggctggctacaagagacaggaagccctgagaccatacctgagcagcgaggaagatcggaagaagggaaagaaattcgctcggtaccagctgggcgacctgctgctgcacctggaaaagaagcacggcgaggactggggaaaggtgtacgacgaggcctgggagcggattgacaagaaagtggaaggcctgagcaagcacatcaagctggaagaggaacggagaagcgaggacgcccagagcaaggccgccctgaccgactggctgcgggctaaggccagcttcgtgatcgagggcctgaaggaggccgacaaggacgagttctgcagatgcgagctgaagctgcagaagtggtacggggacctgcggggaaagcccttcgccatcgaagccgagaacagcatcctggacatcagcggcttcagcaagcagtacaactgtgccttcatctggcagaaggacggcgtgaagaagctgaacctgtacctgatcatcaactacttcaagggcggcaagctgcggttcaagaagatcaaacctgaagccttcgaagccaacagattctacaccgtgatcaacaaaaagagcggcgagatcgtgcccatggaggtgaacttcaacttcgacgaccccaacctgatcatcctgcctctggcctttggcaagagacagggcagagaattcatctggaacgacctgctgtccctggaaaccggcagcctgaagctggccaacggaagagtgatcgagaagacactgtacaacagaagaacccggcaggatgagcctgccctgttcgtggccctgaccttcgagcggcgggaggtcctggactcctccaatatcaaaccaatgaacctgatcggcgtggcaagaggcgaaaacatccccgccgtgatcgccctgaccgaccccgagggctgcccactgagccggtttaaggatagcctgggaaacccaacccacatcctgagaatcggcgagagctataaggagaagcagcggaccatccaggccaagaaggaggtggagcagcggagagccggcggctacagccggaagtacgccagcaaagccaagaatctggcagacgatatggtgagaaacaccgctagagatctgctgtactacgccgtgacccaggatgccatgctgatcttcgccaacctgagccggggcttcggccggcagggcaagcggaccttcatggccgagagacagtacacacggatggaggactggctgaccgccaagctggcctacgagggcctgagcaagacctacctgtccaagacactggcccagtacacctccaagacatgcagcaactgtgggtttaccatcaccagcgccgactacgacagggtgctggagaagctgaagaagacagcaacaggctggatgaccacaattaacggcaaggagctgaaggtggagggccagattacctactacaacagatacaagagacagaacgtagtcaaggacctgtccgtcgagctggatagactgagcgaagaatctgtgaacaacgacatctcctcctggacaaagggcagaagcggagaagctctgagcctcctgaagaaaagattctcccatagacccgtgcaggagaagttcgtgtgcctgaactgcggcttcgagacacacgcagccgagcaagccgccctgaacatcgccagatcctggctgttcctgcggagccaggagtacaagaaataccagacaaacaagacaaccggcaacaccgataagagagccttcgtcgagacctggcagtccttttaccggaagaagcttaaggaggtgtggaaacctgccgtgcggtctggcggatctggcggaggctccacaagcagccacggccccctgagcttcgaggacgtggccatcgccttcaccaaggaggagtggcagcagctggaccccgcccagaggaccctgtacagggacgtgatgctggagaacttcagccacctggtgagcctgggccaccccgtgagcaagcccgacatcatcagcaagctggagcagggcgaggagccctggatcatcaagaggcacatcagcgactggatctgccccgagagggagaccaggaccagccccaagaaaaagagaaaagtctaagctgccttctgcggggcttgccttctggccatgcccttcttctctcccttgcacctgtacctcttggtctttgaataaagcctgagtaggaaggctagcaaaaaaaaaaaaaaaaaaaaaaaaaaaaaaaaaaaaaaaaaaaaaaaaaaaaaaaaaaaaaaaaaaaaaaaaaaaaaaaa

SEQ ID NO: 7059 - RNA, 5797 nt, synthetic construct
  source 1..5797: mol_type = other RNA
aggaaataagagagaaaagaagagtaagaagaaatataagagccaccatggcccctaagaagaagcgtaaagtgagccggatggaacgcctcgtctacgaggtgcggcagaagtgcagaaacatcgaggacatctgcatctcctgcggatctctgaacgtgaccctggagcacccactgttcatcggcggcatgtgccagaactgtaaaaactgttttctggagtgtgcctatcaatacgacgatgacggctaccagagctactgcaccatctgttgcggcggaagagaggtgctgatgtgtggaaataacaactgctgccggtgcttctgcgtggaatgcgtggacctgctggtgggccccggcgccgcccaggccgctattaaggaagatccttggaactgctacatgtgcggccacaagggcacatacggcctgctgagacggagagaggactggcctagcagactgcagatgttcttcgccaataaccacgaccaggagttcgacccccctaaggtgtaccctcccgtccccgccgagaagagaaagcccatccgggtcctgagcctgttcgatggcatcgccaccggtctgctggtgctgaaggacctgggcatccaggtggataggtacattgcctccgaggtgtgcgaggactccatcaccgtgggaatggtgcgtcatcagggcaagatcatgtacgtgggcgacgtgcggagcgtgacacagaagcatatccaggagtggggccctttcgacctggtgatcggcggcagcccttgcaatgacctgagcatcgtgaacccagcccggaagggcctgtacgagggaaccggcagactgttcttcgagttttacagactgctgcacgacgcccggcctaaggaaggcgacgaccggcccttcttttggctgttcgagaatgtggtggccatgggagtcagcgacaagcgggatattagccggttcctggagagcaaccccgtgatgatcgatgccaaggaagtgagcgccgcccaccgggccagatacttctggggcaatctgcctggcatgaacagacccctggccagcaccgtgaacgacaagctggagctgcaggagtgcctggagcacggccggatcgccaagttcagcaaggtgagaaccatcaccacccgaagcaacagcatcaaacaaggcaaggaccagcactttcctgtgttcatgaacgagaaggaggacatcctgtggtgtaccgagatggagagagtgttcgggttcccagtccactacacagatgtcagcaacatgtctagactggccagacagagactgctgggaagaagctggtccgtccctgtgatcagacacctgttcgcccctctgaaggagtacttcgcctgcgtgagcagcggcaacagcaacgccaacagccggggccccagcttctctagcggcctggtgccactgtccctgagagggagccacatgggccccatggagatctacaaaaccgtgagcgcctggaagcggcagcctgtgcgcgtgctgagcctgtttcggaatatcgataaagtcctgaaaagcctgggattcctggagagcggctctggctccggcggtggcaccctgaagtacgtggaggatgtgacaaacgtggtcagacgggatgtggagaagtggggccccttcgatctggtgtacggcagcacccaacccctgggcagctcttgtgaccggtgccctggctggtacatgtttcagttccaccggatcctgcagtacgccctgccgagacaggagtcccagcggccattcttttggattttcatggacaacttgctgctgaccgaggatgaccaggaaactaccactcggttcctgcagaccgaagccgtgaccctgcaggacgtgagaggccgggactaccagaacgccatgcgggtgtggtccaacatccctggactgaaaagcaagcacgcacctctgacccctaaagaagaggagtacctgcaggcccaggtgcggagcagaagcaagctggacgcccctaaggtggatctgctggtgaagaattgcctcctgcccctgagagagtacttcaagtatttcagccagaatagtctgcccctgggcggcccaagcagcggcgcccctcctcccagcggcggcagcccagccggctccccaacctctaccgaggagggcacctctgagtccgccacccccgagagcggccctggcacctccaccgagcccagcgagggcagcgcacccggcagccctgccggcagccccacctccacagaggagggaaccagcaccgagcccagcgaaggcagcgccccaggcaccagcaccgagcctagtgagggcggctctggcggcggcagcgcccaggagattaaacggatcaacaagatcagaagaagacttgtgaaagacagcaacaccaagaaggccggcaagacaggccccatgaaaaccctgctggttagagtgatgacacccgatctgagagagcggctggaaaacctgagaaagaagcctgaaaatatcccccagcccatcagcaatacatctagagccaacctgaataagctgctgaccgattacaccgaaatgaagaaggcgatcctgcatgtgtactgggaagagttccagaaggaccctgtgggcctgatgagccgggtggcccagcctgccagcaagaagatcgatcagaacaagctgaaacctgagatggacgagaagggcaacctgaccaccgccggctttgcctgctctcagtgtggccagcccctgttcgtgtacaagctggagcaggtgtctgagaagggcaaggcttacaccaactacttcggacggtgcaatgtggccgagcacgaaaagctgatcctgctggcccagctgaagcccgagaaggatagcgacgaagccgtgacatatagcctgggaaagtttgggcagagggccctggatttctacagcattcatgtgaccaaggagtccacccaccccgtgaagcccctggcccagatcgccggaaacagatacgcctccggacctgtgggaaaggccctgagcgacgcatgtatgggcacaatcgcctccttcctgtctaagtaccaggacatcatcatcgaacaccagaaggtggtgaagggcaaccagaagagactggagagcctgcgggagctggccggcaaggaaaacctggaataccctagcgtgaccctgccacctcagcctcacaccaaggagggcgttgatgcctacaacgaagtgatcgcccgggtgcgaatgtgggtgaacctgaacctgtggcagaagctgaagctaagcagagatgatgccaagcctctgctgagactgaagggattcccttcctttcctctggtcgagagacaggccaacgaagtggactggtgggacatggtgtgtaacgtgaagaagctgatcaacgagaaaaaggaggatggcaaggtgttttggcagaatctggctggctacaagagacaggaagccctgagaccatacctgagcagcgaggaagatcggaagaagggaaagaaattcgctcggtaccagctgggcgacctgctgctgcacctggaaaagaagcacggcgaggactggggaaaggtgtacgacgaggcctgggagcggattgacaagaaagtggaaggcctgagcaagcacatcaagctggaagaggaacggagaagcgaggacgcccagagcaaggccgccctgaccgactggctgcgggctaaggccagcttcgtgatcgagggcctgaaggaggccgacaaggacgagttctgcagatgcgagctgaagctgcagaagtggtacggggacctgcggggaaagcccttcgccatcgaagccgagaacagcatcctggacatcagcggcttcagcaagcagtacaactgtgccttcatctggcagaaggacggcgtgaagaagctgaacctgtacctgatcatcaactacttcaagggcggcaagctgcggttcaagaagatcaaacctgaagccttcgaagccaacagattctacaccgtgatcaacaaaaagagcggcgagatcgtgcccatggaggtgaacttcaacttcgacgaccccaacctgatcatcctgcctctggcctttggcaagagacagggcagagaattcatctggaacgacctgctgtccctggaaaccggcagcctgaagctggccaacggaagagtgatcgagaagacactgtacaacagaagaacccggcaggatgagcctgccctgttcgtggccctgaccttcgagcggcgggaggtcctggactcctccaatatcaaaccaatgaacctgatcggcgtggcaagaggcgaaaacatccccgccgtgatcgccctgaccgaccccgagggctgcccactgagccggtttaaggatagcctgggaaacccaacccacatcctgagaatcggcgagagctataaggagaagcagcggaccatccaggccaagaaggaggtggagcagcggagagccggcggctacagccggaagtacgccagcaaagccaagaatctggcagacgatatggtgagaaacaccgctagagatctgctgtactacgccgtgacccaggatgccatgctgatcttcgccaacctgagccggggcttcggccggcagggcaagcggaccttcatggccgagagacagtacacacggatggaggactggctgaccgccaagctggcctacgagggcctgagcaagacctacctgtccaagacactggcccagtacacctccaagacatgcagcaactgtgggtttaccatcaccagcgccgactacgacagggtgctggagaagctgaagaagacagcaacaggctggatgaccacaattaacggcaaggagctgaaggtggagggccagattacctactacaacagatacaagagacagaacgtagtcaaggacctgtccgtcgagctggatagactgagcgaagaatctgtgaacaacgacatctcctcctggacaaagggcagaagcggagaagctctgagcctcctgaagaaaagattctcccatagacccgtgcaggagaagttcgtgtgcctgaactgcggcttcgagacacacgcagccgagcaagccgccctgaacatcgccagatcctggctgttcctgcggagccaggagtacaagaaataccagacaaacaagacaaccggcaacaccgataagagagccttcgtcgagacctggcagtccttttaccggaagaagcttaaggaggtgtggaaacctgccgtgcggtctggcggatctggcggaggctccacaagcatgagccagggcagcgtgaccttcagggacgtggccatcgacttcagccaggaggagtggaagtggctgcagcccgcccagagggacctgtacaggtgcgtgatgctggagaactacggccacctggtgagcctgggcctgagcatcagcaagcccgacgtggtgagcctgctggagcagggcaaggagccctggctgggcaagagggaggtgaagagggacctgttcagcgtgagcgagagcaccagccccaagaaaaagagaaaagtctaagctgccttctgcggggcttgccttctggccatgcccttcttctctcccttgcacctgtacctcttggtctttgaataaagcctgagtaggaaggctagcaaaaaaaaaaaaaaaaaaaaaaaaaaaaaaaaaaaaaaaaaaaaaaaaaaaaaaaaaaaaaaaaaaaaaaaaaaaaaaaa

SEQ ID NO: 7060 - RNA, 5797 nt, synthetic construct
  source 1..5797: mol_type = other RNA
aggaaataagagagaaaagaagagtaagaagaaatataagagccaccatggcccctaagaagaagcgtaaagtgagccggatggaacgcctcgtctacgaggtgcggcagaagtgcagaaacatcgaggacatctgcatctcctgcggatctctgaacgtgaccctggagcacccactgttcatcggcggcatgtgccagaactgtaaaaactgttttctggagtgtgcctatcaatacgacgatgacggctaccagagctactgcaccatctgttgcggcggaagagaggtgctgatgtgtggaaataacaactgctgccggtgcttctgcgtggaatgcgtggacctgctggtgggccccggcgccgcccaggccgctattaaggaagatccttggaactgctacatgtgcggccacaagggcacatacggcctgctgagacggagagaggactggcctagcagactgcagatgttcttcgccaataaccacgaccaggagttcgacccccctaaggtgtaccctcccgtccccgccgagaagagaaagcccatccgggtcctgagcctgttcgatggcatcgccaccggtctgctggtgctgaaggacctgggcatccaggtggataggtacattgcctccgaggtgtgcgaggactccatcaccgtgggaatggtgcgtcatcagggcaagatcatgtacgtgggcgacgtgcggagcgtgacacagaagcatatccaggagtggggccctttcgacctggtgatcggcggcagcccttgcaatgacctgagcatcgtgaacccagcccggaagggcctgtacgagggaaccggcagactgttcttcgagttttacagactgctgcacgacgcccggcctaaggaaggcgacgaccggcccttcttttggctgttcgagaatgtggtggccatgggagtcagcgacaagcgggatattagccggttcctggagagcaaccccgtgatgatcgatgccaaggaagtgagcgccgcccaccgggccagatacttctggggcaatctgcctggcatgaacagacccctggccagcaccgtgaacgacaagctggagctgcaggagtgcctggagcacggccggatcgccaagttcagcaaggtgagaaccatcaccacccgaagcaacagcatcaaacaaggcaaggaccagcactttcctgtgttcatgaacgagaaggaggacatcctgtggtgtaccgagatggagagagtgttcgggttcccagtccactacacagatgtcagcaacatgtctagactggccagacagagactgctgggaagaagctggtccgtccctgtgatcagacacctgttcgcccctctgaaggagtacttcgcctgcgtgagcagcggcaacagcaacgccaacagccggggccccagcttctctagcggcctggtgccactgtccctgagagggagccacatgggccccatggagatctacaaaaccgtgagcgcctggaagcggcagcctgtgcgcgtgctgagcctgtttcggaatatcgataaagtcctgaaaagcctgggattcctggagagcggctctggctccggcggtggcaccctgaagtacgtggaggatgtgacaaacgtggtcagacgggatgtggagaagtggggccccttcgatctggtgtacggcagcacccaacccctgggcagctcttgtgaccggtgccctggctggtacatgtttcagttccaccggatcctgcagtacgccctgccgagacaggagtcccagcggccattcttttggattttcatggacaacttgctgctgaccgaggatgaccaggaaactaccactcggttcctgcagaccgaagccgtgaccctgcaggacgtgagaggccgggactaccagaacgccatgcgggtgtggtccaacatccctggactgaaaagcaagcacgcacctctgacccctaaagaagaggagtacctgcaggcccaggtgcggagcagaagcaagctggacgcccctaaggtggatctgctggtgaagaattgcctcctgcccctgagagagtacttcaagtatttcagccagaatagtctgcccctgggcggcccaagcagcggcgcccctcctcccagcggcggcagcccagccggctccccaacctctaccgaggagggcacctctgagtccgccacccccgagagcggccctggcacctccaccgagcccagcgagggcagcgcacccggcagccctgccggcagccccacctccacagaggagggaaccagcaccgagcccagcgaaggcagcgccccaggcaccagcaccgagcctagtgagggcggctctggcggcggcagcgcccaggagattaaacggatcaacaagatcagaagaagacttgtgaaagacagcaacaccaagaaggccggcaagacaggccccatgaaaaccctgctggttagagtgatgacacccgatctgagagagcggctggaaaacctgagaaagaagcctgaaaatatcccccagcccatcagcaatacatctagagccaacctgaataagctgctgaccgattacaccgaaatgaagaaggcgatcctgcatgtgtactgggaagagttccagaaggaccctgtgggcctgatgagccgggtggcccagcctgccagcaagaagatcgatcagaacaagctgaaacctgagatggacgagaagggcaacctgaccaccgccggctttgcctgctctcagtgtggccagcccctgttcgtgtacaagctggagcaggtgtctgagaagggcaaggcttacaccaactacttcggacggtgcaatgtggccgagcacgaaaagctgatcctgctggcccagctgaagcccgagaaggatagcgacgaagccgtgacatatagcctgggaaagtttgggcagagggccctggatttctacagcattcatgtgaccaaggagtccacccaccccgtgaagcccctggcccagatcgccggaaacagatacgcctccggacctgtgggaaaggccctgagcgacgcatgtatgggcacaatcgcctccttcctgtctaagtaccaggacatcatcatcgaacaccagaaggtggtgaagggcaaccagaagagactggagagcctgcgggagctggccggcaaggaaaacctggaataccctagcgtgaccctgccacctcagcctcacaccaaggagggcgttgatgcctacaacgaagtgatcgcccgggtgcgaatgtgggtgaacctgaacctgtggcagaagctgaagctaagcagagatgatgccaagcctctgctgagactgaagggattcccttcctttcctctggtcgagagacaggccaacgaagtggactggtgggacatggtgtgtaacgtgaagaagctgatcaacgagaaaaaggaggatggcaaggtgttttggcagaatctggctggctacaagagacaggaagccctgagaccatacctgagcagcgaggaagatcggaagaagggaaagaaattcgctcggtaccagctgggcgacctgctgctgcacctggaaaagaagcacggcgaggactggggaaaggtgtacgacgaggcctgggagcggattgacaagaaagtggaaggcctgagcaagcacatcaagctggaagaggaacggagaagcgaggacgcccagagcaaggccgccctgaccgactggctgcgggctaaggccagcttcgtgatcgagggcctgaaggaggccgacaaggacgagttctgcagatgcgagctgaagctgcagaagtggtacggggacctgcggggaaagcccttcgccatcgaagccgagaacagcatcctggacatcagcggcttcagcaagcagtacaactgtgccttcatctggcagaaggacggcgtgaagaagctgaacctgtacctgatcatcaactacttcaagggcggcaagctgcggttcaagaagatcaaacctgaagccttcgaagccaacagattctacaccgtgatcaacaaaaagagcggcgagatcgtgcccatggaggtgaacttcaacttcgacgaccccaacctgatcatcctgcctctggcctttggcaagagacagggcagagaattcatctggaacgacctgctgtccctggaaaccggcagcctgaagctggccaacggaagagtgatcgagaagacactgtacaacagaagaacccggcaggatgagcctgccctgttcgtggccctgaccttcgagcggcgggaggtcctggactcctccaatatcaaaccaatgaacctgatcggcgtggcaagaggcgaaaacatccccgccgtgatcgccctgaccgaccccgagggctgcccactgagccggtttaaggatagcctgggaaacccaacccacatcctgagaatcggcgagagctataaggagaagcagcggaccatccaggccaagaaggaggtggagcagcggagagccggcggctacagccggaagtacgccagcaaagccaagaatctggcagacgatatggtgagaaacaccgctagagatctgctgtactacgccgtgacccaggatgccatgctgatcttcgccaacctgagccggggcttcggccggcagggcaagcggaccttcatggccgagagacagtacacacggatggaggactggctgaccgccaagctggcctacgagggcctgagcaagacctacctgtccaagacactggcccagtacacctccaagacatgcagcaactgtgggtttaccatcaccagcgccgactacgacagggtgctggagaagctgaagaagacagcaacaggctggatgaccacaattaacggcaaggagctgaaggtggagggccagattacctactacaacagatacaagagacagaacgtagtcaaggacctgtccgtcgagctggatagactgagcgaagaatctgtgaacaacgacatctcctcctggacaaagggcagaagcggagaagctctgagcctcctgaagaaaagattctcccatagacccgtgcaggagaagttcgtgtgcctgaactgcggcttcgagacacacgcagccgagcaagccgccctgaacatcgccagatcctggctgttcctgcggagccaggagtacaagaaataccagacaaacaagacaaccggcaacaccgataagagagccttcgtcgagacctggcagtccttttaccggaagaagcttaaggaggtgtggaaacctgccgtgcggtctggcggatctggcggaggctccacaagcccccagggcagcgtgaccttcagggacgtggccgtgaacttcagccaggacgagtggggcaggctggaccccagccagaaggagctgtacagggaggtgatgctggagaactaccacaacctggtgtgcctgggcctggccgccagcaagcccgacgtgatcgaccagctggagaggggcgaggccccctggatgcccggcatcggctgccccgaccagaagatcaggagcgacacccaggagaccagccccaagaaaaagagaaaagtctaagctgccttctgcggggcttgccttctggccatgcccttcttctctcccttgcacctgtacctcttggtctttgaataaagcctgagtaggaaggctagcaaaaaaaaaaaaaaaaaaaaaaaaaaaaaaaaaaaaaaaaaaaaaaaaaaaaaaaaaaaaaaaaaaaaaaaaaaaaaaaa

SEQ ID NO: 7061 - RNA, 5797 nt, synthetic construct
  source 1..5797: mol_type = other RNA
aggaaataagagagaaaagaagagtaagaagaaatataagagccaccatggcccctaagaagaagcgtaaagtgagccggatggaacgcctcgtctacgaggtgcggcagaagtgcagaaacatcgaggacatctgcatctcctgcggatctctgaacgtgaccctggagcacccactgttcatcggcggcatgtgccagaactgtaaaaactgttttctggagtgtgcctatcaatacgacgatgacggctaccagagctactgcaccatctgttgcggcggaagagaggtgctgatgtgtggaaataacaactgctgccggtgcttctgcgtggaatgcgtggacctgctggtgggccccggcgccgcccaggccgctattaaggaagatccttggaactgctacatgtgcggccacaagggcacatacggcctgctgagacggagagaggactggcctagcagactgcagatgttcttcgccaataaccacgaccaggagttcgacccccctaaggtgtaccctcccgtccccgccgagaagagaaagcccatccgggtcctgagcctgttcgatggcatcgccaccggtctgctggtgctgaaggacctgggcatccaggtggataggtacattgcctccgaggtgtgcgaggactccatcaccgtgggaatggtgcgtcatcagggcaagatcatgtacgtgggcgacgtgcggagcgtgacacagaagcatatccaggagtggggccctttcgacctggtgatcggcggcagcccttgcaatgacctgagcatcgtgaacccagcccggaagggcctgtacgagggaaccggcagactgttcttcgagttttacagactgctgcacgacgcccggcctaaggaaggcgacgaccggcccttcttttggctgttcgagaatgtggtggccatgggagtcagcgacaagcgggatattagccggttcctggagagcaaccccgtgatgatcgatgccaaggaagtgagcgccgcccaccgggccagatacttctggggcaatctgcctggcatgaacagacccctggccagcaccgtgaacgacaagctggagctgcaggagtgcctggagcacggccggatcgccaagttcagcaaggtgagaaccatcaccacccgaagcaacagcatcaaacaaggcaaggaccagcactttcctgtgttcatgaacgagaaggaggacatcctgtggtgtaccgagatggagagagtgttcgggttcccagtccactacacagatgtcagcaacatgtctagactggccagacagagactgctgggaagaagctggtccgtccctgtgatcagacacctgttcgcccctctgaaggagtacttcgcctgcgtgagcagcggcaacagcaacgccaacagccggggccccagcttctctagcggcctggtgccactgtccctgagagggagccacatgggccccatggagatctacaaaaccgtgagcgcctggaagcggcagcctgtgcgcgtgctgagcctgtttcggaatatcgataaagtcctgaaaagcctgggattcctggagagcggctctggctccggcggtggcaccctgaagtacgtggaggatgtgacaaacgtggtcagacgggatgtggagaagtggggccccttcgatctggtgtacggcagcacccaacccctgggcagctcttgtgaccggtgccctggctggtacatgtttcagttccaccggatcctgcagtacgccctgccgagacaggagtcccagcggccattcttttggattttcatggacaacttgctgctgaccgaggatgaccaggaaactaccactcggttcctgcagaccgaagccgtgaccctgcaggacgtgagaggccgggactaccagaacgccatgcgggtgtggtccaacatccctggactgaaaagcaagcacgcacctctgacccctaaagaagaggagtacctgcaggcccaggtgcggagcagaagcaagctggacgcccctaaggtggatctgctggtgaagaattgcctcctgcccctgagagagtacttcaagtatttcagccagaatagtctgcccctgggcggcccaagcagcggcgcccctcctcccagcggcggcagcccagccggctccccaacctctaccgaggagggcacctctgagtccgccacccccgagagcggccctggcacctccaccgagcccagcgagggcagcgcacccggcagccctgccggcagccccacctccacagaggagggaaccagcaccgagcccagcgaaggcagcgccccaggcaccagcaccgagcctagtgagggcggctctggcggcggcagcgcccaggagattaaacggatcaacaagatcagaagaagacttgtgaaagacagcaacaccaagaaggccggcaagacaggccccatgaaaaccctgctggttagagtgatgacacccgatctgagagagcggctggaaaacctgagaaagaagcctgaaaatatcccccagcccatcagcaatacatctagagccaacctgaataagctgctgaccgattacaccgaaatgaagaaggcgatcctgcatgtgtactgggaagagttccagaaggaccctgtgggcctgatgagccgggtggcccagcctgccagcaagaagatcgatcagaacaagctgaaacctgagatggacgagaagggcaacctgaccaccgccggctttgcctgctctcagtgtggccagcccctgttcgtgtacaagctggagcaggtgtctgagaagggcaaggcttacaccaactacttcggacggtgcaatgtggccgagcacgaaaagctgatcctgctggcccagctgaagcccgagaaggatagcgacgaagccgtgacatatagcctgggaaagtttgggcagagggccctggatttctacagcattcatgtgaccaaggagtccacccaccccgtgaagcccctggcccagatcgccggaaacagatacgcctccggacctgtgggaaaggccctgagcgacgcatgtatgggcacaatcgcctccttcctgtctaagtaccaggacatcatcatcgaacaccagaaggtggtgaagggcaaccagaagagactggagagcctgcgggagctggccggcaaggaaaacctggaataccctagcgtgaccctgccacctcagcctcacaccaaggagggcgttgatgcctacaacgaagtgatcgcccgggtgcgaatgtgggtgaacctgaacctgtggcagaagctgaagctaagcagagatgatgccaagcctctgctgagactgaagggattcccttcctttcctctggtcgagagacaggccaacgaagtggactggtgggacatggtgtgtaacgtgaagaagctgatcaacgagaaaaaggaggatggcaaggtgttttggcagaatctggctggctacaagagacaggaagccctgagaccatacctgagcagcgaggaagatcggaagaagggaaagaaattcgctcggtaccagctgggcgacctgctgctgcacctggaaaagaagcacggcgaggactggggaaaggtgtacgacgaggcctgggagcggattgacaagaaagtggaaggcctgagcaagcacatcaagctggaagaggaacggagaagcgaggacgcccagagcaaggccgccctgaccgactggctgcgggctaaggccagcttcgtgatcgagggcctgaaggaggccgacaaggacgagttctgcagatgcgagctgaagctgcagaagtggtacggggacctgcggggaaagcccttcgccatcgaagccgagaacagcatcctggacatcagcggcttcagcaagcagtacaactgtgccttcatctggcagaaggacggcgtgaagaagctgaacctgtacctgatcatcaactacttcaagggcggcaagctgcggttcaagaagatcaaacctgaagccttcgaagccaacagattctacaccgtgatcaacaaaaagagcggcgagatcgtgcccatggaggtgaacttcaacttcgacgaccccaacctgatcatcctgcctctggcctttggcaagagacagggcagagaattcatctggaacgacctgctgtccctggaaaccggcagcctgaagctggccaacggaagagtgatcgagaagacactgtacaacagaagaacccggcaggatgagcctgccctgttcgtggccctgaccttcgagcggcgggaggtcctggactcctccaatatcaaaccaatgaacctgatcggcgtggcaagaggcgaaaacatccccgccgtgatcgccctgaccgaccccgagggctgcccactgagccggtttaaggatagcctgggaaacccaacccacatcctgagaatcggcgagagctataaggagaagcagcggaccatccaggccaagaaggaggtggagcagcggagagccggcggctacagccggaagtacgccagcaaagccaagaatctggcagacgatatggtgagaaacaccgctagagatctgctgtactacgccgtgacccaggatgccatgctgatcttcgccaacctgagccggggcttcggccggcagggcaagcggaccttcatggccgagagacagtacacacggatggaggactggctgaccgccaagctggcctacgagggcctgagcaagacctacctgtccaagacactggcccagtacacctccaagacatgcagcaactgtgggtttaccatcaccagcgccgactacgacagggtgctggagaagctgaagaagacagcaacaggctggatgaccacaattaacggcaaggagctgaaggtggagggccagattacctactacaacagatacaagagacagaacgtagtcaaggacctgtccgtcgagctggatagactgagcgaagaatctgtgaacaacgacatctcctcctggacaaagggcagaagcggagaagctctgagcctcctgaagaaaagattctcccatagacccgtgcaggagaagttcgtgtgcctgaactgcggcttcgagacacacgcagccgagcaagccgccctgaacatcgccagatcctggctgttcctgcggagccaggagtacaagaaataccagacaaacaagacaaccggcaacaccgataagagagccttcgtcgagacctggcagtccttttaccggaagaagcttaaggaggtgtggaaacctgccgtgcggtctggcggatctggcggaggctccacaagcatggacctggtgatgttcagggacgtggccgtggacttcagccaggaggagtgggagtgcctgaacagctaccagaggaacctgtacagggacgtgatcctggagaactacagcaacctggtgagcctggccggctgcagcatcagcaagcccgacgtgatcaccctgctggagcagggcaaggagccctggctggtggtgaggaacgagaagaggaggtggagcctggacctggagagcaggaccagccccaagaaaaagagaaaagtctaagctgccttctgcggggcttgccttctggccatgcccttcttctctcccttgcacctgtacctcttggtctttgaataaagcctgagtaggaaggctagcaaaaaaaaaaaaaaaaaaaaaaaaaaaaaaaaaaaaaaaaaaaaaaaaaaaaaaaaaaaaaaaaaaaaaaaaaaaaaaaa

SEQ ID NO: 7062 - RNA, 5797 nt, synthetic construct
  source 1..5797: mol_type = other RNA
aggaaataagagagaaaagaagagtaagaagaaatataagagccaccatggcccctaagaagaagcgtaaagtgagccggatggaacgcctcgtctacgaggtgcggcagaagtgcagaaacatcgaggacatctgcatctcctgcggatctctgaacgtgaccctggagcacccactgttcatcggcggcatgtgccagaactgtaaaaactgttttctggagtgtgcctatcaatacgacgatgacggctaccagagctactgcaccatctgttgcggcggaagagaggtgctgatgtgtggaaataacaactgctgccggtgcttctgcgtggaatgcgtggacctgctggtgggccccggcgccgcccaggccgctattaaggaagatccttggaactgctacatgtgcggccacaagggcacatacggcctgctgagacggagagaggactggcctagcagactgcagatgttcttcgccaataaccacgaccaggagttcgacccccctaaggtgtaccctcccgtccccgccgagaagagaaagcccatccgggtcctgagcctgttcgatggcatcgccaccggtctgctggtgctgaaggacctgggcatccaggtggataggtacattgcctccgaggtgtgcgaggactccatcaccgtgggaatggtgcgtcatcagggcaagatcatgtacgtgggcgacgtgcggagcgtgacacagaagcatatccaggagtggggccctttcgacctggtgatcggcggcagcccttgcaatgacctgagcatcgtgaacccagcccggaagggcctgtacgagggaaccggcagactgttcttcgagttttacagactgctgcacgacgcccggcctaaggaaggcgacgaccggcccttcttttggctgttcgagaatgtggtggccatgggagtcagcgacaagcgggatattagccggttcctggagagcaaccccgtgatgatcgatgccaaggaagtgagcgccgcccaccgggccagatacttctggggcaatctgcctggcatgaacagacccctggccagcaccgtgaacgacaagctggagctgcaggagtgcctggagcacggccggatcgccaagttcagcaaggtgagaaccatcaccacccgaagcaacagcatcaaacaaggcaaggaccagcactttcctgtgttcatgaacgagaaggaggacatcctgtggtgtaccgagatggagagagtgttcgggttcccagtccactacacagatgtcagcaacatgtctagactggccagacagagactgctgggaagaagctggtccgtccctgtgatcagacacctgttcgcccctctgaaggagtacttcgcctgcgtgagcagcggcaacagcaacgccaacagccggggccccagcttctctagcggcctggtgccactgtccctgagagggagccacatgggccccatggagatctacaaaaccgtgagcgcctggaagcggcagcctgtgcgcgtgctgagcctgtttcggaatatcgataaagtcctgaaaagcctgggattcctggagagcggctctggctccggcggtggcaccctgaagtacgtggaggatgtgacaaacgtggtcagacgggatgtggagaagtggggccccttcgatctggtgtacggcagcacccaacccctgggcagctcttgtgaccggtgccctggctggtacatgtttcagttccaccggatcctgcagtacgccctgccgagacaggagtcccagcggccattcttttggattttcatggacaacttgctgctgaccgaggatgaccaggaaactaccactcggttcctgcagaccgaagccgtgaccctgcaggacgtgagaggccgggactaccagaacgccatgcgggtgtggtccaacatccctggactgaaaagcaagcacgcacctctgacccctaaagaagaggagtacctgcaggcccaggtgcggagcagaagcaagctggacgcccctaaggtggatctgctggtgaagaattgcctcctgcccctgagagagtacttcaagtatttcagccagaatagtctgcccctgggcggcccaagcagcggcgcccctcctcccagcggcggcagcccagccggctccccaacctctaccgaggagggcacctctgagtccgccacccccgagagcggccctggcacctccaccgagcccagcgagggcagcgcacccggcagccctgccggcagccccacctccacagaggagggaaccagcaccgagcccagcgaaggcagcgccccaggcaccagcaccgagcctagtgagggcggctctggcggcggcagcgcccaggagattaaacggatcaacaagatcagaagaagacttgtgaaagacagcaacaccaagaaggccggcaagacaggccccatgaaaaccctgctggttagagtgatgacacccgatctgagagagcggctggaaaacctgagaaagaagcctgaaaatatcccccagcccatcagcaatacatctagagccaacctgaataagctgctgaccgattacaccgaaatgaagaaggcgatcctgcatgtgtactgggaagagttccagaaggaccctgtgggcctgatgagccgggtggcccagcctgccagcaagaagatcgatcagaacaagctgaaacctgagatggacgagaagggcaacctgaccaccgccggctttgcctgctctcagtgtggccagcccctgttcgtgtacaagctggagcaggtgtctgagaagggcaaggcttacaccaactacttcggacggtgcaatgtggccgagcacgaaaagctgatcctgctggcccagctgaagcccgagaaggatagcgacgaagccgtgacatatagcctgggaaagtttgggcagagggccctggatttctacagcattcatgtgaccaaggagtccacccaccccgtgaagcccctggcccagatcgccggaaacagatacgcctccggacctgtgggaaaggccctgagcgacgcatgtatgggcacaatcgcctccttcctgtctaagtaccaggacatcatcatcgaacaccagaaggtggtgaagggcaaccagaagagactggagagcctgcgggagctggccggcaaggaaaacctggaataccctagcgtgaccctgccacctcagcctcacaccaaggagggcgttgatgcctacaacgaagtgatcgcccgggtgcgaatgtgggtgaacctgaacctgtggcagaagctgaagctaagcagagatgatgccaagcctctgctgagactgaagggattcccttcctttcctctggtcgagagacaggccaacgaagtggactggtgggacatggtgtgtaacgtgaagaagctgatcaacgagaaaaaggaggatggcaaggtgttttggcagaatctggctggctacaagagacaggaagccctgagaccatacctgagcagcgaggaagatcggaagaagggaaagaaattcgctcggtaccagctgggcgacctgctgctgcacctggaaaagaagcacggcgaggactggggaaaggtgtacgacgaggcctgggagcggattgacaagaaagtggaaggcctgagcaagcacatcaagctggaagaggaacggagaagcgaggacgcccagagcaaggccgccctgaccgactggctgcgggctaaggccagcttcgtgatcgagggcctgaaggaggccgacaaggacgagttctgcagatgcgagctgaagctgcagaagtggtacggggacctgcggggaaagcccttcgccatcgaagccgagaacagcatcctggacatcagcggcttcagcaagcagtacaactgtgccttcatctggcagaaggacggcgtgaagaagctgaacctgtacctgatcatcaactacttcaagggcggcaagctgcggttcaagaagatcaaacctgaagccttcgaagccaacagattctacaccgtgatcaacaaaaagagcggcgagatcgtgcccatggaggtgaacttcaacttcgacgaccccaacctgatcatcctgcctctggcctttggcaagagacagggcagagaattcatctggaacgacctgctgtccctggaaaccggcagcctgaagctggccaacggaagagtgatcgagaagacactgtacaacagaagaacccggcaggatgagcctgccctgttcgtggccctgaccttcgagcggcgggaggtcctggactcctccaatatcaaaccaatgaacctgatcggcgtggcaagaggcgaaaacatccccgccgtgatcgccctgaccgaccccgagggctgcccactgagccggtttaaggatagcctgggaaacccaacccacatcctgagaatcggcgagagctataaggagaagcagcggaccatccaggccaagaaggaggtggagcagcggagagccggcggctacagccggaagtacgccagcaaagccaagaatctggcagacgatatggtgagaaacaccgctagagatctgctgtactacgccgtgacccaggatgccatgctgatcttcgccaacctgagccggggcttcggccggcagggcaagcggaccttcatggccgagagacagtacacacggatggaggactggctgaccgccaagctggcctacgagggcctgagcaagacctacctgtccaagacactggcccagtacacctccaagacatgcagcaactgtgggtttaccatcaccagcgccgactacgacagggtgctggagaagctgaagaagacagcaacaggctggatgaccacaattaacggcaaggagctgaaggtggagggccagattacctactacaacagatacaagagacagaacgtagtcaaggacctgtccgtcgagctggatagactgagcgaagaatctgtgaacaacgacatctcctcctggacaaagggcagaagcggagaagctctgagcctcctgaagaaaagattctcccatagacccgtgcaggagaagttcgtgtgcctgaactgcggcttcgagacacacgcagccgagcaagccgccctgaacatcgccagatcctggctgttcctgcggagccaggagtacaagaaataccagacaaacaagacaaccggcaacaccgataagagagccttcgtcgagacctggcagtccttttaccggaagaagcttaaggaggtgtggaaacctgccgtgcggtctggcggatctggcggaggctccacaagcagcgtgaccttcgaggacgtggccgtgaacttcagcctggaggagtggaacctgctgaacgaggcccagaggtgcctgtacagggacgtgatgctggagaccctgaccctgatcagcagcctgggcgcccccccccacaccctgttccccgccagggcctgcggccccgaggccccccccagcaggcactgccccaggcccagcctgtgcctgagcctgagccccctgcaccccaccggcgtgaccagccccaagaaaaagagaaaagtctaagctgccttctgcggggcttgccttctggccatgcccttcttctctcccttgcacctgtacctcttggtctttgaataaagcctgagtaggaaggctagcaaaaaaaaaaaaaaaaaaaaaaaaaaaaaaaaaaaaaaaaaaaaaaaaaaaaaaaaaaaaaaaaaaaaaaaaaaaaaaaa

SEQ ID NO: 7063 - RNA, 5797 nt, synthetic construct
  source 1..5797: mol_type = other RNA
aggaaataagagagaaaagaagagtaagaagaaatataagagccaccatggcccctaagaagaagcgtaaagtgagccggatggaacgcctcgtctacgaggtgcggcagaagtgcagaaacatcgaggacatctgcatctcctgcggatctctgaacgtgaccctggagcacccactgttcatcggcggcatgtgccagaactgtaaaaactgttttctggagtgtgcctatcaatacgacgatgacggctaccagagctactgcaccatctgttgcggcggaagagaggtgctgatgtgtggaaataacaactgctgccggtgcttctgcgtggaatgcgtggacctgctggtgggccccggcgccgcccaggccgctattaaggaagatccttggaactgctacatgtgcggccacaagggcacatacggcctgctgagacggagagaggactggcctagcagactgcagatgttcttcgccaataaccacgaccaggagttcgacccccctaaggtgtaccctcccgtccccgccgagaagagaaagcccatccgggtcctgagcctgttcgatggcatcgccaccggtctgctggtgctgaaggacctgggcatccaggtggataggtacattgcctccgaggtgtgcgaggactccatcaccgtgggaatggtgcgtcatcagggcaagatcatgtacgtgggcgacgtgcggagcgtgacacagaagcatatccaggagtggggccctttcgacctggtgatcggcggcagcccttgcaatgacctgagcatcgtgaacccagcccggaagggcctgtacgagggaaccggcagactgttcttcgagttttacagactgctgcacgacgcccggcctaaggaaggcgacgaccggcccttcttttggctgttcgagaatgtggtggccatgggagtcagcgacaagcgggatattagccggttcctggagagcaaccccgtgatgatcgatgccaaggaagtgagcgccgcccaccgggccagatacttctggggcaatctgcctggcatgaacagacccctggccagcaccgtgaacgacaagctggagctgcaggagtgcctggagcacggccggatcgccaagttcagcaaggtgagaaccatcaccacccgaagcaacagcatcaaacaaggcaaggaccagcactttcctgtgttcatgaacgagaaggaggacatcctgtggtgtaccgagatggagagagtgttcgggttcccagtccactacacagatgtcagcaacatgtctagactggccagacagagactgctgggaagaagctggtccgtccctgtgatcagacacctgttcgcccctctgaaggagtacttcgcctgcgtgagcagcggcaacagcaacgccaacagccggggccccagcttctctagcggcctggtgccactgtccctgagagggagccacatgggccccatggagatctacaaaaccgtgagcgcctggaagcggcagcctgtgcgcgtgctgagcctgtttcggaatatcgataaagtcctgaaaagcctgggattcctggagagcggctctggctccggcggtggcaccctgaagtacgtggaggatgtgacaaacgtggtcagacgggatgtggagaagtggggccccttcgatctggtgtacggcagcacccaacccctgggcagctcttgtgaccggtgccctggctggtacatgtttcagttccaccggatcctgcagtacgccctgccgagacaggagtcccagcggccattcttttggattttcatggacaacttgctgctgaccgaggatgaccaggaaactaccactcggttcctgcagaccgaagccgtgaccctgcaggacgtgagaggccgggactaccagaacgccatgcgggtgtggtccaacatccctggactgaaaagcaagcacgcacctctgacccctaaagaagaggagtacctgcaggcccaggtgcggagcagaagcaagctggacgcccctaaggtggatctgctggtgaagaattgcctcctgcccctgagagagtacttcaagtatttcagccagaatagtctgcccctgggcggcccaagcagcggcgcccctcctcccagcggcggcagcccagccggctccccaacctctaccgaggagggcacctctgagtccgccacccccgagagcggccctggcacctccaccgagcccagcgagggcagcgcacccggcagccctgccggcagccccacctccacagaggagggaaccagcaccgagcccagcgaaggcagcgccccaggcaccagcaccgagcctagtgagggcggctctggcggcggcagcgcccaggagattaaacggatcaacaagatcagaagaagacttgtgaaagacagcaacaccaagaaggccggcaagacaggccccatgaaaaccctgctggttagagtgatgacacccgatctgagagagcggctggaaaacctgagaaagaagcctgaaaatatcccccagcccatcagcaatacatctagagccaacctgaataagctgctgaccgattacaccgaaatgaagaaggcgatcctgcatgtgtactgggaagagttccagaaggaccctgtgggcctgatgagccgggtggcccagcctgccagcaagaagatcgatcagaacaagctgaaacctgagatggacgagaagggcaacctgaccaccgccggctttgcctgctctcagtgtggccagcccctgttcgtgtacaagctggagcaggtgtctgagaagggcaaggcttacaccaactacttcggacggtgcaatgtggccgagcacgaaaagctgatcctgctggcccagctgaagcccgagaaggatagcgacgaagccgtgacatatagcctgggaaagtttgggcagagggccctggatttctacagcattcatgtgaccaaggagtccacccaccccgtgaagcccctggcccagatcgccggaaacagatacgcctccggacctgtgggaaaggccctgagcgacgcatgtatgggcacaatcgcctccttcctgtctaagtaccaggacatcatcatcgaacaccagaaggtggtgaagggcaaccagaagagactggagagcctgcgggagctggccggcaaggaaaacctggaataccctagcgtgaccctgccacctcagcctcacaccaaggagggcgttgatgcctacaacgaagtgatcgcccgggtgcgaatgtgggtgaacctgaacctgtggcagaagctgaagctaagcagagatgatgccaagcctctgctgagactgaagggattcccttcctttcctctggtcgagagacaggccaacgaagtggactggtgggacatggtgtgtaacgtgaagaagctgatcaacgagaaaaaggaggatggcaaggtgttttggcagaatctggctggctacaagagacaggaagccctgagaccatacctgagcagcgaggaagatcggaagaagggaaagaaattcgctcggtaccagctgggcgacctgctgctgcacctggaaaagaagcacggcgaggactggggaaaggtgtacgacgaggcctgggagcggattgacaagaaagtggaaggcctgagcaagcacatcaagctggaagaggaacggagaagcgaggacgcccagagcaaggccgccctgaccgactggctgcgggctaaggccagcttcgtgatcgagggcctgaaggaggccgacaaggacgagttctgcagatgcgagctgaagctgcagaagtggtacggggacctgcggggaaagcccttcgccatcgaagccgagaacagcatcctggacatcagcggcttcagcaagcagtacaactgtgccttcatctggcagaaggacggcgtgaagaagctgaacctgtacctgatcatcaactacttcaagggcggcaagctgcggttcaagaagatcaaacctgaagccttcgaagccaacagattctacaccgtgatcaacaaaaagagcggcgagatcgtgcccatggaggtgaacttcaacttcgacgaccccaacctgatcatcctgcctctggcctttggcaagagacagggcagagaattcatctggaacgacctgctgtccctggaaaccggcagcctgaagctggccaacggaagagtgatcgagaagacactgtacaacagaagaacccggcaggatgagcctgccctgttcgtggccctgaccttcgagcggcgggaggtcctggactcctccaatatcaaaccaatgaacctgatcggcgtggcaagaggcgaaaacatccccgccgtgatcgccctgaccgaccccgagggctgcccactgagccggtttaaggatagcctgggaaacccaacccacatcctgagaatcggcgagagctataaggagaagcagcggaccatccaggccaagaaggaggtggagcagcggagagccggcggctacagccggaagtacgccagcaaagccaagaatctggcagacgatatggtgagaaacaccgctagagatctgctgtactacgccgtgacccaggatgccatgctgatcttcgccaacctgagccggggcttcggccggcagggcaagcggaccttcatggccgagagacagtacacacggatggaggactggctgaccgccaagctggcctacgagggcctgagcaagacctacctgtccaagacactggcccagtacacctccaagacatgcagcaactgtgggtttaccatcaccagcgccgactacgacagggtgctggagaagctgaagaagacagcaacaggctggatgaccacaattaacggcaaggagctgaaggtggagggccagattacctactacaacagatacaagagacagaacgtagtcaaggacctgtccgtcgagctggatagactgagcgaagaatctgtgaacaacgacatctcctcctggacaaagggcagaagcggagaagctctgagcctcctgaagaaaagattctcccatagacccgtgcaggagaagttcgtgtgcctgaactgcggcttcgagacacacgcagccgagcaagccgccctgaacatcgccagatcctggctgttcctgcggagccaggagtacaagaaataccagacaaacaagacaaccggcaacaccgataagagagccttcgtcgagacctggcagtccttttaccggaagaagcttaaggaggtgtggaaacctgccgtgcggtctggcggatctggcggaggctccacaagctgcagcaaggagcccctgtgcctgcaggagcccgtgagcttcgccgacgtggccgtgtacttcagcagggaggagtgggccctgctggaccccgcccagagggccctgtactgggacgtgatgctggagacctacgagtgcatcgccagcctgggcggcgaggacccctggatccccgacgtgcacggcctgaaggacatggccggcgacacctgccccggcgacggcatcgccgacctgaagaccagccccaagaaaaagagaaaagtctaagctgccttctgcggggcttgccttctggccatgcccttcttctctcccttgcacctgtacctcttggtctttgaataaagcctgagtaggaaggctagcaaaaaaaaaaaaaaaaaaaaaaaaaaaaaaaaaaaaaaaaaaaaaaaaaaaaaaaaaaaaaaaaaaaaaaaaaaaaaaaa

SEQ ID NO: 7064 - RNA, 5797 nt, synthetic construct
  source 1..5797: mol_type = other RNA
aggaaataagagagaaaagaagagtaagaagaaatataagagccaccatggcccctaagaagaagcgtaaagtgagccggatggaacgcctcgtctacgaggtgcggcagaagtgcagaaacatcgaggacatctgcatctcctgcggatctctgaacgtgaccctggagcacccactgttcatcggcggcatgtgccagaactgtaaaaactgttttctggagtgtgcctatcaatacgacgatgacggctaccagagctactgcaccatctgttgcggcggaagagaggtgctgatgtgtggaaataacaactgctgccggtgcttctgcgtggaatgcgtggacctgctggtgggccccggcgccgcccaggccgctattaaggaagatccttggaactgctacatgtgcggccacaagggcacatacggcctgctgagacggagagaggactggcctagcagactgcagatgttcttcgccaataaccacgaccaggagttcgacccccctaaggtgtaccctcccgtccccgccgagaagagaaagcccatccgggtcctgagcctgttcgatggcatcgccaccggtctgctggtgctgaaggacctgggcatccaggtggataggtacattgcctccgaggtgtgcgaggactccatcaccgtgggaatggtgcgtcatcagggcaagatcatgtacgtgggcgacgtgcggagcgtgacacagaagcatatccaggagtggggccctttcgacctggtgatcggcggcagcccttgcaatgacctgagcatcgtgaacccagcccggaagggcctgtacgagggaaccggcagactgttcttcgagttttacagactgctgcacgacgcccggcctaaggaaggcgacgaccggcccttcttttggctgttcgagaatgtggtggccatgggagtcagcgacaagcgggatattagccggttcctggagagcaaccccgtgatgatcgatgccaaggaagtgagcgccgcccaccgggccagatacttctggggcaatctgcctggcatgaacagacccctggccagcaccgtgaacgacaagctggagctgcaggagtgcctggagcacggccggatcgccaagttcagcaaggtgagaaccatcaccacccgaagcaacagcatcaaacaaggcaaggaccagcactttcctgtgttcatgaacgagaaggaggacatcctgtggtgtaccgagatggagagagtgttcgggttcccagtccactacacagatgtcagcaacatgtctagactggccagacagagactgctgggaagaagctggtccgtccctgtgatcagacacctgttcgcccctctgaaggagtacttcgcctgcgtgagcagcggcaacagcaacgccaacagccggggccccagcttctctagcggcctggtgccactgtccctgagagggagccacatgggccccatggagatctacaaaaccgtgagcgcctggaagcggcagcctgtgcgcgtgctgagcctgtttcggaatatcgataaagtcctgaaaagcctgggattcctggagagcggctctggctccggcggtggcaccctgaagtacgtggaggatgtgacaaacgtggtcagacgggatgtggagaagtggggccccttcgatctggtgtacggcagcacccaacccctgggcagctcttgtgaccggtgccctggctggtacatgtttcagttccaccggatcctgcagtacgccctgccgagacaggagtcccagcggccattcttttggattttcatggacaacttgctgctgaccgaggatgaccaggaaactaccactcggttcctgcagaccgaagccgtgaccctgcaggacgtgagaggccgggactaccagaacgccatgcgggtgtggtccaacatccctggactgaaaagcaagcacgcacctctgacccctaaagaagaggagtacctgcaggcccaggtgcggagcagaagcaagctggacgcccctaaggtggatctgctggtgaagaattgcctcctgcccctgagagagtacttcaagtatttcagccagaatagtctgcccctgggcggcccaagcagcggcgcccctcctcccagcggcggcagcccagccggctccccaacctctaccgaggagggcacctctgagtccgccacccccgagagcggccctggcacctccaccgagcccagcgagggcagcgcacccggcagccctgccggcagccccacctccacagaggagggaaccagcaccgagcccagcgaaggcagcgccccaggcaccagcaccgagcctagtgagggcggctctggcggcggcagcgcccaggagattaaacggatcaacaagatcagaagaagacttgtgaaagacagcaacaccaagaaggccggcaagacaggccccatgaaaaccctgctggttagagtgatgacacccgatctgagagagcggctggaaaacctgagaaagaagcctgaaaatatcccccagcccatcagcaatacatctagagccaacctgaataagctgctgaccgattacaccgaaatgaagaaggcgatcctgcatgtgtactgggaagagttccagaaggaccctgtgggcctgatgagccgggtggcccagcctgccagcaagaagatcgatcagaacaagctgaaacctgagatggacgagaagggcaacctgaccaccgccggctttgcctgctctcagtgtggccagcccctgttcgtgtacaagctggagcaggtgtctgagaagggcaaggcttacaccaactacttcggacggtgcaatgtggccgagcacgaaaagctgatcctgctggcccagctgaagcccgagaaggatagcgacgaagccgtgacatatagcctgggaaagtttgggcagagggccctggatttctacagcattcatgtgaccaaggagtccacccaccccgtgaagcccctggcccagatcgccggaaacagatacgcctccggacctgtgggaaaggccctgagcgacgcatgtatgggcacaatcgcctccttcctgtctaagtaccaggacatcatcatcgaacaccagaaggtggtgaagggcaaccagaagagactggagagcctgcgggagctggccggcaaggaaaacctggaataccctagcgtgaccctgccacctcagcctcacaccaaggagggcgttgatgcctacaacgaagtgatcgcccgggtgcgaatgtgggtgaacctgaacctgtggcagaagctgaagctaagcagagatgatgccaagcctctgctgagactgaagggattcccttcctttcctctggtcgagagacaggccaacgaagtggactggtgggacatggtgtgtaacgtgaagaagctgatcaacgagaaaaaggaggatggcaaggtgttttggcagaatctggctggctacaagagacaggaagccctgagaccatacctgagcagcgaggaagatcggaagaagggaaagaaattcgctcggtaccagctgggcgacctgctgctgcacctggaaaagaagcacggcgaggactggggaaaggtgtacgacgaggcctgggagcggattgacaagaaagtggaaggcctgagcaagcacatcaagctggaagaggaacggagaagcgaggacgcccagagcaaggccgccctgaccgactggctgcgggctaaggccagcttcgtgatcgagggcctgaaggaggccgacaaggacgagttctgcagatgcgagctgaagctgcagaagtggtacggggacctgcggggaaagcccttcgccatcgaagccgagaacagcatcctggacatcagcggcttcagcaagcagtacaactgtgccttcatctggcagaaggacggcgtgaagaagctgaacctgtacctgatcatcaactacttcaagggcggcaagctgcggttcaagaagatcaaacctgaagccttcgaagccaacagattctacaccgtgatcaacaaaaagagcggcgagatcgtgcccatggaggtgaacttcaacttcgacgaccccaacctgatcatcctgcctctggcctttggcaagagacagggcagagaattcatctggaacgacctgctgtccctggaaaccggcagcctgaagctggccaacggaagagtgatcgagaagacactgtacaacagaagaacccggcaggatgagcctgccctgttcgtggccctgaccttcgagcggcgggaggtcctggactcctccaatatcaaaccaatgaacctgatcggcgtggcaagaggcgaaaacatccccgccgtgatcgccctgaccgaccccgagggctgcccactgagccggtttaaggatagcctgggaaacccaacccacatcctgagaatcggcgagagctataaggagaagcagcggaccatccaggccaagaaggaggtggagcagcggagagccggcggctacagccggaagtacgccagcaaagccaagaatctggcagacgatatggtgagaaacaccgctagagatctgctgtactacgccgtgacccaggatgccatgctgatcttcgccaacctgagccggggcttcggccggcagggcaagcggaccttcatggccgagagacagtacacacggatggaggactggctgaccgccaagctggcctacgagggcctgagcaagacctacctgtccaagacactggcccagtacacctccaagacatgcagcaactgtgggtttaccatcaccagcgccgactacgacagggtgctggagaagctgaagaagacagcaacaggctggatgaccacaattaacggcaaggagctgaaggtggagggccagattacctactacaacagatacaagagacagaacgtagtcaaggacctgtccgtcgagctggatagactgagcgaagaatctgtgaacaacgacatctcctcctggacaaagggcagaagcggagaagctctgagcctcctgaagaaaagattctcccatagacccgtgcaggagaagttcgtgtgcctgaactgcggcttcgagacacacgcagccgagcaagccgccctgaacatcgccagatcctggctgttcctgcggagccaggagtacaagaaataccagacaaacaagacaaccggcaacaccgataagagagccttcgtcgagacctggcagtccttttaccggaagaagcttaaggaggtgtggaaacctgccgtgcggtctggcggatctggcggaggctccacaagctacaggggccccgtgaccttcaaggacatcaccgtggagttcaccagggaggagtggaagctgctggacaccgcccagaggaccctgtacagggaggtgatgcaggagaactacagccacctgatcagcgtgggctactgcgccaacaggcccaacgccatcttcaagctgaagcagggcaaggagccctggatcctggaggtgcagttccccaggcagaagaaccccgaggacctgtgcaacaccagccccaagaaaaagagaaaagtctaagctgccttctgcggggcttgccttctggccatgcccttcttctctcccttgcacctgtacctcttggtctttgaataaagcctgagtaggaaggctagcaaaaaaaaaaaaaaaaaaaaaaaaaaaaaaaaaaaaaaaaaaaaaaaaaaaaaaaaaaaaaaaaaaaaaaaaaaaaaaaa

SEQ ID NO: 7065 - RNA, 5797 nt, synthetic construct
  source 1..5797: mol_type = other RNA
aggaaataagagagaaaagaagagtaagaagaaatataagagccaccatggcccctaagaagaagcgtaaagtgagccggatggaacgcctcgtctacgaggtgcggcagaagtgcagaaacatcgaggacatctgcatctcctgcggatctctgaacgtgaccctggagcacccactgttcatcggcggcatgtgccagaactgtaaaaactgttttctggagtgtgcctatcaatacgacgatgacggctaccagagctactgcaccatctgttgcggcggaagagaggtgctgatgtgtggaaataacaactgctgccggtgcttctgcgtggaatgcgtggacctgctggtgggccccggcgccgcccaggccgctattaaggaagatccttggaactgctacatgtgcggccacaagggcacatacggcctgctgagacggagagaggactggcctagcagactgcagatgttcttcgccaataaccacgaccaggagttcgacccccctaaggtgtaccctcccgtccccgccgagaagagaaagcccatccgggtcctgagcctgttcgatggcatcgccaccggtctgctggtgctgaaggacctgggcatccaggtggataggtacattgcctccgaggtgtgcgaggactccatcaccgtgggaatggtgcgtcatcagggcaagatcatgtacgtgggcgacgtgcggagcgtgacacagaagcatatccaggagtggggccctttcgacctggtgatcggcggcagcccttgcaatgacctgagcatcgtgaacccagcccggaagggcctgtacgagggaaccggcagactgttcttcgagttttacagactgctgcacgacgcccggcctaaggaaggcgacgaccggcccttcttttggctgttcgagaatgtggtggccatgggagtcagcgacaagcgggatattagccggttcctggagagcaaccccgtgatgatcgatgccaaggaagtgagcgccgcccaccgggccagatacttctggggcaatctgcctggcatgaacagacccctggccagcaccgtgaacgacaagctggagctgcaggagtgcctggagcacggccggatcgccaagttcagcaaggtgagaaccatcaccacccgaagcaacagcatcaaacaaggcaaggaccagcactttcctgtgttcatgaacgagaaggaggacatcctgtggtgtaccgagatggagagagtgttcgggttcccagtccactacacagatgtcagcaacatgtctagactggccagacagagactgctgggaagaagctggtccgtccctgtgatcagacacctgttcgcccctctgaaggagtacttcgcctgcgtgagcagcggcaacagcaacgccaacagccggggccccagcttctctagcggcctggtgccactgtccctgagagggagccacatgggccccatggagatctacaaaaccgtgagcgcctggaagcggcagcctgtgcgcgtgctgagcctgtttcggaatatcgataaagtcctgaaaagcctgggattcctggagagcggctctggctccggcggtggcaccctgaagtacgtggaggatgtgacaaacgtggtcagacgggatgtggagaagtggggccccttcgatctggtgtacggcagcacccaacccctgggcagctcttgtgaccggtgccctggctggtacatgtttcagttccaccggatcctgcagtacgccctgccgagacaggagtcccagcggccattcttttggattttcatggacaacttgctgctgaccgaggatgaccaggaaactaccactcggttcctgcagaccgaagccgtgaccctgcaggacgtgagaggccgggactaccagaacgccatgcgggtgtggtccaacatccctggactgaaaagcaagcacgcacctctgacccctaaagaagaggagtacctgcaggcccaggtgcggagcagaagcaagctggacgcccctaaggtggatctgctggtgaagaattgcctcctgcccctgagagagtacttcaagtatttcagccagaatagtctgcccctgggcggcccaagcagcggcgcccctcctcccagcggcggcagcccagccggctccccaacctctaccgaggagggcacctctgagtccgccacccccgagagcggccctggcacctccaccgagcccagcgagggcagcgcacccggcagccctgccggcagccccacctccacagaggagggaaccagcaccgagcccagcgaaggcagcgccccaggcaccagcaccgagcctagtgagggcggctctggcggcggcagcgcccaggagattaaacggatcaacaagatcagaagaagacttgtgaaagacagcaacaccaagaaggccggcaagacaggccccatgaaaaccctgctggttagagtgatgacacccgatctgagagagcggctggaaaacctgagaaagaagcctgaaaatatcccccagcccatcagcaatacatctagagccaacctgaataagctgctgaccgattacaccgaaatgaagaaggcgatcctgcatgtgtactgggaagagttccagaaggaccctgtgggcctgatgagccgggtggcccagcctgccagcaagaagatcgatcagaacaagctgaaacctgagatggacgagaagggcaacctgaccaccgccggctttgcctgctctcagtgtggccagcccctgttcgtgtacaagctggagcaggtgtctgagaagggcaaggcttacaccaactacttcggacggtgcaatgtggccgagcacgaaaagctgatcctgctggcccagctgaagcccgagaaggatagcgacgaagccgtgacatatagcctgggaaagtttgggcagagggccctggatttctacagcattcatgtgaccaaggagtccacccaccccgtgaagcccctggcccagatcgccggaaacagatacgcctccggacctgtgggaaaggccctgagcgacgcatgtatgggcacaatcgcctccttcctgtctaagtaccaggacatcatcatcgaacaccagaaggtggtgaagggcaaccagaagagactggagagcctgcgggagctggccggcaaggaaaacctggaataccctagcgtgaccctgccacctcagcctcacaccaaggagggcgttgatgcctacaacgaagtgatcgcccgggtgcgaatgtgggtgaacctgaacctgtggcagaagctgaagctaagcagagatgatgccaagcctctgctgagactgaagggattcccttcctttcctctggtcgagagacaggccaacgaagtggactggtgggacatggtgtgtaacgtgaagaagctgatcaacgagaaaaaggaggatggcaaggtgttttggcagaatctggctggctacaagagacaggaagccctgagaccatacctgagcagcgaggaagatcggaagaagggaaagaaattcgctcggtaccagctgggcgacctgctgctgcacctggaaaagaagcacggcgaggactggggaaaggtgtacgacgaggcctgggagcggattgacaagaaagtggaaggcctgagcaagcacatcaagctggaagaggaacggagaagcgaggacgcccagagcaaggccgccctgaccgactggctgcgggctaaggccagcttcgtgatcgagggcctgaaggaggccgacaaggacgagttctgcagatgcgagctgaagctgcagaagtggtacggggacctgcggggaaagcccttcgccatcgaagccgagaacagcatcctggacatcagcggcttcagcaagcagtacaactgtgccttcatctggcagaaggacggcgtgaagaagctgaacctgtacctgatcatcaactacttcaagggcggcaagctgcggttcaagaagatcaaacctgaagccttcgaagccaacagattctacaccgtgatcaacaaaaagagcggcgagatcgtgcccatggaggtgaacttcaacttcgacgaccccaacctgatcatcctgcctctggcctttggcaagagacagggcagagaattcatctggaacgacctgctgtccctggaaaccggcagcctgaagctggccaacggaagagtgatcgagaagacactgtacaacagaagaacccggcaggatgagcctgccctgttcgtggccctgaccttcgagcggcgggaggtcctggactcctccaatatcaaaccaatgaacctgatcggcgtggcaagaggcgaaaacatccccgccgtgatcgccctgaccgaccccgagggctgcccactgagccggtttaaggatagcctgggaaacccaacccacatcctgagaatcggcgagagctataaggagaagcagcggaccatccaggccaagaaggaggtggagcagcggagagccggcggctacagccggaagtacgccagcaaagccaagaatctggcagacgatatggtgagaaacaccgctagagatctgctgtactacgccgtgacccaggatgccatgctgatcttcgccaacctgagccggggcttcggccggcagggcaagcggaccttcatggccgagagacagtacacacggatggaggactggctgaccgccaagctggcctacgagggcctgagcaagacctacctgtccaagacactggcccagtacacctccaagacatgcagcaactgtgggtttaccatcaccagcgccgactacgacagggtgctggagaagctgaagaagacagcaacaggctggatgaccacaattaacggcaaggagctgaaggtggagggccagattacctactacaacagatacaagagacagaacgtagtcaaggacctgtccgtcgagctggatagactgagcgaagaatctgtgaacaacgacatctcctcctggacaaagggcagaagcggagaagctctgagcctcctgaagaaaagattctcccatagacccgtgcaggagaagttcgtgtgcctgaactgcggcttcgagacacacgcagccgagcaagccgccctgaacatcgccagatcctggctgttcctgcggagccaggagtacaagaaataccagacaaacaagacaaccggcaacaccgataagagagccttcgtcgagacctggcagtccttttaccggaagaagcttaaggaggtgtggaaacctgccgtgcggtctggcggatctggcggaggctccacaagcaacagcggcctgctgaccttcagggacgtggccatcgagttcagcctggaggagtggcagtgcctggacaccgcccagaagaacctgtacaggaacgtgatgctggagaactacaggaacctggccttcctgggcgtggccgtgagcaagcccgacctgatcacctgcctggagaaggacaaggagccctggaacatgaagaggcacgagatggtggacgagccccccggcatctgcccccacaccagccccaagaaaaagagaaaagtctaagctgccttctgcggggcttgccttctggccatgcccttcttctctcccttgcacctgtacctcttggtctttgaataaagcctgagtaggaaggctagcaaaaaaaaaaaaaaaaaaaaaaaaaaaaaaaaaaaaaaaaaaaaaaaaaaaaaaaaaaaaaaaaaaaaaaaaaaaaaaaa

SEQ ID NO: 7066 - RNA, 5797 nt, synthetic construct
  source 1..5797: mol_type = other RNA
aggaaataagagagaaaagaagagtaagaagaaatataagagccaccatggcccctaagaagaagcgtaaagtgagccggatggaacgcctcgtctacgaggtgcggcagaagtgcagaaacatcgaggacatctgcatctcctgcggatctctgaacgtgaccctggagcacccactgttcatcggcggcatgtgccagaactgtaaaaactgttttctggagtgtgcctatcaatacgacgatgacggctaccagagctactgcaccatctgttgcggcggaagagaggtgctgatgtgtggaaataacaactgctgccggtgcttctgcgtggaatgcgtggacctgctggtgggccccggcgccgcccaggccgctattaaggaagatccttggaactgctacatgtgcggccacaagggcacatacggcctgctgagacggagagaggactggcctagcagactgcagatgttcttcgccaataaccacgaccaggagttcgacccccctaaggtgtaccctcccgtccccgccgagaagagaaagcccatccgggtcctgagcctgttcgatggcatcgccaccggtctgctggtgctgaaggacctgggcatccaggtggataggtacattgcctccgaggtgtgcgaggactccatcaccgtgggaatggtgcgtcatcagggcaagatcatgtacgtgggcgacgtgcggagcgtgacacagaagcatatccaggagtggggccctttcgacctggtgatcggcggcagcccttgcaatgacctgagcatcgtgaacccagcccggaagggcctgtacgagggaaccggcagactgttcttcgagttttacagactgctgcacgacgcccggcctaaggaaggcgacgaccggcccttcttttggctgttcgagaatgtggtggccatgggagtcagcgacaagcgggatattagccggttcctggagagcaaccccgtgatgatcgatgccaaggaagtgagcgccgcccaccgggccagatacttctggggcaatctgcctggcatgaacagacccctggccagcaccgtgaacgacaagctggagctgcaggagtgcctggagcacggccggatcgccaagttcagcaaggtgagaaccatcaccacccgaagcaacagcatcaaacaaggcaaggaccagcactttcctgtgttcatgaacgagaaggaggacatcctgtggtgtaccgagatggagagagtgttcgggttcccagtccactacacagatgtcagcaacatgtctagactggccagacagagactgctgggaagaagctggtccgtccctgtgatcagacacctgttcgcccctctgaaggagtacttcgcctgcgtgagcagcggcaacagcaacgccaacagccggggccccagcttctctagcggcctggtgccactgtccctgagagggagccacatgggccccatggagatctacaaaaccgtgagcgcctggaagcggcagcctgtgcgcgtgctgagcctgtttcggaatatcgataaagtcctgaaaagcctgggattcctggagagcggctctggctccggcggtggcaccctgaagtacgtggaggatgtgacaaacgtggtcagacgggatgtggagaagtggggccccttcgatctggtgtacggcagcacccaacccctgggcagctcttgtgaccggtgccctggctggtacatgtttcagttccaccggatcctgcagtacgccctgccgagacaggagtcccagcggccattcttttggattttcatggacaacttgctgctgaccgaggatgaccaggaaactaccactcggttcctgcagaccgaagccgtgaccctgcaggacgtgagaggccgggactaccagaacgccatgcgggtgtggtccaacatccctggactgaaaagcaagcacgcacctctgacccctaaagaagaggagtacctgcaggcccaggtgcggagcagaagcaagctggacgcccctaaggtggatctgctggtgaagaattgcctcctgcccctgagagagtacttcaagtatttcagccagaatagtctgcccctgggcggcccaagcagcggcgcccctcctcccagcggcggcagcccagccggctccccaacctctaccgaggagggcacctctgagtccgccacccccgagagcggccctggcacctccaccgagcccagcgagggcagcgcacccggcagccctgccggcagccccacctccacagaggagggaaccagcaccgagcccagcgaaggcagcgccccaggcaccagcaccgagcctagtgagggcggctctggcggcggcagcgcccaggagattaaacggatcaacaagatcagaagaagacttgtgaaagacagcaacaccaagaaggccggcaagacaggccccatgaaaaccctgctggttagagtgatgacacccgatctgagagagcggctggaaaacctgagaaagaagcctgaaaatatcccccagcccatcagcaatacatctagagccaacctgaataagctgctgaccgattacaccgaaatgaagaaggcgatcctgcatgtgtactgggaagagttccagaaggaccctgtgggcctgatgagccgggtggcccagcctgccagcaagaagatcgatcagaacaagctgaaacctgagatggacgagaagggcaacctgaccaccgccggctttgcctgctctcagtgtggccagcccctgttcgtgtacaagctggagcaggtgtctgagaagggcaaggcttacaccaactacttcggacggtgcaatgtggccgagcacgaaaagctgatcctgctggcccagctgaagcccgagaaggatagcgacgaagccgtgacatatagcctgggaaagtttgggcagagggccctggatttctacagcattcatgtgaccaaggagtccacccaccccgtgaagcccctggcccagatcgccggaaacagatacgcctccggacctgtgggaaaggccctgagcgacgcatgtatgggcacaatcgcctccttcctgtctaagtaccaggacatcatcatcgaacaccagaaggtggtgaagggcaaccagaagagactggagagcctgcgggagctggccggcaaggaaaacctggaataccctagcgtgaccctgccacctcagcctcacaccaaggagggcgttgatgcctacaacgaagtgatcgcccgggtgcgaatgtgggtgaacctgaacctgtggcagaagctgaagctaagcagagatgatgccaagcctctgctgagactgaagggattcccttcctttcctctggtcgagagacaggccaacgaagtggactggtgggacatggtgtgtaacgtgaagaagctgatcaacgagaaaaaggaggatggcaaggtgttttggcagaatctggctggctacaagagacaggaagccctgagaccatacctgagcagcgaggaagatcggaagaagggaaagaaattcgctcggtaccagctgggcgacctgctgctgcacctggaaaagaagcacggcgaggactggggaaaggtgtacgacgaggcctgggagcggattgacaagaaagtggaaggcctgagcaagcacatcaagctggaagaggaacggagaagcgaggacgcccagagcaaggccgccctgaccgactggctgcgggctaaggccagcttcgtgatcgagggcctgaaggaggccgacaaggacgagttctgcagatgcgagctgaagctgcagaagtggtacggggacctgcggggaaagcccttcgccatcgaagccgagaacagcatcctggacatcagcggcttcagcaagcagtacaactgtgccttcatctggcagaaggacggcgtgaagaagctgaacctgtacctgatcatcaactacttcaagggcggcaagctgcggttcaagaagatcaaacctgaagccttcgaagccaacagattctacaccgtgatcaacaaaaagagcggcgagatcgtgcccatggaggtgaacttcaacttcgacgaccccaacctgatcatcctgcctctggcctttggcaagagacagggcagagaattcatctggaacgacctgctgtccctggaaaccggcagcctgaagctggccaacggaagagtgatcgagaagacactgtacaacagaagaacccggcaggatgagcctgccctgttcgtggccctgaccttcgagcggcgggaggtcctggactcctccaatatcaaaccaatgaacctgatcggcgtggcaagaggcgaaaacatccccgccgtgatcgccctgaccgaccccgagggctgcccactgagccggtttaaggatagcctgggaaacccaacccacatcctgagaatcggcgagagctataaggagaagcagcggaccatccaggccaagaaggaggtggagcagcggagagccggcggctacagccggaagtacgccagcaaagccaagaatctggcagacgatatggtgagaaacaccgctagagatctgctgtactacgccgtgacccaggatgccatgctgatcttcgccaacctgagccggggcttcggccggcagggcaagcggaccttcatggccgagagacagtacacacggatggaggactggctgaccgccaagctggcctacgagggcctgagcaagacctacctgtccaagacactggcccagtacacctccaagacatgcagcaactgtgggtttaccatcaccagcgccgactacgacagggtgctggagaagctgaagaagacagcaacaggctggatgaccacaattaacggcaaggagctgaaggtggagggccagattacctactacaacagatacaagagacagaacgtagtcaaggacctgtccgtcgagctggatagactgagcgaagaatctgtgaacaacgacatctcctcctggacaaagggcagaagcggagaagctctgagcctcctgaagaaaagattctcccatagacccgtgcaggagaagttcgtgtgcctgaactgcggcttcgagacacacgcagccgagcaagccgccctgaacatcgccagatcctggctgttcctgcggagccaggagtacaagaaataccagacaaacaagacaaccggcaacaccgataagagagccttcgtcgagacctggcagtccttttaccggaagaagcttaaggaggtgtggaaacctgccgtgcggtctggcggatctggcggaggctccacaagcagccacggccccctgagcttcgaggacgtggccgtggccttcaccaaggaggagtggcagcagctggaccccgcccagaggaccctgtacagggacgtgatgctggagaacttcagccacgtgatcagcctgggccaccccgtgagcaagcccgacgtgatcagcaagctggagcagggcgaggagccctggatcatcaagagggacgtgagcgactggatctaccccgagagggagaccaggaccagccccaagaaaaagagaaaagtctaagctgccttctgcggggcttgccttctggccatgcccttcttctctcccttgcacctgtacctcttggtctttgaataaagcctgagtaggaaggctagcaaaaaaaaaaaaaaaaaaaaaaaaaaaaaaaaaaaaaaaaaaaaaaaaaaaaaaaaaaaaaaaaaaaaaaaaaaaaaaaa

SEQ ID NO: 7067 - RNA, 5797 nt, synthetic construct
  source 1..5797: mol_type = other RNA
aggaaataagagagaaaagaagagtaagaagaaatataagagccaccatggcccctaagaagaagcgtaaagtgagccggatggaacgcctcgtctacgaggtgcggcagaagtgcagaaacatcgaggacatctgcatctcctgcggatctctgaacgtgaccctggagcacccactgttcatcggcggcatgtgccagaactgtaaaaactgttttctggagtgtgcctatcaatacgacgatgacggctaccagagctactgcaccatctgttgcggcggaagagaggtgctgatgtgtggaaataacaactgctgccggtgcttctgcgtggaatgcgtggacctgctggtgggccccggcgccgcccaggccgctattaaggaagatccttggaactgctacatgtgcggccacaagggcacatacggcctgctgagacggagagaggactggcctagcagactgcagatgttcttcgccaataaccacgaccaggagttcgacccccctaaggtgtaccctcccgtccccgccgagaagagaaagcccatccgggtcctgagcctgttcgatggcatcgccaccggtctgctggtgctgaaggacctgggcatccaggtggataggtacattgcctccgaggtgtgcgaggactccatcaccgtgggaatggtgcgtcatcagggcaagatcatgtacgtgggcgacgtgcggagcgtgacacagaagcatatccaggagtggggccctttcgacctggtgatcggcggcagcccttgcaatgacctgagcatcgtgaacccagcccggaagggcctgtacgagggaaccggcagactgttcttcgagttttacagactgctgcacgacgcccggcctaaggaaggcgacgaccggcccttcttttggctgttcgagaatgtggtggccatgggagtcagcgacaagcgggatattagccggttcctggagagcaaccccgtgatgatcgatgccaaggaagtgagcgccgcccaccgggccagatacttctggggcaatctgcctggcatgaacagacccctggccagcaccgtgaacgacaagctggagctgcaggagtgcctggagcacggccggatcgccaagttcagcaaggtgagaaccatcaccacccgaagcaacagcatcaaacaaggcaaggaccagcactttcctgtgttcatgaacgagaaggaggacatcctgtggtgtaccgagatggagagagtgttcgggttcccagtccactacacagatgtcagcaacatgtctagactggccagacagagactgctgggaagaagctggtccgtccctgtgatcagacacctgttcgcccctctgaaggagtacttcgcctgcgtgagcagcggcaacagcaacgccaacagccggggccccagcttctctagcggcctggtgccactgtccctgagagggagccacatgggccccatggagatctacaaaaccgtgagcgcctggaagcggcagcctgtgcgcgtgctgagcctgtttcggaatatcgataaagtcctgaaaagcctgggattcctggagagcggctctggctccggcggtggcaccctgaagtacgtggaggatgtgacaaacgtggtcagacgggatgtggagaagtggggccccttcgatctggtgtacggcagcacccaacccctgggcagctcttgtgaccggtgccctggctggtacatgtttcagttccaccggatcctgcagtacgccctgccgagacaggagtcccagcggccattcttttggattttcatggacaacttgctgctgaccgaggatgaccaggaaactaccactcggttcctgcagaccgaagccgtgaccctgcaggacgtgagaggccgggactaccagaacgccatgcgggtgtggtccaacatccctggactgaaaagcaagcacgcacctctgacccctaaagaagaggagtacctgcaggcccaggtgcggagcagaagcaagctggacgcccctaaggtggatctgctggtgaagaattgcctcctgcccctgagagagtacttcaagtatttcagccagaatagtctgcccctgggcggcccaagcagcggcgcccctcctcccagcggcggcagcccagccggctccccaacctctaccgaggagggcacctctgagtccgccacccccgagagcggccctggcacctccaccgagcccagcgagggcagcgcacccggcagccctgccggcagccccacctccacagaggagggaaccagcaccgagcccagcgaaggcagcgccccaggcaccagcaccgagcctagtgagggcggctctggcggcggcagcgcccaggagattaaacggatcaacaagatcagaagaagacttgtgaaagacagcaacaccaagaaggccggcaagacaggccccatgaaaaccctgctggttagagtgatgacacccgatctgagagagcggctggaaaacctgagaaagaagcctgaaaatatcccccagcccatcagcaatacatctagagccaacctgaataagctgctgaccgattacaccgaaatgaagaaggcgatcctgcatgtgtactgggaagagttccagaaggaccctgtgggcctgatgagccgggtggcccagcctgccagcaagaagatcgatcagaacaagctgaaacctgagatggacgagaagggcaacctgaccaccgccggctttgcctgctctcagtgtggccagcccctgttcgtgtacaagctggagcaggtgtctgagaagggcaaggcttacaccaactacttcggacggtgcaatgtggccgagcacgaaaagctgatcctgctggcccagctgaagcccgagaaggatagcgacgaagccgtgacatatagcctgggaaagtttgggcagagggccctggatttctacagcattcatgtgaccaaggagtccacccaccccgtgaagcccctggcccagatcgccggaaacagatacgcctccggacctgtgggaaaggccctgagcgacgcatgtatgggcacaatcgcctccttcctgtctaagtaccaggacatcatcatcgaacaccagaaggtggtgaagggcaaccagaagagactggagagcctgcgggagctggccggcaaggaaaacctggaataccctagcgtgaccctgccacctcagcctcacaccaaggagggcgttgatgcctacaacgaagtgatcgcccgggtgcgaatgtgggtgaacctgaacctgtggcagaagctgaagctaagcagagatgatgccaagcctctgctgagactgaagggattcccttcctttcctctggtcgagagacaggccaacgaagtggactggtgggacatggtgtgtaacgtgaagaagctgatcaacgagaaaaaggaggatggcaaggtgttttggcagaatctggctggctacaagagacaggaagccctgagaccatacctgagcagcgaggaagatcggaagaagggaaagaaattcgctcggtaccagctgggcgacctgctgctgcacctggaaaagaagcacggcgaggactggggaaaggtgtacgacgaggcctgggagcggattgacaagaaagtggaaggcctgagcaagcacatcaagctggaagaggaacggagaagcgaggacgcccagagcaaggccgccctgaccgactggctgcgggctaaggccagcttcgtgatcgagggcctgaaggaggccgacaaggacgagttctgcagatgcgagctgaagctgcagaagtggtacggggacctgcggggaaagcccttcgccatcgaagccgagaacagcatcctggacatcagcggcttcagcaagcagtacaactgtgccttcatctggcagaaggacggcgtgaagaagctgaacctgtacctgatcatcaactacttcaagggcggcaagctgcggttcaagaagatcaaacctgaagccttcgaagccaacagattctacaccgtgatcaacaaaaagagcggcgagatcgtgcccatggaggtgaacttcaacttcgacgaccccaacctgatcatcctgcctctggcctttggcaagagacagggcagagaattcatctggaacgacctgctgtccctggaaaccggcagcctgaagctggccaacggaagagtgatcgagaagacactgtacaacagaagaacccggcaggatgagcctgccctgttcgtggccctgaccttcgagcggcgggaggtcctggactcctccaatatcaaaccaatgaacctgatcggcgtggcaagaggcgaaaacatccccgccgtgatcgccctgaccgaccccgagggctgcccactgagccggtttaaggatagcctgggaaacccaacccacatcctgagaatcggcgagagctataaggagaagcagcggaccatccaggccaagaaggaggtggagcagcggagagccggcggctacagccggaagtacgccagcaaagccaagaatctggcagacgatatggtgagaaacaccgctagagatctgctgtactacgccgtgacccaggatgccatgctgatcttcgccaacctgagccggggcttcggccggcagggcaagcggaccttcatggccgagagacagtacacacggatggaggactggctgaccgccaagctggcctacgagggcctgagcaagacctacctgtccaagacactggcccagtacacctccaagacatgcagcaactgtgggtttaccatcaccagcgccgactacgacagggtgctggagaagctgaagaagacagcaacaggctggatgaccacaattaacggcaaggagctgaaggtggagggccagattacctactacaacagatacaagagacagaacgtagtcaaggacctgtccgtcgagctggatagactgagcgaagaatctgtgaacaacgacatctcctcctggacaaagggcagaagcggagaagctctgagcctcctgaagaaaagattctcccatagacccgtgcaggagaagttcgtgtgcctgaactgcggcttcgagacacacgcagccgagcaagccgccctgaacatcgccagatcctggctgttcctgcggagccaggagtacaagaaataccagacaaacaagacaaccggcaacaccgataagagagccttcgtcgagacctggcagtccttttaccggaagaagcttaaggaggtgtggaaacctgccgtgcggtctggcggatctggcggaggctccacaagccagcagggcagcgtgaccttcagggacgtggccgtggacttcaccctggaggagtggggccacctggaccccttccagaaggagctgtacagggacgtgatgctggagaacttcaggaacctggtgtgcctgggcctgaccgtgagcaagcccgacgtgatccaccagctggagcagggcgaggccccctggatccccgagggcgagagccccaggaacagcttcgccggctgcgccagcgacaccagccccaagaaaaagagaaaagtctaagctgccttctgcggggcttgccttctggccatgcccttcttctctcccttgcacctgtacctcttggtctttgaataaagcctgagtaggaaggctagcaaaaaaaaaaaaaaaaaaaaaaaaaaaaaaaaaaaaaaaaaaaaaaaaaaaaaaaaaaaaaaaaaaaaaaaaaaaaaaaa

SEQ ID NO: 7068 - RNA, 5896 nt, synthetic construct
  source 1..5896: mol_type = other RNA
aggaaataagagagaaaagaagagtaagaagaaatataagagccaccatggcccctaagaagaagcgtaaagtgagccggatggaacgcctcgtctacgaggtgcggcagaagtgcagaaacatcgaggacatctgcatctcctgcggatctctgaacgtgaccctggagcacccactgttcatcggcggcatgtgccagaactgtaaaaactgttttctggagtgtgcctatcaatacgacgatgacggctaccagagctactgcaccatctgttgcggcggaagagaggtgctgatgtgtggaaataacaactgctgccggtgcttctgcgtggaatgcgtggacctgctggtgggccccggcgccgcccaggccgctattaaggaagatccttggaactgctacatgtgcggccacaagggcacatacggcctgctgagacggagagaggactggcctagcagactgcagatgttcttcgccaataaccacgaccaggagttcgacccccctaaggtgtaccctcccgtccccgccgagaagagaaagcccatccgggtcctgagcctgttcgatggcatcgccaccggtctgctggtgctgaaggacctgggcatccaggtggataggtacattgcctccgaggtgtgcgaggactccatcaccgtgggaatggtgcgtcatcagggcaagatcatgtacgtgggcgacgtgcggagcgtgacacagaagcatatccaggagtggggccctttcgacctggtgatcggcggcagcccttgcaatgacctgagcatcgtgaacccagcccggaagggcctgtacgagggaaccggcagactgttcttcgagttttacagactgctgcacgacgcccggcctaaggaaggcgacgaccggcccttcttttggctgttcgagaatgtggtggccatgggagtcagcgacaagcgggatattagccggttcctggagagcaaccccgtgatgatcgatgccaaggaagtgagcgccgcccaccgggccagatacttctggggcaatctgcctggcatgaacagacccctggccagcaccgtgaacgacaagctggagctgcaggagtgcctggagcacggccggatcgccaagttcagcaaggtgagaaccatcaccacccgaagcaacagcatcaaacaaggcaaggaccagcactttcctgtgttcatgaacgagaaggaggacatcctgtggtgtaccgagatggagagagtgttcgggttcccagtccactacacagatgtcagcaacatgtctagactggccagacagagactgctgggaagaagctggtccgtccctgtgatcagacacctgttcgcccctctgaaggagtacttcgcctgcgtgagcagcggcaacagcaacgccaacagccggggccccagcttctctagcggcctggtgccactgtccctgagagggagccacatgggccccatggagatctacaaaaccgtgagcgcctggaagcggcagcctgtgcgcgtgctgagcctgtttcggaatatcgataaagtcctgaaaagcctgggattcctggagagcggctctggctccggcggtggcaccctgaagtacgtggaggatgtgacaaacgtggtcagacgggatgtggagaagtggggccccttcgatctggtgtacggcagcacccaacccctgggcagctcttgtgaccggtgccctggctggtacatgtttcagttccaccggatcctgcagtacgccctgccgagacaggagtcccagcggccattcttttggattttcatggacaacttgctgctgaccgaggatgaccaggaaactaccactcggttcctgcagaccgaagccgtgaccctgcaggacgtgagaggccgggactaccagaacgccatgcgggtgtggtccaacatccctggactgaaaagcaagcacgcacctctgacccctaaagaagaggagtacctgcaggcccaggtgcggagcagaagcaagctggacgcccctaaggtggatctgctggtgaagaattgcctcctgcccctgagagagtacttcaagtatttcagccagaatagtctgcccctgggcggcccaagcagcggcgcccctcctcccagcggcggcagcccagccggctccccaacctctaccgaggagggcacctctgagtccgccacccccgagagcggccctggcacctccaccgagcccagcgagggcagcgcacccggcagccctgccggcagccccacctccacagaggagggaaccagcaccgagcccagcgaaggcagcgccccaggcaccagcaccgagcctagtgagggcggctctggcggcggcagcgcccaggagattaaacggatcaacaagatcagaagaagacttgtgaaagacagcaacaccaagaaggccggcaagacaggccccatgaaaaccctgctggttagagtgatgacacccgatctgagagagcggctggaaaacctgagaaagaagcctgaaaatatcccccagcccatcagcaatacatctagagccaacctgaataagctgctgaccgattacaccgaaatgaagaaggcgatcctgcatgtgtactgggaagagttccagaaggaccctgtgggcctgatgagccgggtggcccagcctgccagcaagaagatcgatcagaacaagctgaaacctgagatggacgagaagggcaacctgaccaccgccggctttgcctgctctcagtgtggccagcccctgttcgtgtacaagctggagcaggtgtctgagaagggcaaggcttacaccaactacttcggacggtgcaatgtggccgagcacgaaaagctgatcctgctggcccagctgaagcccgagaaggatagcgacgaagccgtgacatatagcctgggaaagtttgggcagagggccctggatttctacagcattcatgtgaccaaggagtccacccaccccgtgaagcccctggcccagatcgccggaaacagatacgcctccggacctgtgggaaaggccctgagcgacgcatgtatgggcacaatcgcctccttcctgtctaagtaccaggacatcatcatcgaacaccagaaggtggtgaagggcaaccagaagagactggagagcctgcgggagctggccggcaaggaaaacctggaataccctagcgtgaccctgccacctcagcctcacaccaaggagggcgttgatgcctacaacgaagtgatcgcccgggtgcgaatgtgggtgaacctgaacctgtggcagaagctgaagctaagcagagatgatgccaagcctctgctgagactgaagggattcccttcctttcctctggtcgagagacaggccaacgaagtggactggtgggacatggtgtgtaacgtgaagaagctgatcaacgagaaaaaggaggatggcaaggtgttttggcagaatctggctggctacaagagacaggaagccctgagaccatacctgagcagcgaggaagatcggaagaagggaaagaaattcgctcggtaccagctgggcgacctgctgctgcacctggaaaagaagcacggcgaggactggggaaaggtgtacgacgaggcctgggagcggattgacaagaaagtggaaggcctgagcaagcacatcaagctggaagaggaacggagaagcgaggacgcccagagcaaggccgccctgaccgactggctgcgggctaaggccagcttcgtgatcgagggcctgaaggaggccgacaaggacgagttctgcagatgcgagctgaagctgcagaagtggtacggggacctgcggggaaagcccttcgccatcgaagccgagaacagcatcctggacatcagcggcttcagcaagcagtacaactgtgccttcatctggcagaaggacggcgtgaagaagctgaacctgtacctgatcatcaactacttcaagggcggcaagctgcggttcaagaagatcaaacctgaagccttcgaagccaacagattctacaccgtgatcaacaaaaagagcggcgagatcgtgcccatggaggtgaacttcaacttcgacgaccccaacctgatcatcctgcctctggcctttggcaagagacagggcagagaattcatctggaacgacctgctgtccctggaaaccggcagcctgaagctggccaacggaagagtgatcgagaagacactgtacaacagaagaacccggcaggatgagcctgccctgttcgtggccctgaccttcgagcggcgggaggtcctggactcctccaatatcaaaccaatgaacctgatcggcgtggcaagaggcgaaaacatccccgccgtgatcgccctgaccgaccccgagggctgcccactgagccggtttaaggatagcctgggaaacccaacccacatcctgagaatcggcgagagctataaggagaagcagcggaccatccaggccaagaaggaggtggagcagcggagagccggcggctacagccggaagtacgccagcaaagccaagaatctggcagacgatatggtgagaaacaccgctagagatctgctgtactacgccgtgacccaggatgccatgctgatcttcgccaacctgagccggggcttcggccggcagggcaagcggaccttcatggccgagagacagtacacacggatggaggactggctgaccgccaagctggcctacgagggcctgagcaagacctacctgtccaagacactggcccagtacacctccaagacatgcagcaactgtgggtttaccatcaccagcgccgactacgacagggtgctggagaagctgaagaagacagcaacaggctggatgaccacaattaacggcaaggagctgaaggtggagggccagattacctactacaacagatacaagagacagaacgtagtcaaggacctgtccgtcgagctggatagactgagcgaagaatctgtgaacaacgacatctcctcctggacaaagggcagaagcggagaagctctgagcctcctgaagaaaagattctcccatagacccgtgcaggagaagttcgtgtgcctgaactgcggcttcgagacacacgcagccgagcaagccgccctgaacatcgccagatcctggctgttcctgcggagccaggagtacaagaaataccagacaaacaagacaaccggcaacaccgataagagagccttcgtcgagacctggcagtccttttaccggaagaagcttaaggaggtgtggaaacctgccgtgcggtctggcggatctggcggaggctccacaagcgtgaccttcgaggacatcgccgtgtacttcagcagggaggagtggggcctgctggacgaggcccagaggtgcctgtaccacgacgtgatgctggagaacttcagcctgatgaccagcgtgggctgcctgcacggcatcggcgccgaggaggcccccagcgagcagatcgtgagcgtggagaccgtgagccaggccaggacccccaagcccagcagcagcatccccaacgcccacagctgcgagatgtgcatcctggtgatgaaggacatcctgtacctgaccgagcaccagggcaccctgccctggcagaagccctacaccagcgccgccagcggcaagtggaccagccccaagaaaaagagaaaagtctaagctgccttctgcggggcttgccttctggccatgcccttcttctctcccttgcacctgtacctcttggtctttgaataaagcctgagtaggaaggctagcaaaaaaaaaaaaaaaaaaaaaaaaaaaaaaaaaaaaaaaaaaaaaaaaaaaaaaaaaaaaaaaaaaaaaaaaaaaaaaaa

SEQ ID NO: 7069 - RNA, 5797 nt, synthetic construct
  source 1..5797: mol_type = other RNA
aggaaataagagagaaaagaagagtaagaagaaatataagagccaccatggcccctaagaagaagcgtaaagtgagccggatggaacgcctcgtctacgaggtgcggcagaagtgcagaaacatcgaggacatctgcatctcctgcggatctctgaacgtgaccctggagcacccactgttcatcggcggcatgtgccagaactgtaaaaactgttttctggagtgtgcctatcaatacgacgatgacggctaccagagctactgcaccatctgttgcggcggaagagaggtgctgatgtgtggaaataacaactgctgccggtgcttctgcgtggaatgcgtggacctgctggtgggccccggcgccgcccaggccgctattaaggaagatccttggaactgctacatgtgcggccacaagggcacatacggcctgctgagacggagagaggactggcctagcagactgcagatgttcttcgccaataaccacgaccaggagttcgacccccctaaggtgtaccctcccgtccccgccgagaagagaaagcccatccgggtcctgagcctgttcgatggcatcgccaccggtctgctggtgctgaaggacctgggcatccaggtggataggtacattgcctccgaggtgtgcgaggactccatcaccgtgggaatggtgcgtcatcagggcaagatcatgtacgtgggcgacgtgcggagcgtgacacagaagcatatccaggagtggggccctttcgacctggtgatcggcggcagcccttgcaatgacctgagcatcgtgaacccagcccggaagggcctgtacgagggaaccggcagactgttcttcgagttttacagactgctgcacgacgcccggcctaaggaaggcgacgaccggcccttcttttggctgttcgagaatgtggtggccatgggagtcagcgacaagcgggatattagccggttcctggagagcaaccccgtgatgatcgatgccaaggaagtgagcgccgcccaccgggccagatacttctggggcaatctgcctggcatgaacagacccctggccagcaccgtgaacgacaagctggagctgcaggagtgcctggagcacggccggatcgccaagttcagcaaggtgagaaccatcaccacccgaagcaacagcatcaaacaaggcaaggaccagcactttcctgtgttcatgaacgagaaggaggacatcctgtggtgtaccgagatggagagagtgttcgggttcccagtccactacacagatgtcagcaacatgtctagactggccagacagagactgctgggaagaagctggtccgtccctgtgatcagacacctgttcgcccctctgaaggagtacttcgcctgcgtgagcagcggcaacagcaacgccaacagccggggccccagcttctctagcggcctggtgccactgtccctgagagggagccacatgggccccatggagatctacaaaaccgtgagcgcctggaagcggcagcctgtgcgcgtgctgagcctgtttcggaatatcgataaagtcctgaaaagcctgggattcctggagagcggctctggctccggcggtggcaccctgaagtacgtggaggatgtgacaaacgtggtcagacgggatgtggagaagtggggccccttcgatctggtgtacggcagcacccaacccctgggcagctcttgtgaccggtgccctggctggtacatgtttcagttccaccggatcctgcagtacgccctgccgagacaggagtcccagcggccattcttttggattttcatggacaacttgctgctgaccgaggatgaccaggaaactaccactcggttcctgcagaccgaagccgtgaccctgcaggacgtgagaggccgggactaccagaacgccatgcgggtgtggtccaacatccctggactgaaaagcaagcacgcacctctgacccctaaagaagaggagtacctgcaggcccaggtgcggagcagaagcaagctggacgcccctaaggtggatctgctggtgaagaattgcctcctgcccctgagagagtacttcaagtatttcagccagaatagtctgcccctgggcggcccaagcagcggcgcccctcctcccagcggcggcagcccagccggctccccaacctctaccgaggagggcacctctgagtccgccacccccgagagcggccctggcacctccaccgagcccagcgagggcagcgcacccggcagccctgccggcagccccacctccacagaggagggaaccagcaccgagcccagcgaaggcagcgccccaggcaccagcaccgagcctagtgagggcggctctggcggcggcagcgcccaggagattaaacggatcaacaagatcagaagaagacttgtgaaagacagcaacaccaagaaggccggcaagacaggccccatgaaaaccctgctggttagagtgatgacacccgatctgagagagcggctggaaaacctgagaaagaagcctgaaaatatcccccagcccatcagcaatacatctagagccaacctgaataagctgctgaccgattacaccgaaatgaagaaggcgatcctgcatgtgtactgggaagagttccagaaggaccctgtgggcctgatgagccgggtggcccagcctgccagcaagaagatcgatcagaacaagctgaaacctgagatggacgagaagggcaacctgaccaccgccggctttgcctgctctcagtgtggccagcccctgttcgtgtacaagctggagcaggtgtctgagaagggcaaggcttacaccaactacttcggacggtgcaatgtggccgagcacgaaaagctgatcctgctggcccagctgaagcccgagaaggatagcgacgaagccgtgacatatagcctgggaaagtttgggcagagggccctggatttctacagcattcatgtgaccaaggagtccacccaccccgtgaagcccctggcccagatcgccggaaacagatacgcctccggacctgtgggaaaggccctgagcgacgcatgtatgggcacaatcgcctccttcctgtctaagtaccaggacatcatcatcgaacaccagaaggtggtgaagggcaaccagaagagactggagagcctgcgggagctggccggcaaggaaaacctggaataccctagcgtgaccctgccacctcagcctcacaccaaggagggcgttgatgcctacaacgaagtgatcgcccgggtgcgaatgtgggtgaacctgaacctgtggcagaagctgaagctaagcagagatgatgccaagcctctgctgagactgaagggattcccttcctttcctctggtcgagagacaggccaacgaagtggactggtgggacatggtgtgtaacgtgaagaagctgatcaacgagaaaaaggaggatggcaaggtgttttggcagaatctggctggctacaagagacaggaagccctgagaccatacctgagcagcgaggaagatcggaagaagggaaagaaattcgctcggtaccagctgggcgacctgctgctgcacctggaaaagaagcacggcgaggactggggaaaggtgtacgacgaggcctgggagcggattgacaagaaagtggaaggcctgagcaagcacatcaagctggaagaggaacggagaagcgaggacgcccagagcaaggccgccctgaccgactggctgcgggctaaggccagcttcgtgatcgagggcctgaaggaggccgacaaggacgagttctgcagatgcgagctgaagctgcagaagtggtacggggacctgcggggaaagcccttcgccatcgaagccgagaacagcatcctggacatcagcggcttcagcaagcagtacaactgtgccttcatctggcagaaggacggcgtgaagaagctgaacctgtacctgatcatcaactacttcaagggcggcaagctgcggttcaagaagatcaaacctgaagccttcgaagccaacagattctacaccgtgatcaacaaaaagagcggcgagatcgtgcccatggaggtgaacttcaacttcgacgaccccaacctgatcatcctgcctctggcctttggcaagagacagggcagagaattcatctggaacgacctgctgtccctggaaaccggcagcctgaagctggccaacggaagagtgatcgagaagacactgtacaacagaagaacccggcaggatgagcctgccctgttcgtggccctgaccttcgagcggcgggaggtcctggactcctccaatatcaaaccaatgaacctgatcggcgtggcaagaggcgaaaacatccccgccgtgatcgccctgaccgaccccgagggctgcccactgagccggtttaaggatagcctgggaaacccaacccacatcctgagaatcggcgagagctataaggagaagcagcggaccatccaggccaagaaggaggtggagcagcggagagccggcggctacagccggaagtacgccagcaaagccaagaatctggcagacgatatggtgagaaacaccgctagagatctgctgtactacgccgtgacccaggatgccatgctgatcttcgccaacctgagccggggcttcggccggcagggcaagcggaccttcatggccgagagacagtacacacggatggaggactggctgaccgccaagctggcctacgagggcctgagcaagacctacctgtccaagacactggcccagtacacctccaagacatgcagcaactgtgggtttaccatcaccagcgccgactacgacagggtgctggagaagctgaagaagacagcaacaggctggatgaccacaattaacggcaaggagctgaaggtggagggccagattacctactacaacagatacaagagacagaacgtagtcaaggacctgtccgtcgagctggatagactgagcgaagaatctgtgaacaacgacatctcctcctggacaaagggcagaagcggagaagctctgagcctcctgaagaaaagattctcccatagacccgtgcaggagaagttcgtgtgcctgaactgcggcttcgagacacacgcagccgagcaagccgccctgaacatcgccagatcctggctgttcctgcggagccaggagtacaagaaataccagacaaacaagacaaccggcaacaccgataagagagccttcgtcgagacctggcagtccttttaccggaagaagcttaaggaggtgtggaaacctgccgtgcggtctggcggatctggcggaggctccacaagctggcaggagagcctgaccttcaaggacgtggccgtggacttcacccaggaggagtggggcctgctggaccacagccagaagaggctgtacaaggaggtgatgctggagaacagccagaacctgctgagcctgggcatcccccccctgagggaggacctgatcagccacctggaggagggcgaggccagctggatcctggacaggaagggccccaggaagagctgccccgacgccgagaccaggaccagccccaagaaaaagagaaaagtctaagctgccttctgcggggcttgccttctggccatgcccttcttctctcccttgcacctgtacctcttggtctttgaataaagcctgagtaggaaggctagcaaaaaaaaaaaaaaaaaaaaaaaaaaaaaaaaaaaaaaaaaaaaaaaaaaaaaaaaaaaaaaaaaaaaaaaaaaaaaaaa

SEQ ID NO: 7070 - RNA, 5797 nt, synthetic construct
  source 1..5797: mol_type = other RNA
aggaaataagagagaaaagaagagtaagaagaaatataagagccaccatggcccctaagaagaagcgtaaagtgagccggatggaacgcctcgtctacgaggtgcggcagaagtgcagaaacatcgaggacatctgcatctcctgcggatctctgaacgtgaccctggagcacccactgttcatcggcggcatgtgccagaactgtaaaaactgttttctggagtgtgcctatcaatacgacgatgacggctaccagagctactgcaccatctgttgcggcggaagagaggtgctgatgtgtggaaataacaactgctgccggtgcttctgcgtggaatgcgtggacctgctggtgggccccggcgccgcccaggccgctattaaggaagatccttggaactgctacatgtgcggccacaagggcacatacggcctgctgagacggagagaggactggcctagcagactgcagatgttcttcgccaataaccacgaccaggagttcgacccccctaaggtgtaccctcccgtccccgccgagaagagaaagcccatccgggtcctgagcctgttcgatggcatcgccaccggtctgctggtgctgaaggacctgggcatccaggtggataggtacattgcctccgaggtgtgcgaggactccatcaccgtgggaatggtgcgtcatcagggcaagatcatgtacgtgggcgacgtgcggagcgtgacacagaagcatatccaggagtggggccctttcgacctggtgatcggcggcagcccttgcaatgacctgagcatcgtgaacccagcccggaagggcctgtacgagggaaccggcagactgttcttcgagttttacagactgctgcacgacgcccggcctaaggaaggcgacgaccggcccttcttttggctgttcgagaatgtggtggccatgggagtcagcgacaagcgggatattagccggttcctggagagcaaccccgtgatgatcgatgccaaggaagtgagcgccgcccaccgggccagatacttctggggcaatctgcctggcatgaacagacccctggccagcaccgtgaacgacaagctggagctgcaggagtgcctggagcacggccggatcgccaagttcagcaaggtgagaaccatcaccacccgaagcaacagcatcaaacaaggcaaggaccagcactttcctgtgttcatgaacgagaaggaggacatcctgtggtgtaccgagatggagagagtgttcgggttcccagtccactacacagatgtcagcaacatgtctagactggccagacagagactgctgggaagaagctggtccgtccctgtgatcagacacctgttcgcccctctgaaggagtacttcgcctgcgtgagcagcggcaacagcaacgccaacagccggggccccagcttctctagcggcctggtgccactgtccctgagagggagccacatgggccccatggagatctacaaaaccgtgagcgcctggaagcggcagcctgtgcgcgtgctgagcctgtttcggaatatcgataaagtcctgaaaagcctgggattcctggagagcggctctggctccggcggtggcaccctgaagtacgtggaggatgtgacaaacgtggtcagacgggatgtggagaagtggggccccttcgatctggtgtacggcagcacccaacccctgggcagctcttgtgaccggtgccctggctggtacatgtttcagttccaccggatcctgcagtacgccctgccgagacaggagtcccagcggccattcttttggattttcatggacaacttgctgctgaccgaggatgaccaggaaactaccactcggttcctgcagaccgaagccgtgaccctgcaggacgtgagaggccgggactaccagaacgccatgcgggtgtggtccaacatccctggactgaaaagcaagcacgcacctctgacccctaaagaagaggagtacctgcaggcccaggtgcggagcagaagcaagctggacgcccctaaggtggatctgctggtgaagaattgcctcctgcccctgagagagtacttcaagtatttcagccagaatagtctgcccctgggcggcccaagcagcggcgcccctcctcccagcggcggcagcccagccggctccccaacctctaccgaggagggcacctctgagtccgccacccccgagagcggccctggcacctccaccgagcccagcgagggcagcgcacccggcagccctgccggcagccccacctccacagaggagggaaccagcaccgagcccagcgaaggcagcgccccaggcaccagcaccgagcctagtgagggcggctctggcggcggcagcgcccaggagattaaacggatcaacaagatcagaagaagacttgtgaaagacagcaacaccaagaaggccggcaagacaggccccatgaaaaccctgctggttagagtgatgacacccgatctgagagagcggctggaaaacctgagaaagaagcctgaaaatatcccccagcccatcagcaatacatctagagccaacctgaataagctgctgaccgattacaccgaaatgaagaaggcgatcctgcatgtgtactgggaagagttccagaaggaccctgtgggcctgatgagccgggtggcccagcctgccagcaagaagatcgatcagaacaagctgaaacctgagatggacgagaagggcaacctgaccaccgccggctttgcctgctctcagtgtggccagcccctgttcgtgtacaagctggagcaggtgtctgagaagggcaaggcttacaccaactacttcggacggtgcaatgtggccgagcacgaaaagctgatcctgctggcccagctgaagcccgagaaggatagcgacgaagccgtgacatatagcctgggaaagtttgggcagagggccctggatttctacagcattcatgtgaccaaggagtccacccaccccgtgaagcccctggcccagatcgccggaaacagatacgcctccggacctgtgggaaaggccctgagcgacgcatgtatgggcacaatcgcctccttcctgtctaagtaccaggacatcatcatcgaacaccagaaggtggtgaagggcaaccagaagagactggagagcctgcgggagctggccggcaaggaaaacctggaataccctagcgtgaccctgccacctcagcctcacaccaaggagggcgttgatgcctacaacgaagtgatcgcccgggtgcgaatgtgggtgaacctgaacctgtggcagaagctgaagctaagcagagatgatgccaagcctctgctgagactgaagggattcccttcctttcctctggtcgagagacaggccaacgaagtggactggtgggacatggtgtgtaacgtgaagaagctgatcaacgagaaaaaggaggatggcaaggtgttttggcagaatctggctggctacaagagacaggaagccctgagaccatacctgagcagcgaggaagatcggaagaagggaaagaaattcgctcggtaccagctgggcgacctgctgctgcacctggaaaagaagcacggcgaggactggggaaaggtgtacgacgaggcctgggagcggattgacaagaaagtggaaggcctgagcaagcacatcaagctggaagaggaacggagaagcgaggacgcccagagcaaggccgccctgaccgactggctgcgggctaaggccagcttcgtgatcgagggcctgaaggaggccgacaaggacgagttctgcagatgcgagctgaagctgcagaagtggtacggggacctgcggggaaagcccttcgccatcgaagccgagaacagcatcctggacatcagcggcttcagcaagcagtacaactgtgccttcatctggcagaaggacggcgtgaagaagctgaacctgtacctgatcatcaactacttcaagggcggcaagctgcggttcaagaagatcaaacctgaagccttcgaagccaacagattctacaccgtgatcaacaaaaagagcggcgagatcgtgcccatggaggtgaacttcaacttcgacgaccccaacctgatcatcctgcctctggcctttggcaagagacagggcagagaattcatctggaacgacctgctgtccctggaaaccggcagcctgaagctggccaacggaagagtgatcgagaagacactgtacaacagaagaacccggcaggatgagcctgccctgttcgtggccctgaccttcgagcggcgggaggtcctggactcctccaatatcaaaccaatgaacctgatcggcgtggcaagaggcgaaaacatccccgccgtgatcgccctgaccgaccccgagggctgcccactgagccggtttaaggatagcctgggaaacccaacccacatcctgagaatcggcgagagctataaggagaagcagcggaccatccaggccaagaaggaggtggagcagcggagagccggcggctacagccggaagtacgccagcaaagccaagaatctggcagacgatatggtgagaaacaccgctagagatctgctgtactacgccgtgacccaggatgccatgctgatcttcgccaacctgagccggggcttcggccggcagggcaagcggaccttcatggccgagagacagtacacacggatggaggactggctgaccgccaagctggcctacgagggcctgagcaagacctacctgtccaagacactggcccagtacacctccaagacatgcagcaactgtgggtttaccatcaccagcgccgactacgacagggtgctggagaagctgaagaagacagcaacaggctggatgaccacaattaacggcaaggagctgaaggtggagggccagattacctactacaacagatacaagagacagaacgtagtcaaggacctgtccgtcgagctggatagactgagcgaagaatctgtgaacaacgacatctcctcctggacaaagggcagaagcggagaagctctgagcctcctgaagaaaagattctcccatagacccgtgcaggagaagttcgtgtgcctgaactgcggcttcgagacacacgcagccgagcaagccgccctgaacatcgccagatcctggctgttcctgcggagccaggagtacaagaaataccagacaaacaagacaaccggcaacaccgataagagagccttcgtcgagacctggcagtccttttaccggaagaagcttaaggaggtgtggaaacctgccgtgcggtctggcggatctggcggaggctccacaagcagccagggcagcctgagcttcagggacgtgaccgtgggcttcacctgggaggagtggcagcagctggaccccgcccagagggccctgtacagggacgtgatgctggagacctacagccacctgctgagcgtgggctactgcatccccaagcccgaggtgatcctgaagctggagcagggcgaggagccctggatcctggaggaggagagcagcagccagagcgtgcccgagctgatcaacagcaccagccccaagaaaaagagaaaagtctaagctgccttctgcggggcttgccttctggccatgcccttcttctctcccttgcacctgtacctcttggtctttgaataaagcctgagtaggaaggctagcaaaaaaaaaaaaaaaaaaaaaaaaaaaaaaaaaaaaaaaaaaaaaaaaaaaaaaaaaaaaaaaaaaaaaaaaaaaaaaaa

SEQ ID NO: 7071 - RNA, 5797 nt, synthetic construct
  source 1..5797: mol_type = other RNA
aggaaataagagagaaaagaagagtaagaagaaatataagagccaccatggcccctaagaagaagcgtaaagtgagccggatggaacgcctcgtctacgaggtgcggcagaagtgcagaaacatcgaggacatctgcatctcctgcggatctctgaacgtgaccctggagcacccactgttcatcggcggcatgtgccagaactgtaaaaactgttttctggagtgtgcctatcaatacgacgatgacggctaccagagctactgcaccatctgttgcggcggaagagaggtgctgatgtgtggaaataacaactgctgccggtgcttctgcgtggaatgcgtggacctgctggtgggccccggcgccgcccaggccgctattaaggaagatccttggaactgctacatgtgcggccacaagggcacatacggcctgctgagacggagagaggactggcctagcagactgcagatgttcttcgccaataaccacgaccaggagttcgacccccctaaggtgtaccctcccgtccccgccgagaagagaaagcccatccgggtcctgagcctgttcgatggcatcgccaccggtctgctggtgctgaaggacctgggcatccaggtggataggtacattgcctccgaggtgtgcgaggactccatcaccgtgggaatggtgcgtcatcagggcaagatcatgtacgtgggcgacgtgcggagcgtgacacagaagcatatccaggagtggggccctttcgacctggtgatcggcggcagcccttgcaatgacctgagcatcgtgaacccagcccggaagggcctgtacgagggaaccggcagactgttcttcgagttttacagactgctgcacgacgcccggcctaaggaaggcgacgaccggcccttcttttggctgttcgagaatgtggtggccatgggagtcagcgacaagcgggatattagccggttcctggagagcaaccccgtgatgatcgatgccaaggaagtgagcgccgcccaccgggccagatacttctggggcaatctgcctggcatgaacagacccctggccagcaccgtgaacgacaagctggagctgcaggagtgcctggagcacggccggatcgccaagttcagcaaggtgagaaccatcaccacccgaagcaacagcatcaaacaaggcaaggaccagcactttcctgtgttcatgaacgagaaggaggacatcctgtggtgtaccgagatggagagagtgttcgggttcccagtccactacacagatgtcagcaacatgtctagactggccagacagagactgctgggaagaagctggtccgtccctgtgatcagacacctgttcgcccctctgaaggagtacttcgcctgcgtgagcagcggcaacagcaacgccaacagccggggccccagcttctctagcggcctggtgccactgtccctgagagggagccacatgggccccatggagatctacaaaaccgtgagcgcctggaagcggcagcctgtgcgcgtgctgagcctgtttcggaatatcgataaagtcctgaaaagcctgggattcctggagagcggctctggctccggcggtggcaccctgaagtacgtggaggatgtgacaaacgtggtcagacgggatgtggagaagtggggccccttcgatctggtgtacggcagcacccaacccctgggcagctcttgtgaccggtgccctggctggtacatgtttcagttccaccggatcctgcagtacgccctgccgagacaggagtcccagcggccattcttttggattttcatggacaacttgctgctgaccgaggatgaccaggaaactaccactcggttcctgcagaccgaagccgtgaccctgcaggacgtgagaggccgggactaccagaacgccatgcgggtgtggtccaacatccctggactgaaaagcaagcacgcacctctgacccctaaagaagaggagtacctgcaggcccaggtgcggagcagaagcaagctggacgcccctaaggtggatctgctggtgaagaattgcctcctgcccctgagagagtacttcaagtatttcagccagaatagtctgcccctgggcggcccaagcagcggcgcccctcctcccagcggcggcagcccagccggctccccaacctctaccgaggagggcacctctgagtccgccacccccgagagcggccctggcacctccaccgagcccagcgagggcagcgcacccggcagccctgccggcagccccacctccacagaggagggaaccagcaccgagcccagcgaaggcagcgccccaggcaccagcaccgagcctagtgagggcggctctggcggcggcagcgcccaggagattaaacggatcaacaagatcagaagaagacttgtgaaagacagcaacaccaagaaggccggcaagacaggccccatgaaaaccctgctggttagagtgatgacacccgatctgagagagcggctggaaaacctgagaaagaagcctgaaaatatcccccagcccatcagcaatacatctagagccaacctgaataagctgctgaccgattacaccgaaatgaagaaggcgatcctgcatgtgtactgggaagagttccagaaggaccctgtgggcctgatgagccgggtggcccagcctgccagcaagaagatcgatcagaacaagctgaaacctgagatggacgagaagggcaacctgaccaccgccggctttgcctgctctcagtgtggccagcccctgttcgtgtacaagctggagcaggtgtctgagaagggcaaggcttacaccaactacttcggacggtgcaatgtggccgagcacgaaaagctgatcctgctggcccagctgaagcccgagaaggatagcgacgaagccgtgacatatagcctgggaaagtttgggcagagggccctggatttctacagcattcatgtgaccaaggagtccacccaccccgtgaagcccctggcccagatcgccggaaacagatacgcctccggacctgtgggaaaggccctgagcgacgcatgtatgggcacaatcgcctccttcctgtctaagtaccaggacatcatcatcgaacaccagaaggtggtgaagggcaaccagaagagactggagagcctgcgggagctggccggcaaggaaaacctggaataccctagcgtgaccctgccacctcagcctcacaccaaggagggcgttgatgcctacaacgaagtgatcgcccgggtgcgaatgtgggtgaacctgaacctgtggcagaagctgaagctaagcagagatgatgccaagcctctgctgagactgaagggattcccttcctttcctctggtcgagagacaggccaacgaagtggactggtgggacatggtgtgtaacgtgaagaagctgatcaacgagaaaaaggaggatggcaaggtgttttggcagaatctggctggctacaagagacaggaagccctgagaccatacctgagcagcgaggaagatcggaagaagggaaagaaattcgctcggtaccagctgggcgacctgctgctgcacctggaaaagaagcacggcgaggactggggaaaggtgtacgacgaggcctgggagcggattgacaagaaagtggaaggcctgagcaagcacatcaagctggaagaggaacggagaagcgaggacgcccagagcaaggccgccctgaccgactggctgcgggctaaggccagcttcgtgatcgagggcctgaaggaggccgacaaggacgagttctgcagatgcgagctgaagctgcagaagtggtacggggacctgcggggaaagcccttcgccatcgaagccgagaacagcatcctggacatcagcggcttcagcaagcagtacaactgtgccttcatctggcagaaggacggcgtgaagaagctgaacctgtacctgatcatcaactacttcaagggcggcaagctgcggttcaagaagatcaaacctgaagccttcgaagccaacagattctacaccgtgatcaacaaaaagagcggcgagatcgtgcccatggaggtgaacttcaacttcgacgaccccaacctgatcatcctgcctctggcctttggcaagagacagggcagagaattcatctggaacgacctgctgtccctggaaaccggcagcctgaagctggccaacggaagagtgatcgagaagacactgtacaacagaagaacccggcaggatgagcctgccctgttcgtggccctgaccttcgagcggcgggaggtcctggactcctccaatatcaaaccaatgaacctgatcggcgtggcaagaggcgaaaacatccccgccgtgatcgccctgaccgaccccgagggctgcccactgagccggtttaaggatagcctgggaaacccaacccacatcctgagaatcggcgagagctataaggagaagcagcggaccatccaggccaagaaggaggtggagcagcggagagccggcggctacagccggaagtacgccagcaaagccaagaatctggcagacgatatggtgagaaacaccgctagagatctgctgtactacgccgtgacccaggatgccatgctgatcttcgccaacctgagccggggcttcggccggcagggcaagcggaccttcatggccgagagacagtacacacggatggaggactggctgaccgccaagctggcctacgagggcctgagcaagacctacctgtccaagacactggcccagtacacctccaagacatgcagcaactgtgggtttaccatcaccagcgccgactacgacagggtgctggagaagctgaagaagacagcaacaggctggatgaccacaattaacggcaaggagctgaaggtggagggccagattacctactacaacagatacaagagacagaacgtagtcaaggacctgtccgtcgagctggatagactgagcgaagaatctgtgaacaacgacatctcctcctggacaaagggcagaagcggagaagctctgagcctcctgaagaaaagattctcccatagacccgtgcaggagaagttcgtgtgcctgaactgcggcttcgagacacacgcagccgagcaagccgccctgaacatcgccagatcctggctgttcctgcggagccaggagtacaagaaataccagacaaacaagacaaccggcaacaccgataagagagccttcgtcgagacctggcagtccttttaccggaagaagcttaaggaggtgtggaaacctgccgtgcggtctggcggatctggcggaggctccacaagcatggccggcgaggccgaggcccagctggaccccagcctgcagggcctggtgatgttcgaggacgtgaccgtgtacttcagcagggaggagtggggcctgctgaacgtgacccagaagggcctgtacagggacgtgatgctggagaacttcgccctggtgagcagcctgggcctggcccccagcaggagccccgtgttcacccagctggaggacgacgagcagagctgggtgcccagctgggtgaccagccccaagaaaaagagaaaagtctaagctgccttctgcggggcttgccttctggccatgcccttcttctctcccttgcacctgtacctcttggtctttgaataaagcctgagtaggaaggctagcaaaaaaaaaaaaaaaaaaaaaaaaaaaaaaaaaaaaaaaaaaaaaaaaaaaaaaaaaaaaaaaaaaaaaaaaaaaaaaaa

SEQ ID NO: 7072 - RNA, 5797 nt, synthetic construct
  source 1..5797: mol_type = other RNA
aggaaataagagagaaaagaagagtaagaagaaatataagagccaccatggcccctaagaagaagcgtaaagtgagccggatggaacgcctcgtctacgaggtgcggcagaagtgcagaaacatcgaggacatctgcatctcctgcggatctctgaacgtgaccctggagcacccactgttcatcggcggcatgtgccagaactgtaaaaactgttttctggagtgtgcctatcaatacgacgatgacggctaccagagctactgcaccatctgttgcggcggaagagaggtgctgatgtgtggaaataacaactgctgccggtgcttctgcgtggaatgcgtggacctgctggtgggccccggcgccgcccaggccgctattaaggaagatccttggaactgctacatgtgcggccacaagggcacatacggcctgctgagacggagagaggactggcctagcagactgcagatgttcttcgccaataaccacgaccaggagttcgacccccctaaggtgtaccctcccgtccccgccgagaagagaaagcccatccgggtcctgagcctgttcgatggcatcgccaccggtctgctggtgctgaaggacctgggcatccaggtggataggtacattgcctccgaggtgtgcgaggactccatcaccgtgggaatggtgcgtcatcagggcaagatcatgtacgtgggcgacgtgcggagcgtgacacagaagcatatccaggagtggggccctttcgacctggtgatcggcggcagcccttgcaatgacctgagcatcgtgaacccagcccggaagggcctgtacgagggaaccggcagactgttcttcgagttttacagactgctgcacgacgcccggcctaaggaaggcgacgaccggcccttcttttggctgttcgagaatgtggtggccatgggagtcagcgacaagcgggatattagccggttcctggagagcaaccccgtgatgatcgatgccaaggaagtgagcgccgcccaccgggccagatacttctggggcaatctgcctggcatgaacagacccctggccagcaccgtgaacgacaagctggagctgcaggagtgcctggagcacggccggatcgccaagttcagcaaggtgagaaccatcaccacccgaagcaacagcatcaaacaaggcaaggaccagcactttcctgtgttcatgaacgagaaggaggacatcctgtggtgtaccgagatggagagagtgttcgggttcccagtccactacacagatgtcagcaacatgtctagactggccagacagagactgctgggaagaagctggtccgtccctgtgatcagacacctgttcgcccctctgaaggagtacttcgcctgcgtgagcagcggcaacagcaacgccaacagccggggccccagcttctctagcggcctggtgccactgtccctgagagggagccacatgggccccatggagatctacaaaaccgtgagcgcctggaagcggcagcctgtgcgcgtgctgagcctgtttcggaatatcgataaagtcctgaaaagcctgggattcctggagagcggctctggctccggcggtggcaccctgaagtacgtggaggatgtgacaaacgtggtcagacgggatgtggagaagtggggccccttcgatctggtgtacggcagcacccaacccctgggcagctcttgtgaccggtgccctggctggtacatgtttcagttccaccggatcctgcagtacgccctgccgagacaggagtcccagcggccattcttttggattttcatggacaacttgctgctgaccgaggatgaccaggaaactaccactcggttcctgcagaccgaagccgtgaccctgcaggacgtgagaggccgggactaccagaacgccatgcgggtgtggtccaacatccctggactgaaaagcaagcacgcacctctgacccctaaagaagaggagtacctgcaggcccaggtgcggagcagaagcaagctggacgcccctaaggtggatctgctggtgaagaattgcctcctgcccctgagagagtacttcaagtatttcagccagaatagtctgcccctgggcggcccaagcagcggcgcccctcctcccagcggcggcagcccagccggctccccaacctctaccgaggagggcacctctgagtccgccacccccgagagcggccctggcacctccaccgagcccagcgagggcagcgcacccggcagccctgccggcagccccacctccacagaggagggaaccagcaccgagcccagcgaaggcagcgccccaggcaccagcaccgagcctagtgagggcggctctggcggcggcagcgcccaggagattaaacggatcaacaagatcagaagaagacttgtgaaagacagcaacaccaagaaggccggcaagacaggccccatgaaaaccctgctggttagagtgatgacacccgatctgagagagcggctggaaaacctgagaaagaagcctgaaaatatcccccagcccatcagcaatacatctagagccaacctgaataagctgctgaccgattacaccgaaatgaagaaggcgatcctgcatgtgtactgggaagagttccagaaggaccctgtgggcctgatgagccgggtggcccagcctgccagcaagaagatcgatcagaacaagctgaaacctgagatggacgagaagggcaacctgaccaccgccggctttgcctgctctcagtgtggccagcccctgttcgtgtacaagctggagcaggtgtctgagaagggcaaggcttacaccaactacttcggacggtgcaatgtggccgagcacgaaaagctgatcctgctggcccagctgaagcccgagaaggatagcgacgaagccgtgacatatagcctgggaaagtttgggcagagggccctggatttctacagcattcatgtgaccaaggagtccacccaccccgtgaagcccctggcccagatcgccggaaacagatacgcctccggacctgtgggaaaggccctgagcgacgcatgtatgggcacaatcgcctccttcctgtctaagtaccaggacatcatcatcgaacaccagaaggtggtgaagggcaaccagaagagactggagagcctgcgggagctggccggcaaggaaaacctggaataccctagcgtgaccctgccacctcagcctcacaccaaggagggcgttgatgcctacaacgaagtgatcgcccgggtgcgaatgtgggtgaacctgaacctgtggcagaagctgaagctaagcagagatgatgccaagcctctgctgagactgaagggattcccttcctttcctctggtcgagagacaggccaacgaagtggactggtgggacatggtgtgtaacgtgaagaagctgatcaacgagaaaaaggaggatggcaaggtgttttggcagaatctggctggctacaagagacaggaagccctgagaccatacctgagcagcgaggaagatcggaagaagggaaagaaattcgctcggtaccagctgggcgacctgctgctgcacctggaaaagaagcacggcgaggactggggaaaggtgtacgacgaggcctgggagcggattgacaagaaagtggaaggcctgagcaagcacatcaagctggaagaggaacggagaagcgaggacgcccagagcaaggccgccctgaccgactggctgcgggctaaggccagcttcgtgatcgagggcctgaaggaggccgacaaggacgagttctgcagatgcgagctgaagctgcagaagtggtacggggacctgcggggaaagcccttcgccatcgaagccgagaacagcatcctggacatcagcggcttcagcaagcagtacaactgtgccttcatctggcagaaggacggcgtgaagaagctgaacctgtacctgatcatcaactacttcaagggcggcaagctgcggttcaagaagatcaaacctgaagccttcgaagccaacagattctacaccgtgatcaacaaaaagagcggcgagatcgtgcccatggaggtgaacttcaacttcgacgaccccaacctgatcatcctgcctctggcctttggcaagagacagggcagagaattcatctggaacgacctgctgtccctggaaaccggcagcctgaagctggccaacggaagagtgatcgagaagacactgtacaacagaagaacccggcaggatgagcctgccctgttcgtggccctgaccttcgagcggcgggaggtcctggactcctccaatatcaaaccaatgaacctgatcggcgtggcaagaggcgaaaacatccccgccgtgatcgccctgaccgaccccgagggctgcccactgagccggtttaaggatagcctgggaaacccaacccacatcctgagaatcggcgagagctataaggagaagcagcggaccatccaggccaagaaggaggtggagcagcggagagccggcggctacagccggaagtacgccagcaaagccaagaatctggcagacgatatggtgagaaacaccgctagagatctgctgtactacgccgtgacccaggatgccatgctgatcttcgccaacctgagccggggcttcggccggcagggcaagcggaccttcatggccgagagacagtacacacggatggaggactggctgaccgccaagctggcctacgagggcctgagcaagacctacctgtccaagacactggcccagtacacctccaagacatgcagcaactgtgggtttaccatcaccagcgccgactacgacagggtgctggagaagctgaagaagacagcaacaggctggatgaccacaattaacggcaaggagctgaaggtggagggccagattacctactacaacagatacaagagacagaacgtagtcaaggacctgtccgtcgagctggatagactgagcgaagaatctgtgaacaacgacatctcctcctggacaaagggcagaagcggagaagctctgagcctcctgaagaaaagattctcccatagacccgtgcaggagaagttcgtgtgcctgaactgcggcttcgagacacacgcagccgagcaagccgccctgaacatcgccagatcctggctgttcctgcggagccaggagtacaagaaataccagacaaacaagacaaccggcaacaccgataagagagccttcgtcgagacctggcagtccttttaccggaagaagcttaaggaggtgtggaaacctgccgtgcggtctggcggatctggcggaggctccacaagcatggagctgctgagcttcgaggacgtggccatgtacttcaccagggaggagtggggccacctggactggggccagaaggacctgtacagggacgtgatgctggagaactacaggaacatggtgctgctgggcttccagttccccaagcccgaggtgatctgccagctggagaactgggacgagcagtggatcctggacctgcccagggccggcagcaggaaggccagcggcagcgcctgccccaccagccccaagaaaaagagaaaagtctaagctgccttctgcggggcttgccttctggccatgcccttcttctctcccttgcacctgtacctcttggtctttgaataaagcctgagtaggaaggctagcaaaaaaaaaaaaaaaaaaaaaaaaaaaaaaaaaaaaaaaaaaaaaaaaaaaaaaaaaaaaaaaaaaaaaaaaaaaaaaaa

SEQ ID NO: 7073 - RNA, 5797 nt, synthetic construct
  source 1..5797: mol_type = other RNA
aggaaataagagagaaaagaagagtaagaagaaatataagagccaccatggcccctaagaagaagcgtaaagtgagccggatggaacgcctcgtctacgaggtgcggcagaagtgcagaaacatcgaggacatctgcatctcctgcggatctctgaacgtgaccctggagcacccactgttcatcggcggcatgtgccagaactgtaaaaactgttttctggagtgtgcctatcaatacgacgatgacggctaccagagctactgcaccatctgttgcggcggaagagaggtgctgatgtgtggaaataacaactgctgccggtgcttctgcgtggaatgcgtggacctgctggtgggccccggcgccgcccaggccgctattaaggaagatccttggaactgctacatgtgcggccacaagggcacatacggcctgctgagacggagagaggactggcctagcagactgcagatgttcttcgccaataaccacgaccaggagttcgacccccctaaggtgtaccctcccgtccccgccgagaagagaaagcccatccgggtcctgagcctgttcgatggcatcgccaccggtctgctggtgctgaaggacctgggcatccaggtggataggtacattgcctccgaggtgtgcgaggactccatcaccgtgggaatggtgcgtcatcagggcaagatcatgtacgtgggcgacgtgcggagcgtgacacagaagcatatccaggagtggggccctttcgacctggtgatcggcggcagcccttgcaatgacctgagcatcgtgaacccagcccggaagggcctgtacgagggaaccggcagactgttcttcgagttttacagactgctgcacgacgcccggcctaaggaaggcgacgaccggcccttcttttggctgttcgagaatgtggtggccatgggagtcagcgacaagcgggatattagccggttcctggagagcaaccccgtgatgatcgatgccaaggaagtgagcgccgcccaccgggccagatacttctggggcaatctgcctggcatgaacagacccctggccagcaccgtgaacgacaagctggagctgcaggagtgcctggagcacggccggatcgccaagttcagcaaggtgagaaccatcaccacccgaagcaacagcatcaaacaaggcaaggaccagcactttcctgtgttcatgaacgagaaggaggacatcctgtggtgtaccgagatggagagagtgttcgggttcccagtccactacacagatgtcagcaacatgtctagactggccagacagagactgctgggaagaagctggtccgtccctgtgatcagacacctgttcgcccctctgaaggagtacttcgcctgcgtgagcagcggcaacagcaacgccaacagccggggccccagcttctctagcggcctggtgccactgtccctgagagggagccacatgggccccatggagatctacaaaaccgtgagcgcctggaagcggcagcctgtgcgcgtgctgagcctgtttcggaatatcgataaagtcctgaaaagcctgggattcctggagagcggctctggctccggcggtggcaccctgaagtacgtggaggatgtgacaaacgtggtcagacgggatgtggagaagtggggccccttcgatctggtgtacggcagcacccaacccctgggcagctcttgtgaccggtgccctggctggtacatgtttcagttccaccggatcctgcagtacgccctgccgagacaggagtcccagcggccattcttttggattttcatggacaacttgctgctgaccgaggatgaccaggaaactaccactcggttcctgcagaccgaagccgtgaccctgcaggacgtgagaggccgggactaccagaacgccatgcgggtgtggtccaacatccctggactgaaaagcaagcacgcacctctgacccctaaagaagaggagtacctgcaggcccaggtgcggagcagaagcaagctggacgcccctaaggtggatctgctggtgaagaattgcctcctgcccctgagagagtacttcaagtatttcagccagaatagtctgcccctgggcggcccaagcagcggcgcccctcctcccagcggcggcagcccagccggctccccaacctctaccgaggagggcacctctgagtccgccacccccgagagcggccctggcacctccaccgagcccagcgagggcagcgcacccggcagccctgccggcagccccacctccacagaggagggaaccagcaccgagcccagcgaaggcagcgccccaggcaccagcaccgagcctagtgagggcggctctggcggcggcagcgcccaggagattaaacggatcaacaagatcagaagaagacttgtgaaagacagcaacaccaagaaggccggcaagacaggccccatgaaaaccctgctggttagagtgatgacacccgatctgagagagcggctggaaaacctgagaaagaagcctgaaaatatcccccagcccatcagcaatacatctagagccaacctgaataagctgctgaccgattacaccgaaatgaagaaggcgatcctgcatgtgtactgggaagagttccagaaggaccctgtgggcctgatgagccgggtggcccagcctgccagcaagaagatcgatcagaacaagctgaaacctgagatggacgagaagggcaacctgaccaccgccggctttgcctgctctcagtgtggccagcccctgttcgtgtacaagctggagcaggtgtctgagaagggcaaggcttacaccaactacttcggacggtgcaatgtggccgagcacgaaaagctgatcctgctggcccagctgaagcccgagaaggatagcgacgaagccgtgacatatagcctgggaaagtttgggcagagggccctggatttctacagcattcatgtgaccaaggagtccacccaccccgtgaagcccctggcccagatcgccggaaacagatacgcctccggacctgtgggaaaggccctgagcgacgcatgtatgggcacaatcgcctccttcctgtctaagtaccaggacatcatcatcgaacaccagaaggtggtgaagggcaaccagaagagactggagagcctgcgggagctggccggcaaggaaaacctggaataccctagcgtgaccctgccacctcagcctcacaccaaggagggcgttgatgcctacaacgaagtgatcgcccgggtgcgaatgtgggtgaacctgaacctgtggcagaagctgaagctaagcagagatgatgccaagcctctgctgagactgaagggattcccttcctttcctctggtcgagagacaggccaacgaagtggactggtgggacatggtgtgtaacgtgaagaagctgatcaacgagaaaaaggaggatggcaaggtgttttggcagaatctggctggctacaagagacaggaagccctgagaccatacctgagcagcgaggaagatcggaagaagggaaagaaattcgctcggtaccagctgggcgacctgctgctgcacctggaaaagaagcacggcgaggactggggaaaggtgtacgacgaggcctgggagcggattgacaagaaagtggaaggcctgagcaagcacatcaagctggaagaggaacggagaagcgaggacgcccagagcaaggccgccctgaccgactggctgcgggctaaggccagcttcgtgatcgagggcctgaaggaggccgacaaggacgagttctgcagatgcgagctgaagctgcagaagtggtacggggacctgcggggaaagcccttcgccatcgaagccgagaacagcatcctggacatcagcggcttcagcaagcagtacaactgtgccttcatctggcagaaggacggcgtgaagaagctgaacctgtacctgatcatcaactacttcaagggcggcaagctgcggttcaagaagatcaaacctgaagccttcgaagccaacagattctacaccgtgatcaacaaaaagagcggcgagatcgtgcccatggaggtgaacttcaacttcgacgaccccaacctgatcatcctgcctctggcctttggcaagagacagggcagagaattcatctggaacgacctgctgtccctggaaaccggcagcctgaagctggccaacggaagagtgatcgagaagacactgtacaacagaagaacccggcaggatgagcctgccctgttcgtggccctgaccttcgagcggcgggaggtcctggactcctccaatatcaaaccaatgaacctgatcggcgtggcaagaggcgaaaacatccccgccgtgatcgccctgaccgaccccgagggctgcccactgagccggtttaaggatagcctgggaaacccaacccacatcctgagaatcggcgagagctataaggagaagcagcggaccatccaggccaagaaggaggtggagcagcggagagccggcggctacagccggaagtacgccagcaaagccaagaatctggcagacgatatggtgagaaacaccgctagagatctgctgtactacgccgtgacccaggatgccatgctgatcttcgccaacctgagccggggcttcggccggcagggcaagcggaccttcatggccgagagacagtacacacggatggaggactggctgaccgccaagctggcctacgagggcctgagcaagacctacctgtccaagacactggcccagtacacctccaagacatgcagcaactgtgggtttaccatcaccagcgccgactacgacagggtgctggagaagctgaagaagacagcaacaggctggatgaccacaattaacggcaaggagctgaaggtggagggccagattacctactacaacagatacaagagacagaacgtagtcaaggacctgtccgtcgagctggatagactgagcgaagaatctgtgaacaacgacatctcctcctggacaaagggcagaagcggagaagctctgagcctcctgaagaaaagattctcccatagacccgtgcaggagaagttcgtgtgcctgaactgcggcttcgagacacacgcagccgagcaagccgccctgaacatcgccagatcctggctgttcctgcggagccaggagtacaagaaataccagacaaacaagacaaccggcaacaccgataagagagccttcgtcgagacctggcagtccttttaccggaagaagcttaaggaggtgtggaaacctgccgtgcggtctggcggatctggcggaggctccacaagccagatccccgtgatcttcgaggacatcgtgatctacttcagccaggaggagtggaaggacctggaggagtggcagaaggagctgtacaaggacgtgatgaaggagaactaccagaccctgatcagcctgggcaccggcttccccacccccccccccgacatcatcagccacatcgagaggggcgaggagccctacatcagggacgagctggagagcgagaagagggagaccggcaagaggggcaccagccccaagaaaaagagaaaagtctaagctgccttctgcggggcttgccttctggccatgcccttcttctctcccttgcacctgtacctcttggtctttgaataaagcctgagtaggaaggctagcaaaaaaaaaaaaaaaaaaaaaaaaaaaaaaaaaaaaaaaaaaaaaaaaaaaaaaaaaaaaaaaaaaaaaaaaaaaaaaaa

SEQ ID NO: 7074 - RNA, 5797 nt, synthetic construct
  source 1..5797: mol_type = other RNA
aggaaataagagagaaaagaagagtaagaagaaatataagagccaccatggcccctaagaagaagcgtaaagtgagccggatggaacgcctcgtctacgaggtgcggcagaagtgcagaaacatcgaggacatctgcatctcctgcggatctctgaacgtgaccctggagcacccactgttcatcggcggcatgtgccagaactgtaaaaactgttttctggagtgtgcctatcaatacgacgatgacggctaccagagctactgcaccatctgttgcggcggaagagaggtgctgatgtgtggaaataacaactgctgccggtgcttctgcgtggaatgcgtggacctgctggtgggccccggcgccgcccaggccgctattaaggaagatccttggaactgctacatgtgcggccacaagggcacatacggcctgctgagacggagagaggactggcctagcagactgcagatgttcttcgccaataaccacgaccaggagttcgacccccctaaggtgtaccctcccgtccccgccgagaagagaaagcccatccgggtcctgagcctgttcgatggcatcgccaccggtctgctggtgctgaaggacctgggcatccaggtggataggtacattgcctccgaggtgtgcgaggactccatcaccgtgggaatggtgcgtcatcagggcaagatcatgtacgtgggcgacgtgcggagcgtgacacagaagcatatccaggagtggggccctttcgacctggtgatcggcggcagcccttgcaatgacctgagcatcgtgaacccagcccggaagggcctgtacgagggaaccggcagactgttcttcgagttttacagactgctgcacgacgcccggcctaaggaaggcgacgaccggcccttcttttggctgttcgagaatgtggtggccatgggagtcagcgacaagcgggatattagccggttcctggagagcaaccccgtgatgatcgatgccaaggaagtgagcgccgcccaccgggccagatacttctggggcaatctgcctggcatgaacagacccctggccagcaccgtgaacgacaagctggagctgcaggagtgcctggagcacggccggatcgccaagttcagcaaggtgagaaccatcaccacccgaagcaacagcatcaaacaaggcaaggaccagcactttcctgtgttcatgaacgagaaggaggacatcctgtggtgtaccgagatggagagagtgttcgggttcccagtccactacacagatgtcagcaacatgtctagactggccagacagagactgctgggaagaagctggtccgtccctgtgatcagacacctgttcgcccctctgaaggagtacttcgcctgcgtgagcagcggcaacagcaacgccaacagccggggccccagcttctctagcggcctggtgccactgtccctgagagggagccacatgggccccatggagatctacaaaaccgtgagcgcctggaagcggcagcctgtgcgcgtgctgagcctgtttcggaatatcgataaagtcctgaaaagcctgggattcctggagagcggctctggctccggcggtggcaccctgaagtacgtggaggatgtgacaaacgtggtcagacgggatgtggagaagtggggccccttcgatctggtgtacggcagcacccaacccctgggcagctcttgtgaccggtgccctggctggtacatgtttcagttccaccggatcctgcagtacgccctgccgagacaggagtcccagcggccattcttttggattttcatggacaacttgctgctgaccgaggatgaccaggaaactaccactcggttcctgcagaccgaagccgtgaccctgcaggacgtgagaggccgggactaccagaacgccatgcgggtgtggtccaacatccctggactgaaaagcaagcacgcacctctgacccctaaagaagaggagtacctgcaggcccaggtgcggagcagaagcaagctggacgcccctaaggtggatctgctggtgaagaattgcctcctgcccctgagagagtacttcaagtatttcagccagaatagtctgcccctgggcggcccaagcagcggcgcccctcctcccagcggcggcagcccagccggctccccaacctctaccgaggagggcacctctgagtccgccacccccgagagcggccctggcacctccaccgagcccagcgagggcagcgcacccggcagccctgccggcagccccacctccacagaggagggaaccagcaccgagcccagcgaaggcagcgccccaggcaccagcaccgagcctagtgagggcggctctggcggcggcagcgcccaggagattaaacggatcaacaagatcagaagaagacttgtgaaagacagcaacaccaagaaggccggcaagacaggccccatgaaaaccctgctggttagagtgatgacacccgatctgagagagcggctggaaaacctgagaaagaagcctgaaaatatcccccagcccatcagcaatacatctagagccaacctgaataagctgctgaccgattacaccgaaatgaagaaggcgatcctgcatgtgtactgggaagagttccagaaggaccctgtgggcctgatgagccgggtggcccagcctgccagcaagaagatcgatcagaacaagctgaaacctgagatggacgagaagggcaacctgaccaccgccggctttgcctgctctcagtgtggccagcccctgttcgtgtacaagctggagcaggtgtctgagaagggcaaggcttacaccaactacttcggacggtgcaatgtggccgagcacgaaaagctgatcctgctggcccagctgaagcccgagaaggatagcgacgaagccgtgacatatagcctgggaaagtttgggcagagggccctggatttctacagcattcatgtgaccaaggagtccacccaccccgtgaagcccctggcccagatcgccggaaacagatacgcctccggacctgtgggaaaggccctgagcgacgcatgtatgggcacaatcgcctccttcctgtctaagtaccaggacatcatcatcgaacaccagaaggtggtgaagggcaaccagaagagactggagagcctgcgggagctggccggcaaggaaaacctggaataccctagcgtgaccctgccacctcagcctcacaccaaggagggcgttgatgcctacaacgaagtgatcgcccgggtgcgaatgtgggtgaacctgaacctgtggcagaagctgaagctaagcagagatgatgccaagcctctgctgagactgaagggattcccttcctttcctctggtcgagagacaggccaacgaagtggactggtgggacatggtgtgtaacgtgaagaagctgatcaacgagaaaaaggaggatggcaaggtgttttggcagaatctggctggctacaagagacaggaagccctgagaccatacctgagcagcgaggaagatcggaagaagggaaagaaattcgctcggtaccagctgggcgacctgctgctgcacctggaaaagaagcacggcgaggactggggaaaggtgtacgacgaggcctgggagcggattgacaagaaagtggaaggcctgagcaagcacatcaagctggaagaggaacggagaagcgaggacgcccagagcaaggccgccctgaccgactggctgcgggctaaggccagcttcgtgatcgagggcctgaaggaggccgacaaggacgagttctgcagatgcgagctgaagctgcagaagtggtacggggacctgcggggaaagcccttcgccatcgaagccgagaacagcatcctggacatcagcggcttcagcaagcagtacaactgtgccttcatctggcagaaggacggcgtgaagaagctgaacctgtacctgatcatcaactacttcaagggcggcaagctgcggttcaagaagatcaaacctgaagccttcgaagccaacagattctacaccgtgatcaacaaaaagagcggcgagatcgtgcccatggaggtgaacttcaacttcgacgaccccaacctgatcatcctgcctctggcctttggcaagagacagggcagagaattcatctggaacgacctgctgtccctggaaaccggcagcctgaagctggccaacggaagagtgatcgagaagacactgtacaacagaagaacccggcaggatgagcctgccctgttcgtggccctgaccttcgagcggcgggaggtcctggactcctccaatatcaaaccaatgaacctgatcggcgtggcaagaggcgaaaacatccccgccgtgatcgccctgaccgaccccgagggctgcccactgagccggtttaaggatagcctgggaaacccaacccacatcctgagaatcggcgagagctataaggagaagcagcggaccatccaggccaagaaggaggtggagcagcggagagccggcggctacagccggaagtacgccagcaaagccaagaatctggcagacgatatggtgagaaacaccgctagagatctgctgtactacgccgtgacccaggatgccatgctgatcttcgccaacctgagccggggcttcggccggcagggcaagcggaccttcatggccgagagacagtacacacggatggaggactggctgaccgccaagctggcctacgagggcctgagcaagacctacctgtccaagacactggcccagtacacctccaagacatgcagcaactgtgggtttaccatcaccagcgccgactacgacagggtgctggagaagctgaagaagacagcaacaggctggatgaccacaattaacggcaaggagctgaaggtggagggccagattacctactacaacagatacaagagacagaacgtagtcaaggacctgtccgtcgagctggatagactgagcgaagaatctgtgaacaacgacatctcctcctggacaaagggcagaagcggagaagctctgagcctcctgaagaaaagattctcccatagacccgtgcaggagaagttcgtgtgcctgaactgcggcttcgagacacacgcagccgagcaagccgccctgaacatcgccagatcctggctgttcctgcggagccaggagtacaagaaataccagacaaacaagacaaccggcaacaccgataagagagccttcgtcgagacctggcagtccttttaccggaagaagcttaaggaggtgtggaaacctgccgtgcggtctggcggatctggcggaggctccacaagcttccaggagcccgtgagcttcaaggacgtgagcgtggtgttcaccgaggaggagctgggcctgctggacagcgcccagaggaagctgtacagggacgtgatgctggagaacttccagaacctgctgagcgtgggcaaccagcccttcaagcccgagctgatcttccagctggagagggaggaggagctgctgatgatggagaccgagacccagagggacggctgcagcggcaccaagagccagaccagccccaagaaaaagagaaaagtctaagctgccttctgcggggcttgccttctggccatgcccttcttctctcccttgcacctgtacctcttggtctttgaataaagcctgagtaggaaggctagcaaaaaaaaaaaaaaaaaaaaaaaaaaaaaaaaaaaaaaaaaaaaaaaaaaaaaaaaaaaaaaaaaaaaaaaaaaaaaaaa

SEQ ID NO: 7075 - RNA, 5797 nt, synthetic construct
  source 1..5797: mol_type = other RNA
aggaaataagagagaaaagaagagtaagaagaaatataagagccaccatggcccctaagaagaagcgtaaagtgagccggatggaacgcctcgtctacgaggtgcggcagaagtgcagaaacatcgaggacatctgcatctcctgcggatctctgaacgtgaccctggagcacccactgttcatcggcggcatgtgccagaactgtaaaaactgttttctggagtgtgcctatcaatacgacgatgacggctaccagagctactgcaccatctgttgcggcggaagagaggtgctgatgtgtggaaataacaactgctgccggtgcttctgcgtggaatgcgtggacctgctggtgggccccggcgccgcccaggccgctattaaggaagatccttggaactgctacatgtgcggccacaagggcacatacggcctgctgagacggagagaggactggcctagcagactgcagatgttcttcgccaataaccacgaccaggagttcgacccccctaaggtgtaccctcccgtccccgccgagaagagaaagcccatccgggtcctgagcctgttcgatggcatcgccaccggtctgctggtgctgaaggacctgggcatccaggtggataggtacattgcctccgaggtgtgcgaggactccatcaccgtgggaatggtgcgtcatcagggcaagatcatgtacgtgggcgacgtgcggagcgtgacacagaagcatatccaggagtggggccctttcgacctggtgatcggcggcagcccttgcaatgacctgagcatcgtgaacccagcccggaagggcctgtacgagggaaccggcagactgttcttcgagttttacagactgctgcacgacgcccggcctaaggaaggcgacgaccggcccttcttttggctgttcgagaatgtggtggccatgggagtcagcgacaagcgggatattagccggttcctggagagcaaccccgtgatgatcgatgccaaggaagtgagcgccgcccaccgggccagatacttctggggcaatctgcctggcatgaacagacccctggccagcaccgtgaacgacaagctggagctgcaggagtgcctggagcacggccggatcgccaagttcagcaaggtgagaaccatcaccacccgaagcaacagcatcaaacaaggcaaggaccagcactttcctgtgttcatgaacgagaaggaggacatcctgtggtgtaccgagatggagagagtgttcgggttcccagtccactacacagatgtcagcaacatgtctagactggccagacagagactgctgggaagaagctggtccgtccctgtgatcagacacctgttcgcccctctgaaggagtacttcgcctgcgtgagcagcggcaacagcaacgccaacagccggggccccagcttctctagcggcctggtgccactgtccctgagagggagccacatgggccccatggagatctacaaaaccgtgagcgcctggaagcggcagcctgtgcgcgtgctgagcctgtttcggaatatcgataaagtcctgaaaagcctgggattcctggagagcggctctggctccggcggtggcaccctgaagtacgtggaggatgtgacaaacgtggtcagacgggatgtggagaagtggggccccttcgatctggtgtacggcagcacccaacccctgggcagctcttgtgaccggtgccctggctggtacatgtttcagttccaccggatcctgcagtacgccctgccgagacaggagtcccagcggccattcttttggattttcatggacaacttgctgctgaccgaggatgaccaggaaactaccactcggttcctgcagaccgaagccgtgaccctgcaggacgtgagaggccgggactaccagaacgccatgcgggtgtggtccaacatccctggactgaaaagcaagcacgcacctctgacccctaaagaagaggagtacctgcaggcccaggtgcggagcagaagcaagctggacgcccctaaggtggatctgctggtgaagaattgcctcctgcccctgagagagtacttcaagtatttcagccagaatagtctgcccctgggcggcccaagcagcggcgcccctcctcccagcggcggcagcccagccggctccccaacctctaccgaggagggcacctctgagtccgccacccccgagagcggccctggcacctccaccgagcccagcgagggcagcgcacccggcagccctgccggcagccccacctccacagaggagggaaccagcaccgagcccagcgaaggcagcgccccaggcaccagcaccgagcctagtgagggcggctctggcggcggcagcgcccaggagattaaacggatcaacaagatcagaagaagacttgtgaaagacagcaacaccaagaaggccggcaagacaggccccatgaaaaccctgctggttagagtgatgacacccgatctgagagagcggctggaaaacctgagaaagaagcctgaaaatatcccccagcccatcagcaatacatctagagccaacctgaataagctgctgaccgattacaccgaaatgaagaaggcgatcctgcatgtgtactgggaagagttccagaaggaccctgtgggcctgatgagccgggtggcccagcctgccagcaagaagatcgatcagaacaagctgaaacctgagatggacgagaagggcaacctgaccaccgccggctttgcctgctctcagtgtggccagcccctgttcgtgtacaagctggagcaggtgtctgagaagggcaaggcttacaccaactacttcggacggtgcaatgtggccgagcacgaaaagctgatcctgctggcccagctgaagcccgagaaggatagcgacgaagccgtgacatatagcctgggaaagtttgggcagagggccctggatttctacagcattcatgtgaccaaggagtccacccaccccgtgaagcccctggcccagatcgccggaaacagatacgcctccggacctgtgggaaaggccctgagcgacgcatgtatgggcacaatcgcctccttcctgtctaagtaccaggacatcatcatcgaacaccagaaggtggtgaagggcaaccagaagagactggagagcctgcgggagctggccggcaaggaaaacctggaataccctagcgtgaccctgccacctcagcctcacaccaaggagggcgttgatgcctacaacgaagtgatcgcccgggtgcgaatgtgggtgaacctgaacctgtggcagaagctgaagctaagcagagatgatgccaagcctctgctgagactgaagggattcccttcctttcctctggtcgagagacaggccaacgaagtggactggtgggacatggtgtgtaacgtgaagaagctgatcaacgagaaaaaggaggatggcaaggtgttttggcagaatctggctggctacaagagacaggaagccctgagaccatacctgagcagcgaggaagatcggaagaagggaaagaaattcgctcggtaccagctgggcgacctgctgctgcacctggaaaagaagcacggcgaggactggggaaaggtgtacgacgaggcctgggagcggattgacaagaaagtggaaggcctgagcaagcacatcaagctggaagaggaacggagaagcgaggacgcccagagcaaggccgccctgaccgactggctgcgggctaaggccagcttcgtgatcgagggcctgaaggaggccgacaaggacgagttctgcagatgcgagctgaagctgcagaagtggtacggggacctgcggggaaagcccttcgccatcgaagccgagaacagcatcctggacatcagcggcttcagcaagcagtacaactgtgccttcatctggcagaaggacggcgtgaagaagctgaacctgtacctgatcatcaactacttcaagggcggcaagctgcggttcaagaagatcaaacctgaagccttcgaagccaacagattctacaccgtgatcaacaaaaagagcggcgagatcgtgcccatggaggtgaacttcaacttcgacgaccccaacctgatcatcctgcctctggcctttggcaagagacagggcagagaattcatctggaacgacctgctgtccctggaaaccggcagcctgaagctggccaacggaagagtgatcgagaagacactgtacaacagaagaacccggcaggatgagcctgccctgttcgtggccctgaccttcgagcggcgggaggtcctggactcctccaatatcaaaccaatgaacctgatcggcgtggcaagaggcgaaaacatccccgccgtgatcgccctgaccgaccccgagggctgcccactgagccggtttaaggatagcctgggaaacccaacccacatcctgagaatcggcgagagctataaggagaagcagcggaccatccaggccaagaaggaggtggagcagcggagagccggcggctacagccggaagtacgccagcaaagccaagaatctggcagacgatatggtgagaaacaccgctagagatctgctgtactacgccgtgacccaggatgccatgctgatcttcgccaacctgagccggggcttcggccggcagggcaagcggaccttcatggccgagagacagtacacacggatggaggactggctgaccgccaagctggcctacgagggcctgagcaagacctacctgtccaagacactggcccagtacacctccaagacatgcagcaactgtgggtttaccatcaccagcgccgactacgacagggtgctggagaagctgaagaagacagcaacaggctggatgaccacaattaacggcaaggagctgaaggtggagggccagattacctactacaacagatacaagagacagaacgtagtcaaggacctgtccgtcgagctggatagactgagcgaagaatctgtgaacaacgacatctcctcctggacaaagggcagaagcggagaagctctgagcctcctgaagaaaagattctcccatagacccgtgcaggagaagttcgtgtgcctgaactgcggcttcgagacacacgcagccgagcaagccgccctgaacatcgccagatcctggctgttcctgcggagccaggagtacaagaaataccagacaaacaagacaaccggcaacaccgataagagagccttcgtcgagacctggcagtccttttaccggaagaagcttaaggaggtgtggaaacctgccgtgcggtctggcggatctggcggaggctccacaagcccccaggagagcgtgaccttcgaggacgtggccgtggacttcacctgggaggagtggggctacctggacaccagccagaaggagctgtactgggaggtgatgctggagaactacaagaacctggtgagcctgggcttcgtggtggccaagcccgacgccatcagccagctggagcaggaggaggccccctggaggcccgaggtgctgttccccaggagcagctgcagcgacctggacaccaagaccagccccaagaaaaagagaaaagtctaagctgccttctgcggggcttgccttctggccatgcccttcttctctcccttgcacctgtacctcttggtctttgaataaagcctgagtaggaaggctagcaaaaaaaaaaaaaaaaaaaaaaaaaaaaaaaaaaaaaaaaaaaaaaaaaaaaaaaaaaaaaaaaaaaaaaaaaaaaaaaa

SEQ ID NO: 7076 - RNA, 5797 nt, synthetic construct
  source 1..5797: mol_type = other RNA
aggaaataagagagaaaagaagagtaagaagaaatataagagccaccatggcccctaagaagaagcgtaaagtgagccggatggaacgcctcgtctacgaggtgcggcagaagtgcagaaacatcgaggacatctgcatctcctgcggatctctgaacgtgaccctggagcacccactgttcatcggcggcatgtgccagaactgtaaaaactgttttctggagtgtgcctatcaatacgacgatgacggctaccagagctactgcaccatctgttgcggcggaagagaggtgctgatgtgtggaaataacaactgctgccggtgcttctgcgtggaatgcgtggacctgctggtgggccccggcgccgcccaggccgctattaaggaagatccttggaactgctacatgtgcggccacaagggcacatacggcctgctgagacggagagaggactggcctagcagactgcagatgttcttcgccaataaccacgaccaggagttcgacccccctaaggtgtaccctcccgtccccgccgagaagagaaagcccatccgggtcctgagcctgttcgatggcatcgccaccggtctgctggtgctgaaggacctgggcatccaggtggataggtacattgcctccgaggtgtgcgaggactccatcaccgtgggaatggtgcgtcatcagggcaagatcatgtacgtgggcgacgtgcggagcgtgacacagaagcatatccaggagtggggccctttcgacctggtgatcggcggcagcccttgcaatgacctgagcatcgtgaacccagcccggaagggcctgtacgagggaaccggcagactgttcttcgagttttacagactgctgcacgacgcccggcctaaggaaggcgacgaccggcccttcttttggctgttcgagaatgtggtggccatgggagtcagcgacaagcgggatattagccggttcctggagagcaaccccgtgatgatcgatgccaaggaagtgagcgccgcccaccgggccagatacttctggggcaatctgcctggcatgaacagacccctggccagcaccgtgaacgacaagctggagctgcaggagtgcctggagcacggccggatcgccaagttcagcaaggtgagaaccatcaccacccgaagcaacagcatcaaacaaggcaaggaccagcactttcctgtgttcatgaacgagaaggaggacatcctgtggtgtaccgagatggagagagtgttcgggttcccagtccactacacagatgtcagcaacatgtctagactggccagacagagactgctgggaagaagctggtccgtccctgtgatcagacacctgttcgcccctctgaaggagtacttcgcctgcgtgagcagcggcaacagcaacgccaacagccggggccccagcttctctagcggcctggtgccactgtccctgagagggagccacatgggccccatggagatctacaaaaccgtgagcgcctggaagcggcagcctgtgcgcgtgctgagcctgtttcggaatatcgataaagtcctgaaaagcctgggattcctggagagcggctctggctccggcggtggcaccctgaagtacgtggaggatgtgacaaacgtggtcagacgggatgtggagaagtggggccccttcgatctggtgtacggcagcacccaacccctgggcagctcttgtgaccggtgccctggctggtacatgtttcagttccaccggatcctgcagtacgccctgccgagacaggagtcccagcggccattcttttggattttcatggacaacttgctgctgaccgaggatgaccaggaaactaccactcggttcctgcagaccgaagccgtgaccctgcaggacgtgagaggccgggactaccagaacgccatgcgggtgtggtccaacatccctggactgaaaagcaagcacgcacctctgacccctaaagaagaggagtacctgcaggcccaggtgcggagcagaagcaagctggacgcccctaaggtggatctgctggtgaagaattgcctcctgcccctgagagagtacttcaagtatttcagccagaatagtctgcccctgggcggcccaagcagcggcgcccctcctcccagcggcggcagcccagccggctccccaacctctaccgaggagggcacctctgagtccgccacccccgagagcggccctggcacctccaccgagcccagcgagggcagcgcacccggcagccctgccggcagccccacctccacagaggagggaaccagcaccgagcccagcgaaggcagcgccccaggcaccagcaccgagcctagtgagggcggctctggcggcggcagcgcccaggagattaaacggatcaacaagatcagaagaagacttgtgaaagacagcaacaccaagaaggccggcaagacaggccccatgaaaaccctgctggttagagtgatgacacccgatctgagagagcggctggaaaacctgagaaagaagcctgaaaatatcccccagcccatcagcaatacatctagagccaacctgaataagctgctgaccgattacaccgaaatgaagaaggcgatcctgcatgtgtactgggaagagttccagaaggaccctgtgggcctgatgagccgggtggcccagcctgccagcaagaagatcgatcagaacaagctgaaacctgagatggacgagaagggcaacctgaccaccgccggctttgcctgctctcagtgtggccagcccctgttcgtgtacaagctggagcaggtgtctgagaagggcaaggcttacaccaactacttcggacggtgcaatgtggccgagcacgaaaagctgatcctgctggcccagctgaagcccgagaaggatagcgacgaagccgtgacatatagcctgggaaagtttgggcagagggccctggatttctacagcattcatgtgaccaaggagtccacccaccccgtgaagcccctggcccagatcgccggaaacagatacgcctccggacctgtgggaaaggccctgagcgacgcatgtatgggcacaatcgcctccttcctgtctaagtaccaggacatcatcatcgaacaccagaaggtggtgaagggcaaccagaagagactggagagcctgcgggagctggccggcaaggaaaacctggaataccctagcgtgaccctgccacctcagcctcacaccaaggagggcgttgatgcctacaacgaagtgatcgcccgggtgcgaatgtgggtgaacctgaacctgtggcagaagctgaagctaagcagagatgatgccaagcctctgctgagactgaagggattcccttcctttcctctggtcgagagacaggccaacgaagtggactggtgggacatggtgtgtaacgtgaagaagctgatcaacgagaaaaaggaggatggcaaggtgttttggcagaatctggctggctacaagagacaggaagccctgagaccatacctgagcagcgaggaagatcggaagaagggaaagaaattcgctcggtaccagctgggcgacctgctgctgcacctggaaaagaagcacggcgaggactggggaaaggtgtacgacgaggcctgggagcggattgacaagaaagtggaaggcctgagcaagcacatcaagctggaagaggaacggagaagcgaggacgcccagagcaaggccgccctgaccgactggctgcgggctaaggccagcttcgtgatcgagggcctgaaggaggccgacaaggacgagttctgcagatgcgagctgaagctgcagaagtggtacggggacctgcggggaaagcccttcgccatcgaagccgagaacagcatcctggacatcagcggcttcagcaagcagtacaactgtgccttcatctggcagaaggacggcgtgaagaagctgaacctgtacctgatcatcaactacttcaagggcggcaagctgcggttcaagaagatcaaacctgaagccttcgaagccaacagattctacaccgtgatcaacaaaaagagcggcgagatcgtgcccatggaggtgaacttcaacttcgacgaccccaacctgatcatcctgcctctggcctttggcaagagacagggcagagaattcatctggaacgacctgctgtccctggaaaccggcagcctgaagctggccaacggaagagtgatcgagaagacactgtacaacagaagaacccggcaggatgagcctgccctgttcgtggccctgaccttcgagcggcgggaggtcctggactcctccaatatcaaaccaatgaacctgatcggcgtggcaagaggcgaaaacatccccgccgtgatcgccctgaccgaccccgagggctgcccactgagccggtttaaggatagcctgggaaacccaacccacatcctgagaatcggcgagagctataaggagaagcagcggaccatccaggccaagaaggaggtggagcagcggagagccggcggctacagccggaagtacgccagcaaagccaagaatctggcagacgatatggtgagaaacaccgctagagatctgctgtactacgccgtgacccaggatgccatgctgatcttcgccaacctgagccggggcttcggccggcagggcaagcggaccttcatggccgagagacagtacacacggatggaggactggctgaccgccaagctggcctacgagggcctgagcaagacctacctgtccaagacactggcccagtacacctccaagacatgcagcaactgtgggtttaccatcaccagcgccgactacgacagggtgctggagaagctgaagaagacagcaacaggctggatgaccacaattaacggcaaggagctgaaggtggagggccagattacctactacaacagatacaagagacagaacgtagtcaaggacctgtccgtcgagctggatagactgagcgaagaatctgtgaacaacgacatctcctcctggacaaagggcagaagcggagaagctctgagcctcctgaagaaaagattctcccatagacccgtgcaggagaagttcgtgtgcctgaactgcggcttcgagacacacgcagccgagcaagccgccctgaacatcgccagatcctggctgttcctgcggagccaggagtacaagaaataccagacaaacaagacaaccggcaacaccgataagagagccttcgtcgagacctggcagtccttttaccggaagaagcttaaggaggtgtggaaacctgccgtgcggtctggcggatctggcggaggctccacaagcagcaagggcagcctgatgttcagggacgtgagcatcgacttcagccaggaggagtgggagtgcctggacagcggccagatgaacctgtacaaggaggtgatgctggagaacttcagcaacctggtgagcgtgggcctgagcagcagcaagcccgccgtgatcagcctgctggagcagggcaaggagccctggatggtggacagggagctgaccaggggcctgtgcagcgacctggagagcatgaccagccccaagaaaaagagaaaagtctaagctgccttctgcggggcttgccttctggccatgcccttcttctctcccttgcacctgtacctcttggtctttgaataaagcctgagtaggaaggctagcaaaaaaaaaaaaaaaaaaaaaaaaaaaaaaaaaaaaaaaaaaaaaaaaaaaaaaaaaaaaaaaaaaaaaaaaaaaaaaaa

SEQ ID NO: 7077 - RNA, 5797 nt, synthetic construct
  source 1..5797: mol_type = other RNA
aggaaataagagagaaaagaagagtaagaagaaatataagagccaccatggcccctaagaagaagcgtaaagtgagccggatggaacgcctcgtctacgaggtgcggcagaagtgcagaaacatcgaggacatctgcatctcctgcggatctctgaacgtgaccctggagcacccactgttcatcggcggcatgtgccagaactgtaaaaactgttttctggagtgtgcctatcaatacgacgatgacggctaccagagctactgcaccatctgttgcggcggaagagaggtgctgatgtgtggaaataacaactgctgccggtgcttctgcgtggaatgcgtggacctgctggtgggccccggcgccgcccaggccgctattaaggaagatccttggaactgctacatgtgcggccacaagggcacatacggcctgctgagacggagagaggactggcctagcagactgcagatgttcttcgccaataaccacgaccaggagttcgacccccctaaggtgtaccctcccgtccccgccgagaagagaaagcccatccgggtcctgagcctgttcgatggcatcgccaccggtctgctggtgctgaaggacctgggcatccaggtggataggtacattgcctccgaggtgtgcgaggactccatcaccgtgggaatggtgcgtcatcagggcaagatcatgtacgtgggcgacgtgcggagcgtgacacagaagcatatccaggagtggggccctttcgacctggtgatcggcggcagcccttgcaatgacctgagcatcgtgaacccagcccggaagggcctgtacgagggaaccggcagactgttcttcgagttttacagactgctgcacgacgcccggcctaaggaaggcgacgaccggcccttcttttggctgttcgagaatgtggtggccatgggagtcagcgacaagcgggatattagccggttcctggagagcaaccccgtgatgatcgatgccaaggaagtgagcgccgcccaccgggccagatacttctggggcaatctgcctggcatgaacagacccctggccagcaccgtgaacgacaagctggagctgcaggagtgcctggagcacggccggatcgccaagttcagcaaggtgagaaccatcaccacccgaagcaacagcatcaaacaaggcaaggaccagcactttcctgtgttcatgaacgagaaggaggacatcctgtggtgtaccgagatggagagagtgttcgggttcccagtccactacacagatgtcagcaacatgtctagactggccagacagagactgctgggaagaagctggtccgtccctgtgatcagacacctgttcgcccctctgaaggagtacttcgcctgcgtgagcagcggcaacagcaacgccaacagccggggccccagcttctctagcggcctggtgccactgtccctgagagggagccacatgggccccatggagatctacaaaaccgtgagcgcctggaagcggcagcctgtgcgcgtgctgagcctgtttcggaatatcgataaagtcctgaaaagcctgggattcctggagagcggctctggctccggcggtggcaccctgaagtacgtggaggatgtgacaaacgtggtcagacgggatgtggagaagtggggccccttcgatctggtgtacggcagcacccaacccctgggcagctcttgtgaccggtgccctggctggtacatgtttcagttccaccggatcctgcagtacgccctgccgagacaggagtcccagcggccattcttttggattttcatggacaacttgctgctgaccgaggatgaccaggaaactaccactcggttcctgcagaccgaagccgtgaccctgcaggacgtgagaggccgggactaccagaacgccatgcgggtgtggtccaacatccctggactgaaaagcaagcacgcacctctgacccctaaagaagaggagtacctgcaggcccaggtgcggagcagaagcaagctggacgcccctaaggtggatctgctggtgaagaattgcctcctgcccctgagagagtacttcaagtatttcagccagaatagtctgcccctgggcggcccaagcagcggcgcccctcctcccagcggcggcagcccagccggctccccaacctctaccgaggagggcacctctgagtccgccacccccgagagcggccctggcacctccaccgagcccagcgagggcagcgcacccggcagccctgccggcagccccacctccacagaggagggaaccagcaccgagcccagcgaaggcagcgccccaggcaccagcaccgagcctagtgagggcggctctggcggcggcagcgcccaggagattaaacggatcaacaagatcagaagaagacttgtgaaagacagcaacaccaagaaggccggcaagacaggccccatgaaaaccctgctggttagagtgatgacacccgatctgagagagcggctggaaaacctgagaaagaagcctgaaaatatcccccagcccatcagcaatacatctagagccaacctgaataagctgctgaccgattacaccgaaatgaagaaggcgatcctgcatgtgtactgggaagagttccagaaggaccctgtgggcctgatgagccgggtggcccagcctgccagcaagaagatcgatcagaacaagctgaaacctgagatggacgagaagggcaacctgaccaccgccggctttgcctgctctcagtgtggccagcccctgttcgtgtacaagctggagcaggtgtctgagaagggcaaggcttacaccaactacttcggacggtgcaatgtggccgagcacgaaaagctgatcctgctggcccagctgaagcccgagaaggatagcgacgaagccgtgacatatagcctgggaaagtttgggcagagggccctggatttctacagcattcatgtgaccaaggagtccacccaccccgtgaagcccctggcccagatcgccggaaacagatacgcctccggacctgtgggaaaggccctgagcgacgcatgtatgggcacaatcgcctccttcctgtctaagtaccaggacatcatcatcgaacaccagaaggtggtgaagggcaaccagaagagactggagagcctgcgggagctggccggcaaggaaaacctggaataccctagcgtgaccctgccacctcagcctcacaccaaggagggcgttgatgcctacaacgaagtgatcgcccgggtgcgaatgtgggtgaacctgaacctgtggcagaagctgaagctaagcagagatgatgccaagcctctgctgagactgaagggattcccttcctttcctctggtcgagagacaggccaacgaagtggactggtgggacatggtgtgtaacgtgaagaagctgatcaacgagaaaaaggaggatggcaaggtgttttggcagaatctggctggctacaagagacaggaagccctgagaccatacctgagcagcgaggaagatcggaagaagggaaagaaattcgctcggtaccagctgggcgacctgctgctgcacctggaaaagaagcacggcgaggactggggaaaggtgtacgacgaggcctgggagcggattgacaagaaagtggaaggcctgagcaagcacatcaagctggaagaggaacggagaagcgaggacgcccagagcaaggccgccctgaccgactggctgcgggctaaggccagcttcgtgatcgagggcctgaaggaggccgacaaggacgagttctgcagatgcgagctgaagctgcagaagtggtacggggacctgcggggaaagcccttcgccatcgaagccgagaacagcatcctggacatcagcggcttcagcaagcagtacaactgtgccttcatctggcagaaggacggcgtgaagaagctgaacctgtacctgatcatcaactacttcaagggcggcaagctgcggttcaagaagatcaaacctgaagccttcgaagccaacagattctacaccgtgatcaacaaaaagagcggcgagatcgtgcccatggaggtgaacttcaacttcgacgaccccaacctgatcatcctgcctctggcctttggcaagagacagggcagagaattcatctggaacgacctgctgtccctggaaaccggcagcctgaagctggccaacggaagagtgatcgagaagacactgtacaacagaagaacccggcaggatgagcctgccctgttcgtggccctgaccttcgagcggcgggaggtcctggactcctccaatatcaaaccaatgaacctgatcggcgtggcaagaggcgaaaacatccccgccgtgatcgccctgaccgaccccgagggctgcccactgagccggtttaaggatagcctgggaaacccaacccacatcctgagaatcggcgagagctataaggagaagcagcggaccatccaggccaagaaggaggtggagcagcggagagccggcggctacagccggaagtacgccagcaaagccaagaatctggcagacgatatggtgagaaacaccgctagagatctgctgtactacgccgtgacccaggatgccatgctgatcttcgccaacctgagccggggcttcggccggcagggcaagcggaccttcatggccgagagacagtacacacggatggaggactggctgaccgccaagctggcctacgagggcctgagcaagacctacctgtccaagacactggcccagtacacctccaagacatgcagcaactgtgggtttaccatcaccagcgccgactacgacagggtgctggagaagctgaagaagacagcaacaggctggatgaccacaattaacggcaaggagctgaaggtggagggccagattacctactacaacagatacaagagacagaacgtagtcaaggacctgtccgtcgagctggatagactgagcgaagaatctgtgaacaacgacatctcctcctggacaaagggcagaagcggagaagctctgagcctcctgaagaaaagattctcccatagacccgtgcaggagaagttcgtgtgcctgaactgcggcttcgagacacacgcagccgagcaagccgccctgaacatcgccagatcctggctgttcctgcggagccaggagtacaagaaataccagacaaacaagacaaccggcaacaccgataagagagccttcgtcgagacctggcagtccttttaccggaagaagcttaaggaggtgtggaaacctgccgtgcggtctggcggatctggcggaggctccacaagccagatgagggtgaccttcgaggacatcagcgtgagcttcagccaggaggagtggggctacctgaacgaggagcagaaggagctgtacagggaggtgatgaaggagaactaccagaccctgatcagcctggccaccgacagccccatcatcgaccccgacatcatcagcaggatcgagaggggcgaggagccctacgtgagggacgagcccgccagcgaggagagggagaccggcaggagcaacaccagccccaagaaaaagagaaaagtctaagctgccttctgcggggcttgccttctggccatgcccttcttctctcccttgcacctgtacctcttggtctttgaataaagcctgagtaggaaggctagcaaaaaaaaaaaaaaaaaaaaaaaaaaaaaaaaaaaaaaaaaaaaaaaaaaaaaaaaaaaaaaaaaaaaaaaaaaaaaaaa

SEQ ID NO: 7078 - RNA, 5797 nt, synthetic construct
  source 1..5797: mol_type = other RNA
aggaaataagagagaaaagaagagtaagaagaaatataagagccaccatggcccctaagaagaagcgtaaagtgagccggatggaacgcctcgtctacgaggtgcggcagaagtgcagaaacatcgaggacatctgcatctcctgcggatctctgaacgtgaccctggagcacccactgttcatcggcggcatgtgccagaactgtaaaaactgttttctggagtgtgcctatcaatacgacgatgacggctaccagagctactgcaccatctgttgcggcggaagagaggtgctgatgtgtggaaataacaactgctgccggtgcttctgcgtggaatgcgtggacctgctggtgggccccggcgccgcccaggccgctattaaggaagatccttggaactgctacatgtgcggccacaagggcacatacggcctgctgagacggagagaggactggcctagcagactgcagatgttcttcgccaataaccacgaccaggagttcgacccccctaaggtgtaccctcccgtccccgccgagaagagaaagcccatccgggtcctgagcctgttcgatggcatcgccaccggtctgctggtgctgaaggacctgggcatccaggtggataggtacattgcctccgaggtgtgcgaggactccatcaccgtgggaatggtgcgtcatcagggcaagatcatgtacgtgggcgacgtgcggagcgtgacacagaagcatatccaggagtggggccctttcgacctggtgatcggcggcagcccttgcaatgacctgagcatcgtgaacccagcccggaagggcctgtacgagggaaccggcagactgttcttcgagttttacagactgctgcacgacgcccggcctaaggaaggcgacgaccggcccttcttttggctgttcgagaatgtggtggccatgggagtcagcgacaagcgggatattagccggttcctggagagcaaccccgtgatgatcgatgccaaggaagtgagcgccgcccaccgggccagatacttctggggcaatctgcctggcatgaacagacccctggccagcaccgtgaacgacaagctggagctgcaggagtgcctggagcacggccggatcgccaagttcagcaaggtgagaaccatcaccacccgaagcaacagcatcaaacaaggcaaggaccagcactttcctgtgttcatgaacgagaaggaggacatcctgtggtgtaccgagatggagagagtgttcgggttcccagtccactacacagatgtcagcaacatgtctagactggccagacagagactgctgggaagaagctggtccgtccctgtgatcagacacctgttcgcccctctgaaggagtacttcgcctgcgtgagcagcggcaacagcaacgccaacagccggggccccagcttctctagcggcctggtgccactgtccctgagagggagccacatgggccccatggagatctacaaaaccgtgagcgcctggaagcggcagcctgtgcgcgtgctgagcctgtttcggaatatcgataaagtcctgaaaagcctgggattcctggagagcggctctggctccggcggtggcaccctgaagtacgtggaggatgtgacaaacgtggtcagacgggatgtggagaagtggggccccttcgatctggtgtacggcagcacccaacccctgggcagctcttgtgaccggtgccctggctggtacatgtttcagttccaccggatcctgcagtacgccctgccgagacaggagtcccagcggccattcttttggattttcatggacaacttgctgctgaccgaggatgaccaggaaactaccactcggttcctgcagaccgaagccgtgaccctgcaggacgtgagaggccgggactaccagaacgccatgcgggtgtggtccaacatccctggactgaaaagcaagcacgcacctctgacccctaaagaagaggagtacctgcaggcccaggtgcggagcagaagcaagctggacgcccctaaggtggatctgctggtgaagaattgcctcctgcccctgagagagtacttcaagtatttcagccagaatagtctgcccctgggcggcccaagcagcggcgcccctcctcccagcggcggcagcccagccggctccccaacctctaccgaggagggcacctctgagtccgccacccccgagagcggccctggcacctccaccgagcccagcgagggcagcgcacccggcagccctgccggcagccccacctccacagaggagggaaccagcaccgagcccagcgaaggcagcgccccaggcaccagcaccgagcctagtgagggcggctctggcggcggcagcgcccaggagattaaacggatcaacaagatcagaagaagacttgtgaaagacagcaacaccaagaaggccggcaagacaggccccatgaaaaccctgctggttagagtgatgacacccgatctgagagagcggctggaaaacctgagaaagaagcctgaaaatatcccccagcccatcagcaatacatctagagccaacctgaataagctgctgaccgattacaccgaaatgaagaaggcgatcctgcatgtgtactgggaagagttccagaaggaccctgtgggcctgatgagccgggtggcccagcctgccagcaagaagatcgatcagaacaagctgaaacctgagatggacgagaagggcaacctgaccaccgccggctttgcctgctctcagtgtggccagcccctgttcgtgtacaagctggagcaggtgtctgagaagggcaaggcttacaccaactacttcggacggtgcaatgtggccgagcacgaaaagctgatcctgctggcccagctgaagcccgagaaggatagcgacgaagccgtgacatatagcctgggaaagtttgggcagagggccctggatttctacagcattcatgtgaccaaggagtccacccaccccgtgaagcccctggcccagatcgccggaaacagatacgcctccggacctgtgggaaaggccctgagcgacgcatgtatgggcacaatcgcctccttcctgtctaagtaccaggacatcatcatcgaacaccagaaggtggtgaagggcaaccagaagagactggagagcctgcgggagctggccggcaaggaaaacctggaataccctagcgtgaccctgccacctcagcctcacaccaaggagggcgttgatgcctacaacgaagtgatcgcccgggtgcgaatgtgggtgaacctgaacctgtggcagaagctgaagctaagcagagatgatgccaagcctctgctgagactgaagggattcccttcctttcctctggtcgagagacaggccaacgaagtggactggtgggacatggtgtgtaacgtgaagaagctgatcaacgagaaaaaggaggatggcaaggtgttttggcagaatctggctggctacaagagacaggaagccctgagaccatacctgagcagcgaggaagatcggaagaagggaaagaaattcgctcggtaccagctgggcgacctgctgctgcacctggaaaagaagcacggcgaggactggggaaaggtgtacgacgaggcctgggagcggattgacaagaaagtggaaggcctgagcaagcacatcaagctggaagaggaacggagaagcgaggacgcccagagcaaggccgccctgaccgactggctgcgggctaaggccagcttcgtgatcgagggcctgaaggaggccgacaaggacgagttctgcagatgcgagctgaagctgcagaagtggtacggggacctgcggggaaagcccttcgccatcgaagccgagaacagcatcctggacatcagcggcttcagcaagcagtacaactgtgccttcatctggcagaaggacggcgtgaagaagctgaacctgtacctgatcatcaactacttcaagggcggcaagctgcggttcaagaagatcaaacctgaagccttcgaagccaacagattctacaccgtgatcaacaaaaagagcggcgagatcgtgcccatggaggtgaacttcaacttcgacgaccccaacctgatcatcctgcctctggcctttggcaagagacagggcagagaattcatctggaacgacctgctgtccctggaaaccggcagcctgaagctggccaacggaagagtgatcgagaagacactgtacaacagaagaacccggcaggatgagcctgccctgttcgtggccctgaccttcgagcggcgggaggtcctggactcctccaatatcaaaccaatgaacctgatcggcgtggcaagaggcgaaaacatccccgccgtgatcgccctgaccgaccccgagggctgcccactgagccggtttaaggatagcctgggaaacccaacccacatcctgagaatcggcgagagctataaggagaagcagcggaccatccaggccaagaaggaggtggagcagcggagagccggcggctacagccggaagtacgccagcaaagccaagaatctggcagacgatatggtgagaaacaccgctagagatctgctgtactacgccgtgacccaggatgccatgctgatcttcgccaacctgagccggggcttcggccggcagggcaagcggaccttcatggccgagagacagtacacacggatggaggactggctgaccgccaagctggcctacgagggcctgagcaagacctacctgtccaagacactggcccagtacacctccaagacatgcagcaactgtgggtttaccatcaccagcgccgactacgacagggtgctggagaagctgaagaagacagcaacaggctggatgaccacaattaacggcaaggagctgaaggtggagggccagattacctactacaacagatacaagagacagaacgtagtcaaggacctgtccgtcgagctggatagactgagcgaagaatctgtgaacaacgacatctcctcctggacaaagggcagaagcggagaagctctgagcctcctgaagaaaagattctcccatagacccgtgcaggagaagttcgtgtgcctgaactgcggcttcgagacacacgcagccgagcaagccgccctgaacatcgccagatcctggctgttcctgcggagccaggagtacaagaaataccagacaaacaagacaaccggcaacaccgataagagagccttcgtcgagacctggcagtccttttaccggaagaagcttaaggaggtgtggaaacctgccgtgcggtctggcggatctggcggaggctccacaagcctggtgttcgaggacgtggccatcaacttcacccccgaggagtgggccctgctggaccccgcccagaggaggctgtacagggacgtgatgctggagaccttcaagaacctggccttcgtgggcagctgcctgcacgtgaagaccagcggcagcagcgcccagagggacatcctggagaacgtgctgtgcagcgaggagaagatcgtgaggttcaagaggaacgacagcaagagcgtgctgggcaccagccccaagaaaaagagaaaagtctaagctgccttctgcggggcttgccttctggccatgcccttcttctctcccttgcacctgtacctcttggtctttgaataaagcctgagtaggaaggctagcaaaaaaaaaaaaaaaaaaaaaaaaaaaaaaaaaaaaaaaaaaaaaaaaaaaaaaaaaaaaaaaaaaaaaaaaaaaaaaaa

SEQ ID NO: 7079 - RNA, 5797 nt, synthetic construct
  source 1..5797: mol_type = other RNA
aggaaataagagagaaaagaagagtaagaagaaatataagagccaccatggcccctaagaagaagcgtaaagtgagccggatggaacgcctcgtctacgaggtgcggcagaagtgcagaaacatcgaggacatctgcatctcctgcggatctctgaacgtgaccctggagcacccactgttcatcggcggcatgtgccagaactgtaaaaactgttttctggagtgtgcctatcaatacgacgatgacggctaccagagctactgcaccatctgttgcggcggaagagaggtgctgatgtgtggaaataacaactgctgccggtgcttctgcgtggaatgcgtggacctgctggtgggccccggcgccgcccaggccgctattaaggaagatccttggaactgctacatgtgcggccacaagggcacatacggcctgctgagacggagagaggactggcctagcagactgcagatgttcttcgccaataaccacgaccaggagttcgacccccctaaggtgtaccctcccgtccccgccgagaagagaaagcccatccgggtcctgagcctgttcgatggcatcgccaccggtctgctggtgctgaaggacctgggcatccaggtggataggtacattgcctccgaggtgtgcgaggactccatcaccgtgggaatggtgcgtcatcagggcaagatcatgtacgtgggcgacgtgcggagcgtgacacagaagcatatccaggagtggggccctttcgacctggtgatcggcggcagcccttgcaatgacctgagcatcgtgaacccagcccggaagggcctgtacgagggaaccggcagactgttcttcgagttttacagactgctgcacgacgcccggcctaaggaaggcgacgaccggcccttcttttggctgttcgagaatgtggtggccatgggagtcagcgacaagcgggatattagccggttcctggagagcaaccccgtgatgatcgatgccaaggaagtgagcgccgcccaccgggccagatacttctggggcaatctgcctggcatgaacagacccctggccagcaccgtgaacgacaagctggagctgcaggagtgcctggagcacggccggatcgccaagttcagcaaggtgagaaccatcaccacccgaagcaacagcatcaaacaaggcaaggaccagcactttcctgtgttcatgaacgagaaggaggacatcctgtggtgtaccgagatggagagagtgttcgggttcccagtccactacacagatgtcagcaacatgtctagactggccagacagagactgctgggaagaagctggtccgtccctgtgatcagacacctgttcgcccctctgaaggagtacttcgcctgcgtgagcagcggcaacagcaacgccaacagccggggccccagcttctctagcggcctggtgccactgtccctgagagggagccacatgggccccatggagatctacaaaaccgtgagcgcctggaagcggcagcctgtgcgcgtgctgagcctgtttcggaatatcgataaagtcctgaaaagcctgggattcctggagagcggctctggctccggcggtggcaccctgaagtacgtggaggatgtgacaaacgtggtcagacgggatgtggagaagtggggccccttcgatctggtgtacggcagcacccaacccctgggcagctcttgtgaccggtgccctggctggtacatgtttcagttccaccggatcctgcagtacgccctgccgagacaggagtcccagcggccattcttttggattttcatggacaacttgctgctgaccgaggatgaccaggaaactaccactcggttcctgcagaccgaagccgtgaccctgcaggacgtgagaggccgggactaccagaacgccatgcgggtgtggtccaacatccctggactgaaaagcaagcacgcacctctgacccctaaagaagaggagtacctgcaggcccaggtgcggagcagaagcaagctggacgcccctaaggtggatctgctggtgaagaattgcctcctgcccctgagagagtacttcaagtatttcagccagaatagtctgcccctgggcggcccaagcagcggcgcccctcctcccagcggcggcagcccagccggctccccaacctctaccgaggagggcacctctgagtccgccacccccgagagcggccctggcacctccaccgagcccagcgagggcagcgcacccggcagccctgccggcagccccacctccacagaggagggaaccagcaccgagcccagcgaaggcagcgccccaggcaccagcaccgagcctagtgagggcggctctggcggcggcagcgcccaggagattaaacggatcaacaagatcagaagaagacttgtgaaagacagcaacaccaagaaggccggcaagacaggccccatgaaaaccctgctggttagagtgatgacacccgatctgagagagcggctggaaaacctgagaaagaagcctgaaaatatcccccagcccatcagcaatacatctagagccaacctgaataagctgctgaccgattacaccgaaatgaagaaggcgatcctgcatgtgtactgggaagagttccagaaggaccctgtgggcctgatgagccgggtggcccagcctgccagcaagaagatcgatcagaacaagctgaaacctgagatggacgagaagggcaacctgaccaccgccggctttgcctgctctcagtgtggccagcccctgttcgtgtacaagctggagcaggtgtctgagaagggcaaggcttacaccaactacttcggacggtgcaatgtggccgagcacgaaaagctgatcctgctggcccagctgaagcccgagaaggatagcgacgaagccgtgacatatagcctgggaaagtttgggcagagggccctggatttctacagcattcatgtgaccaaggagtccacccaccccgtgaagcccctggcccagatcgccggaaacagatacgcctccggacctgtgggaaaggccctgagcgacgcatgtatgggcacaatcgcctccttcctgtctaagtaccaggacatcatcatcgaacaccagaaggtggtgaagggcaaccagaagagactggagagcctgcgggagctggccggcaaggaaaacctggaataccctagcgtgaccctgccacctcagcctcacaccaaggagggcgttgatgcctacaacgaagtgatcgcccgggtgcgaatgtgggtgaacctgaacctgtggcagaagctgaagctaagcagagatgatgccaagcctctgctgagactgaagggattcccttcctttcctctggtcgagagacaggccaacgaagtggactggtgggacatggtgtgtaacgtgaagaagctgatcaacgagaaaaaggaggatggcaaggtgttttggcagaatctggctggctacaagagacaggaagccctgagaccatacctgagcagcgaggaagatcggaagaagggaaagaaattcgctcggtaccagctgggcgacctgctgctgcacctggaaaagaagcacggcgaggactggggaaaggtgtacgacgaggcctgggagcggattgacaagaaagtggaaggcctgagcaagcacatcaagctggaagaggaacggagaagcgaggacgcccagagcaaggccgccctgaccgactggctgcgggctaaggccagcttcgtgatcgagggcctgaaggaggccgacaaggacgagttctgcagatgcgagctgaagctgcagaagtggtacggggacctgcggggaaagcccttcgccatcgaagccgagaacagcatcctggacatcagcggcttcagcaagcagtacaactgtgccttcatctggcagaaggacggcgtgaagaagctgaacctgtacctgatcatcaactacttcaagggcggcaagctgcggttcaagaagatcaaacctgaagccttcgaagccaacagattctacaccgtgatcaacaaaaagagcggcgagatcgtgcccatggaggtgaacttcaacttcgacgaccccaacctgatcatcctgcctctggcctttggcaagagacagggcagagaattcatctggaacgacctgctgtccctggaaaccggcagcctgaagctggccaacggaagagtgatcgagaagacactgtacaacagaagaacccggcaggatgagcctgccctgttcgtggccctgaccttcgagcggcgggaggtcctggactcctccaatatcaaaccaatgaacctgatcggcgtggcaagaggcgaaaacatccccgccgtgatcgccctgaccgaccccgagggctgcccactgagccggtttaaggatagcctgggaaacccaacccacatcctgagaatcggcgagagctataaggagaagcagcggaccatccaggccaagaaggaggtggagcagcggagagccggcggctacagccggaagtacgccagcaaagccaagaatctggcagacgatatggtgagaaacaccgctagagatctgctgtactacgccgtgacccaggatgccatgctgatcttcgccaacctgagccggggcttcggccggcagggcaagcggaccttcatggccgagagacagtacacacggatggaggactggctgaccgccaagctggcctacgagggcctgagcaagacctacctgtccaagacactggcccagtacacctccaagacatgcagcaactgtgggtttaccatcaccagcgccgactacgacagggtgctggagaagctgaagaagacagcaacaggctggatgaccacaattaacggcaaggagctgaaggtggagggccagattacctactacaacagatacaagagacagaacgtagtcaaggacctgtccgtcgagctggatagactgagcgaagaatctgtgaacaacgacatctcctcctggacaaagggcagaagcggagaagctctgagcctcctgaagaaaagattctcccatagacccgtgcaggagaagttcgtgtgcctgaactgcggcttcgagacacacgcagccgagcaagccgccctgaacatcgccagatcctggctgttcctgcggagccaggagtacaagaaataccagacaaacaagacaaccggcaacaccgataagagagccttcgtcgagacctggcagtccttttaccggaagaagcttaaggaggtgtggaaacctgccgtgcggtctggcggatctggcggaggctccacaagcggcccctggaccctgctgaccttcagggacgtggccatcgagttcagccaggaggagtggggctgcctgaaccacagccagagggagctgtacagggacgtgatgctggagacctacggccacctgctgttcctgggcctggtgagcaagcccgacctggtgatcctgctggagcagaagaaggagctgtggggcgtgaagaggaaggagaccgtggccagccaccccggcaggtgggagatcaccagccccaagaaaaagagaaaagtctaagctgccttctgcggggcttgccttctggccatgcccttcttctctcccttgcacctgtacctcttggtctttgaataaagcctgagtaggaaggctagcaaaaaaaaaaaaaaaaaaaaaaaaaaaaaaaaaaaaaaaaaaaaaaaaaaaaaaaaaaaaaaaaaaaaaaaaaaaaaaaa

SEQ ID NO: 7080 - RNA, 5797 nt, synthetic construct
  source 1..5797: mol_type = other RNA
aggaaataagagagaaaagaagagtaagaagaaatataagagccaccatggcccctaagaagaagcgtaaagtgagccggatggaacgcctcgtctacgaggtgcggcagaagtgcagaaacatcgaggacatctgcatctcctgcggatctctgaacgtgaccctggagcacccactgttcatcggcggcatgtgccagaactgtaaaaactgttttctggagtgtgcctatcaatacgacgatgacggctaccagagctactgcaccatctgttgcggcggaagagaggtgctgatgtgtggaaataacaactgctgccggtgcttctgcgtggaatgcgtggacctgctggtgggccccggcgccgcccaggccgctattaaggaagatccttggaactgctacatgtgcggccacaagggcacatacggcctgctgagacggagagaggactggcctagcagactgcagatgttcttcgccaataaccacgaccaggagttcgacccccctaaggtgtaccctcccgtccccgccgagaagagaaagcccatccgggtcctgagcctgttcgatggcatcgccaccggtctgctggtgctgaaggacctgggcatccaggtggataggtacattgcctccgaggtgtgcgaggactccatcaccgtgggaatggtgcgtcatcagggcaagatcatgtacgtgggcgacgtgcggagcgtgacacagaagcatatccaggagtggggccctttcgacctggtgatcggcggcagcccttgcaatgacctgagcatcgtgaacccagcccggaagggcctgtacgagggaaccggcagactgttcttcgagttttacagactgctgcacgacgcccggcctaaggaaggcgacgaccggcccttcttttggctgttcgagaatgtggtggccatgggagtcagcgacaagcgggatattagccggttcctggagagcaaccccgtgatgatcgatgccaaggaagtgagcgccgcccaccgggccagatacttctggggcaatctgcctggcatgaacagacccctggccagcaccgtgaacgacaagctggagctgcaggagtgcctggagcacggccggatcgccaagttcagcaaggtgagaaccatcaccacccgaagcaacagcatcaaacaaggcaaggaccagcactttcctgtgttcatgaacgagaaggaggacatcctgtggtgtaccgagatggagagagtgttcgggttcccagtccactacacagatgtcagcaacatgtctagactggccagacagagactgctgggaagaagctggtccgtccctgtgatcagacacctgttcgcccctctgaaggagtacttcgcctgcgtgagcagcggcaacagcaacgccaacagccggggccccagcttctctagcggcctggtgccactgtccctgagagggagccacatgggccccatggagatctacaaaaccgtgagcgcctggaagcggcagcctgtgcgcgtgctgagcctgtttcggaatatcgataaagtcctgaaaagcctgggattcctggagagcggctctggctccggcggtggcaccctgaagtacgtggaggatgtgacaaacgtggtcagacgggatgtggagaagtggggccccttcgatctggtgtacggcagcacccaacccctgggcagctcttgtgaccggtgccctggctggtacatgtttcagttccaccggatcctgcagtacgccctgccgagacaggagtcccagcggccattcttttggattttcatggacaacttgctgctgaccgaggatgaccaggaaactaccactcggttcctgcagaccgaagccgtgaccctgcaggacgtgagaggccgggactaccagaacgccatgcgggtgtggtccaacatccctggactgaaaagcaagcacgcacctctgacccctaaagaagaggagtacctgcaggcccaggtgcggagcagaagcaagctggacgcccctaaggtggatctgctggtgaagaattgcctcctgcccctgagagagtacttcaagtatttcagccagaatagtctgcccctgggcggcccaagcagcggcgcccctcctcccagcggcggcagcccagccggctccccaacctctaccgaggagggcacctctgagtccgccacccccgagagcggccctggcacctccaccgagcccagcgagggcagcgcacccggcagccctgccggcagccccacctccacagaggagggaaccagcaccgagcccagcgaaggcagcgccccaggcaccagcaccgagcctagtgagggcggctctggcggcggcagcgcccaggagattaaacggatcaacaagatcagaagaagacttgtgaaagacagcaacaccaagaaggccggcaagacaggccccatgaaaaccctgctggttagagtgatgacacccgatctgagagagcggctggaaaacctgagaaagaagcctgaaaatatcccccagcccatcagcaatacatctagagccaacctgaataagctgctgaccgattacaccgaaatgaagaaggcgatcctgcatgtgtactgggaagagttccagaaggaccctgtgggcctgatgagccgggtggcccagcctgccagcaagaagatcgatcagaacaagctgaaacctgagatggacgagaagggcaacctgaccaccgccggctttgcctgctctcagtgtggccagcccctgttcgtgtacaagctggagcaggtgtctgagaagggcaaggcttacaccaactacttcggacggtgcaatgtggccgagcacgaaaagctgatcctgctggcccagctgaagcccgagaaggatagcgacgaagccgtgacatatagcctgggaaagtttgggcagagggccctggatttctacagcattcatgtgaccaaggagtccacccaccccgtgaagcccctggcccagatcgccggaaacagatacgcctccggacctgtgggaaaggccctgagcgacgcatgtatgggcacaatcgcctccttcctgtctaagtaccaggacatcatcatcgaacaccagaaggtggtgaagggcaaccagaagagactggagagcctgcgggagctggccggcaaggaaaacctggaataccctagcgtgaccctgccacctcagcctcacaccaaggagggcgttgatgcctacaacgaagtgatcgcccgggtgcgaatgtgggtgaacctgaacctgtggcagaagctgaagctaagcagagatgatgccaagcctctgctgagactgaagggattcccttcctttcctctggtcgagagacaggccaacgaagtggactggtgggacatggtgtgtaacgtgaagaagctgatcaacgagaaaaaggaggatggcaaggtgttttggcagaatctggctggctacaagagacaggaagccctgagaccatacctgagcagcgaggaagatcggaagaagggaaagaaattcgctcggtaccagctgggcgacctgctgctgcacctggaaaagaagcacggcgaggactggggaaaggtgtacgacgaggcctgggagcggattgacaagaaagtggaaggcctgagcaagcacatcaagctggaagaggaacggagaagcgaggacgcccagagcaaggccgccctgaccgactggctgcgggctaaggccagcttcgtgatcgagggcctgaaggaggccgacaaggacgagttctgcagatgcgagctgaagctgcagaagtggtacggggacctgcggggaaagcccttcgccatcgaagccgagaacagcatcctggacatcagcggcttcagcaagcagtacaactgtgccttcatctggcagaaggacggcgtgaagaagctgaacctgtacctgatcatcaactacttcaagggcggcaagctgcggttcaagaagatcaaacctgaagccttcgaagccaacagattctacaccgtgatcaacaaaaagagcggcgagatcgtgcccatggaggtgaacttcaacttcgacgaccccaacctgatcatcctgcctctggcctttggcaagagacagggcagagaattcatctggaacgacctgctgtccctggaaaccggcagcctgaagctggccaacggaagagtgatcgagaagacactgtacaacagaagaacccggcaggatgagcctgccctgttcgtggccctgaccttcgagcggcgggaggtcctggactcctccaatatcaaaccaatgaacctgatcggcgtggcaagaggcgaaaacatccccgccgtgatcgccctgaccgaccccgagggctgcccactgagccggtttaaggatagcctgggaaacccaacccacatcctgagaatcggcgagagctataaggagaagcagcggaccatccaggccaagaaggaggtggagcagcggagagccggcggctacagccggaagtacgccagcaaagccaagaatctggcagacgatatggtgagaaacaccgctagagatctgctgtactacgccgtgacccaggatgccatgctgatcttcgccaacctgagccggggcttcggccggcagggcaagcggaccttcatggccgagagacagtacacacggatggaggactggctgaccgccaagctggcctacgagggcctgagcaagacctacctgtccaagacactggcccagtacacctccaagacatgcagcaactgtgggtttaccatcaccagcgccgactacgacagggtgctggagaagctgaagaagacagcaacaggctggatgaccacaattaacggcaaggagctgaaggtggagggccagattacctactacaacagatacaagagacagaacgtagtcaaggacctgtccgtcgagctggatagactgagcgaagaatctgtgaacaacgacatctcctcctggacaaagggcagaagcggagaagctctgagcctcctgaagaaaagattctcccatagacccgtgcaggagaagttcgtgtgcctgaactgcggcttcgagacacacgcagccgagcaagccgccctgaacatcgccagatcctggctgttcctgcggagccaggagtacaagaaataccagacaaacaagacaaccggcaacaccgataagagagccttcgtcgagacctggcagtccttttaccggaagaagcttaaggaggtgtggaaacctgccgtgcggtctggcggatctggcggaggctccacaagcatggaggacctgctgagcttcaccgacgtggccatcgacttcagcgccgacgagtgcgagtgcctggacagcgcccagtggaacctgtacaaggaggtgatgctggagaactacagcaacctggtgttcctgggcctggccttcagcaagccccacctggtgaccttcctggagcagagcagcgacccctggagcgtgaagaggaaggccagcgccgccatcagcctgggcagcaagccccacaccagccccaagaaaaagagaaaagtctaagctgccttctgcggggcttgccttctggccatgcccttcttctctcccttgcacctgtacctcttggtctttgaataaagcctgagtaggaaggctagcaaaaaaaaaaaaaaaaaaaaaaaaaaaaaaaaaaaaaaaaaaaaaaaaaaaaaaaaaaaaaaaaaaaaaaaaaaaaaaaa

SEQ ID NO: 7081 - RNA, 5797 nt, synthetic construct
  source 1..5797: mol_type = other RNA
aggaaataagagagaaaagaagagtaagaagaaatataagagccaccatggcccctaagaagaagcgtaaagtgagccggatggaacgcctcgtctacgaggtgcggcagaagtgcagaaacatcgaggacatctgcatctcctgcggatctctgaacgtgaccctggagcacccactgttcatcggcggcatgtgccagaactgtaaaaactgttttctggagtgtgcctatcaatacgacgatgacggctaccagagctactgcaccatctgttgcggcggaagagaggtgctgatgtgtggaaataacaactgctgccggtgcttctgcgtggaatgcgtggacctgctggtgggccccggcgccgcccaggccgctattaaggaagatccttggaactgctacatgtgcggccacaagggcacatacggcctgctgagacggagagaggactggcctagcagactgcagatgttcttcgccaataaccacgaccaggagttcgacccccctaaggtgtaccctcccgtccccgccgagaagagaaagcccatccgggtcctgagcctgttcgatggcatcgccaccggtctgctggtgctgaaggacctgggcatccaggtggataggtacattgcctccgaggtgtgcgaggactccatcaccgtgggaatggtgcgtcatcagggcaagatcatgtacgtgggcgacgtgcggagcgtgacacagaagcatatccaggagtggggccctttcgacctggtgatcggcggcagcccttgcaatgacctgagcatcgtgaacccagcccggaagggcctgtacgagggaaccggcagactgttcttcgagttttacagactgctgcacgacgcccggcctaaggaaggcgacgaccggcccttcttttggctgttcgagaatgtggtggccatgggagtcagcgacaagcgggatattagccggttcctggagagcaaccccgtgatgatcgatgccaaggaagtgagcgccgcccaccgggccagatacttctggggcaatctgcctggcatgaacagacccctggccagcaccgtgaacgacaagctggagctgcaggagtgcctggagcacggccggatcgccaagttcagcaaggtgagaaccatcaccacccgaagcaacagcatcaaacaaggcaaggaccagcactttcctgtgttcatgaacgagaaggaggacatcctgtggtgtaccgagatggagagagtgttcgggttcccagtccactacacagatgtcagcaacatgtctagactggccagacagagactgctgggaagaagctggtccgtccctgtgatcagacacctgttcgcccctctgaaggagtacttcgcctgcgtgagcagcggcaacagcaacgccaacagccggggccccagcttctctagcggcctggtgccactgtccctgagagggagccacatgggccccatggagatctacaaaaccgtgagcgcctggaagcggcagcctgtgcgcgtgctgagcctgtttcggaatatcgataaagtcctgaaaagcctgggattcctggagagcggctctggctccggcggtggcaccctgaagtacgtggaggatgtgacaaacgtggtcagacgggatgtggagaagtggggccccttcgatctggtgtacggcagcacccaacccctgggcagctcttgtgaccggtgccctggctggtacatgtttcagttccaccggatcctgcagtacgccctgccgagacaggagtcccagcggccattcttttggattttcatggacaacttgctgctgaccgaggatgaccaggaaactaccactcggttcctgcagaccgaagccgtgaccctgcaggacgtgagaggccgggactaccagaacgccatgcgggtgtggtccaacatccctggactgaaaagcaagcacgcacctctgacccctaaagaagaggagtacctgcaggcccaggtgcggagcagaagcaagctggacgcccctaaggtggatctgctggtgaagaattgcctcctgcccctgagagagtacttcaagtatttcagccagaatagtctgcccctgggcggcccaagcagcggcgcccctcctcccagcggcggcagcccagccggctccccaacctctaccgaggagggcacctctgagtccgccacccccgagagcggccctggcacctccaccgagcccagcgagggcagcgcacccggcagccctgccggcagccccacctccacagaggagggaaccagcaccgagcccagcgaaggcagcgccccaggcaccagcaccgagcctagtgagggcggctctggcggcggcagcgcccaggagattaaacggatcaacaagatcagaagaagacttgtgaaagacagcaacaccaagaaggccggcaagacaggccccatgaaaaccctgctggttagagtgatgacacccgatctgagagagcggctggaaaacctgagaaagaagcctgaaaatatcccccagcccatcagcaatacatctagagccaacctgaataagctgctgaccgattacaccgaaatgaagaaggcgatcctgcatgtgtactgggaagagttccagaaggaccctgtgggcctgatgagccgggtggcccagcctgccagcaagaagatcgatcagaacaagctgaaacctgagatggacgagaagggcaacctgaccaccgccggctttgcctgctctcagtgtggccagcccctgttcgtgtacaagctggagcaggtgtctgagaagggcaaggcttacaccaactacttcggacggtgcaatgtggccgagcacgaaaagctgatcctgctggcccagctgaagcccgagaaggatagcgacgaagccgtgacatatagcctgggaaagtttgggcagagggccctggatttctacagcattcatgtgaccaaggagtccacccaccccgtgaagcccctggcccagatcgccggaaacagatacgcctccggacctgtgggaaaggccctgagcgacgcatgtatgggcacaatcgcctccttcctgtctaagtaccaggacatcatcatcgaacaccagaaggtggtgaagggcaaccagaagagactggagagcctgcgggagctggccggcaaggaaaacctggaataccctagcgtgaccctgccacctcagcctcacaccaaggagggcgttgatgcctacaacgaagtgatcgcccgggtgcgaatgtgggtgaacctgaacctgtggcagaagctgaagctaagcagagatgatgccaagcctctgctgagactgaagggattcccttcctttcctctggtcgagagacaggccaacgaagtggactggtgggacatggtgtgtaacgtgaagaagctgatcaacgagaaaaaggaggatggcaaggtgttttggcagaatctggctggctacaagagacaggaagccctgagaccatacctgagcagcgaggaagatcggaagaagggaaagaaattcgctcggtaccagctgggcgacctgctgctgcacctggaaaagaagcacggcgaggactggggaaaggtgtacgacgaggcctgggagcggattgacaagaaagtggaaggcctgagcaagcacatcaagctggaagaggaacggagaagcgaggacgcccagagcaaggccgccctgaccgactggctgcgggctaaggccagcttcgtgatcgagggcctgaaggaggccgacaaggacgagttctgcagatgcgagctgaagctgcagaagtggtacggggacctgcggggaaagcccttcgccatcgaagccgagaacagcatcctggacatcagcggcttcagcaagcagtacaactgtgccttcatctggcagaaggacggcgtgaagaagctgaacctgtacctgatcatcaactacttcaagggcggcaagctgcggttcaagaagatcaaacctgaagccttcgaagccaacagattctacaccgtgatcaacaaaaagagcggcgagatcgtgcccatggaggtgaacttcaacttcgacgaccccaacctgatcatcctgcctctggcctttggcaagagacagggcagagaattcatctggaacgacctgctgtccctggaaaccggcagcctgaagctggccaacggaagagtgatcgagaagacactgtacaacagaagaacccggcaggatgagcctgccctgttcgtggccctgaccttcgagcggcgggaggtcctggactcctccaatatcaaaccaatgaacctgatcggcgtggcaagaggcgaaaacatccccgccgtgatcgccctgaccgaccccgagggctgcccactgagccggtttaaggatagcctgggaaacccaacccacatcctgagaatcggcgagagctataaggagaagcagcggaccatccaggccaagaaggaggtggagcagcggagagccggcggctacagccggaagtacgccagcaaagccaagaatctggcagacgatatggtgagaaacaccgctagagatctgctgtactacgccgtgacccaggatgccatgctgatcttcgccaacctgagccggggcttcggccggcagggcaagcggaccttcatggccgagagacagtacacacggatggaggactggctgaccgccaagctggcctacgagggcctgagcaagacctacctgtccaagacactggcccagtacacctccaagacatgcagcaactgtgggtttaccatcaccagcgccgactacgacagggtgctggagaagctgaagaagacagcaacaggctggatgaccacaattaacggcaaggagctgaaggtggagggccagattacctactacaacagatacaagagacagaacgtagtcaaggacctgtccgtcgagctggatagactgagcgaagaatctgtgaacaacgacatctcctcctggacaaagggcagaagcggagaagctctgagcctcctgaagaaaagattctcccatagacccgtgcaggagaagttcgtgtgcctgaactgcggcttcgagacacacgcagccgagcaagccgccctgaacatcgccagatcctggctgttcctgcggagccaggagtacaagaaataccagacaaacaagacaaccggcaacaccgataagagagccttcgtcgagacctggcagtccttttaccggaagaagcttaaggaggtgtggaaacctgccgtgcggtctggcggatctggcggaggctccacaagcgcccacgacctggtggtgttcagggacgtgagcgtggacttcagccaggaggagtgggagtgcctgaacagctaccagaggaacctgtacagggacgtgatcctggagaactacagcaacctggtgagcctgggctgcagcatcagcaagcccgacgtgatcaccctgctggagcagggcaaggagccctggatggtggtgaggaacgagaagaggaggtggaacctggacctggagagcaagaccagccccaagaaaaagagaaaagtctaagctgccttctgcggggcttgccttctggccatgcccttcttctctcccttgcacctgtacctcttggtctttgaataaagcctgagtaggaaggctagcaaaaaaaaaaaaaaaaaaaaaaaaaaaaaaaaaaaaaaaaaaaaaaaaaaaaaaaaaaaaaaaaaaaaaaaaaaaaaaaa

SEQ ID NO: 7082 - RNA, 5797 nt, synthetic construct
  source 1..5797: mol_type = other RNA
aggaaataagagagaaaagaagagtaagaagaaatataagagccaccatggcccctaagaagaagcgtaaagtgagccggatggaacgcctcgtctacgaggtgcggcagaagtgcagaaacatcgaggacatctgcatctcctgcggatctctgaacgtgaccctggagcacccactgttcatcggcggcatgtgccagaactgtaaaaactgttttctggagtgtgcctatcaatacgacgatgacggctaccagagctactgcaccatctgttgcggcggaagagaggtgctgatgtgtggaaataacaactgctgccggtgcttctgcgtggaatgcgtggacctgctggtgggccccggcgccgcccaggccgctattaaggaagatccttggaactgctacatgtgcggccacaagggcacatacggcctgctgagacggagagaggactggcctagcagactgcagatgttcttcgccaataaccacgaccaggagttcgacccccctaaggtgtaccctcccgtccccgccgagaagagaaagcccatccgggtcctgagcctgttcgatggcatcgccaccggtctgctggtgctgaaggacctgggcatccaggtggataggtacattgcctccgaggtgtgcgaggactccatcaccgtgggaatggtgcgtcatcagggcaagatcatgtacgtgggcgacgtgcggagcgtgacacagaagcatatccaggagtggggccctttcgacctggtgatcggcggcagcccttgcaatgacctgagcatcgtgaacccagcccggaagggcctgtacgagggaaccggcagactgttcttcgagttttacagactgctgcacgacgcccggcctaaggaaggcgacgaccggcccttcttttggctgttcgagaatgtggtggccatgggagtcagcgacaagcgggatattagccggttcctggagagcaaccccgtgatgatcgatgccaaggaagtgagcgccgcccaccgggccagatacttctggggcaatctgcctggcatgaacagacccctggccagcaccgtgaacgacaagctggagctgcaggagtgcctggagcacggccggatcgccaagttcagcaaggtgagaaccatcaccacccgaagcaacagcatcaaacaaggcaaggaccagcactttcctgtgttcatgaacgagaaggaggacatcctgtggtgtaccgagatggagagagtgttcgggttcccagtccactacacagatgtcagcaacatgtctagactggccagacagagactgctgggaagaagctggtccgtccctgtgatcagacacctgttcgcccctctgaaggagtacttcgcctgcgtgagcagcggcaacagcaacgccaacagccggggccccagcttctctagcggcctggtgccactgtccctgagagggagccacatgggccccatggagatctacaaaaccgtgagcgcctggaagcggcagcctgtgcgcgtgctgagcctgtttcggaatatcgataaagtcctgaaaagcctgggattcctggagagcggctctggctccggcggtggcaccctgaagtacgtggaggatgtgacaaacgtggtcagacgggatgtggagaagtggggccccttcgatctggtgtacggcagcacccaacccctgggcagctcttgtgaccggtgccctggctggtacatgtttcagttccaccggatcctgcagtacgccctgccgagacaggagtcccagcggccattcttttggattttcatggacaacttgctgctgaccgaggatgaccaggaaactaccactcggttcctgcagaccgaagccgtgaccctgcaggacgtgagaggccgggactaccagaacgccatgcgggtgtggtccaacatccctggactgaaaagcaagcacgcacctctgacccctaaagaagaggagtacctgcaggcccaggtgcggagcagaagcaagctggacgcccctaaggtggatctgctggtgaagaattgcctcctgcccctgagagagtacttcaagtatttcagccagaatagtctgcccctgggcggcccaagcagcggcgcccctcctcccagcggcggcagcccagccggctccccaacctctaccgaggagggcacctctgagtccgccacccccgagagcggccctggcacctccaccgagcccagcgagggcagcgcacccggcagccctgccggcagccccacctccacagaggagggaaccagcaccgagcccagcgaaggcagcgccccaggcaccagcaccgagcctagtgagggcggctctggcggcggcagcgcccaggagattaaacggatcaacaagatcagaagaagacttgtgaaagacagcaacaccaagaaggccggcaagacaggccccatgaaaaccctgctggttagagtgatgacacccgatctgagagagcggctggaaaacctgagaaagaagcctgaaaatatcccccagcccatcagcaatacatctagagccaacctgaataagctgctgaccgattacaccgaaatgaagaaggcgatcctgcatgtgtactgggaagagttccagaaggaccctgtgggcctgatgagccgggtggcccagcctgccagcaagaagatcgatcagaacaagctgaaacctgagatggacgagaagggcaacctgaccaccgccggctttgcctgctctcagtgtggccagcccctgttcgtgtacaagctggagcaggtgtctgagaagggcaaggcttacaccaactacttcggacggtgcaatgtggccgagcacgaaaagctgatcctgctggcccagctgaagcccgagaaggatagcgacgaagccgtgacatatagcctgggaaagtttgggcagagggccctggatttctacagcattcatgtgaccaaggagtccacccaccccgtgaagcccctggcccagatcgccggaaacagatacgcctccggacctgtgggaaaggccctgagcgacgcatgtatgggcacaatcgcctccttcctgtctaagtaccaggacatcatcatcgaacaccagaaggtggtgaagggcaaccagaagagactggagagcctgcgggagctggccggcaaggaaaacctggaataccctagcgtgaccctgccacctcagcctcacaccaaggagggcgttgatgcctacaacgaagtgatcgcccgggtgcgaatgtgggtgaacctgaacctgtggcagaagctgaagctaagcagagatgatgccaagcctctgctgagactgaagggattcccttcctttcctctggtcgagagacaggccaacgaagtggactggtgggacatggtgtgtaacgtgaagaagctgatcaacgagaaaaaggaggatggcaaggtgttttggcagaatctggctggctacaagagacaggaagccctgagaccatacctgagcagcgaggaagatcggaagaagggaaagaaattcgctcggtaccagctgggcgacctgctgctgcacctggaaaagaagcacggcgaggactggggaaaggtgtacgacgaggcctgggagcggattgacaagaaagtggaaggcctgagcaagcacatcaagctggaagaggaacggagaagcgaggacgcccagagcaaggccgccctgaccgactggctgcgggctaaggccagcttcgtgatcgagggcctgaaggaggccgacaaggacgagttctgcagatgcgagctgaagctgcagaagtggtacggggacctgcggggaaagcccttcgccatcgaagccgagaacagcatcctggacatcagcggcttcagcaagcagtacaactgtgccttcatctggcagaaggacggcgtgaagaagctgaacctgtacctgatcatcaactacttcaagggcggcaagctgcggttcaagaagatcaaacctgaagccttcgaagccaacagattctacaccgtgatcaacaaaaagagcggcgagatcgtgcccatggaggtgaacttcaacttcgacgaccccaacctgatcatcctgcctctggcctttggcaagagacagggcagagaattcatctggaacgacctgctgtccctggaaaccggcagcctgaagctggccaacggaagagtgatcgagaagacactgtacaacagaagaacccggcaggatgagcctgccctgttcgtggccctgaccttcgagcggcgggaggtcctggactcctccaatatcaaaccaatgaacctgatcggcgtggcaagaggcgaaaacatccccgccgtgatcgccctgaccgaccccgagggctgcccactgagccggtttaaggatagcctgggaaacccaacccacatcctgagaatcggcgagagctataaggagaagcagcggaccatccaggccaagaaggaggtggagcagcggagagccggcggctacagccggaagtacgccagcaaagccaagaatctggcagacgatatggtgagaaacaccgctagagatctgctgtactacgccgtgacccaggatgccatgctgatcttcgccaacctgagccggggcttcggccggcagggcaagcggaccttcatggccgagagacagtacacacggatggaggactggctgaccgccaagctggcctacgagggcctgagcaagacctacctgtccaagacactggcccagtacacctccaagacatgcagcaactgtgggtttaccatcaccagcgccgactacgacagggtgctggagaagctgaagaagacagcaacaggctggatgaccacaattaacggcaaggagctgaaggtggagggccagattacctactacaacagatacaagagacagaacgtagtcaaggacctgtccgtcgagctggatagactgagcgaagaatctgtgaacaacgacatctcctcctggacaaagggcagaagcggagaagctctgagcctcctgaagaaaagattctcccatagacccgtgcaggagaagttcgtgtgcctgaactgcggcttcgagacacacgcagccgagcaagccgccctgaacatcgccagatcctggctgttcctgcggagccaggagtacaagaaataccagacaaacaagacaaccggcaacaccgataagagagccttcgtcgagacctggcagtccttttaccggaagaagcttaaggaggtgtggaaacctgccgtgcggtctggcggatctggcggaggctccacaagcatgctgcccatcgtgcagctgtacccccagggcctggtgagcttcaaggacgtggccgtggacttcacccaggaggagtggcagcagctggaccccagccagaggaccctgtacagggacgtgatgctggagaactacagccacctggtgagcatgggctaccccgtgagcaagcccgacgtgatcagcaagctggagcagggcgaggagccctggatcatcaagggcgacatcagcaactggaccagccccaagaaaaagagaaaagtctaagctgccttctgcggggcttgccttctggccatgcccttcttctctcccttgcacctgtacctcttggtctttgaataaagcctgagtaggaaggctagcaaaaaaaaaaaaaaaaaaaaaaaaaaaaaaaaaaaaaaaaaaaaaaaaaaaaaaaaaaaaaaaaaaaaaaaaaaaaaaaa

SEQ ID NO: 7083 - RNA, 5797 nt, synthetic construct
  source 1..5797: mol_type = other RNA
aggaaataagagagaaaagaagagtaagaagaaatataagagccaccatggcccctaagaagaagcgtaaagtgagccggatggaacgcctcgtctacgaggtgcggcagaagtgcagaaacatcgaggacatctgcatctcctgcggatctctgaacgtgaccctggagcacccactgttcatcggcggcatgtgccagaactgtaaaaactgttttctggagtgtgcctatcaatacgacgatgacggctaccagagctactgcaccatctgttgcggcggaagagaggtgctgatgtgtggaaataacaactgctgccggtgcttctgcgtggaatgcgtggacctgctggtgggccccggcgccgcccaggccgctattaaggaagatccttggaactgctacatgtgcggccacaagggcacatacggcctgctgagacggagagaggactggcctagcagactgcagatgttcttcgccaataaccacgaccaggagttcgacccccctaaggtgtaccctcccgtccccgccgagaagagaaagcccatccgggtcctgagcctgttcgatggcatcgccaccggtctgctggtgctgaaggacctgggcatccaggtggataggtacattgcctccgaggtgtgcgaggactccatcaccgtgggaatggtgcgtcatcagggcaagatcatgtacgtgggcgacgtgcggagcgtgacacagaagcatatccaggagtggggccctttcgacctggtgatcggcggcagcccttgcaatgacctgagcatcgtgaacccagcccggaagggcctgtacgagggaaccggcagactgttcttcgagttttacagactgctgcacgacgcccggcctaaggaaggcgacgaccggcccttcttttggctgttcgagaatgtggtggccatgggagtcagcgacaagcgggatattagccggttcctggagagcaaccccgtgatgatcgatgccaaggaagtgagcgccgcccaccgggccagatacttctggggcaatctgcctggcatgaacagacccctggccagcaccgtgaacgacaagctggagctgcaggagtgcctggagcacggccggatcgccaagttcagcaaggtgagaaccatcaccacccgaagcaacagcatcaaacaaggcaaggaccagcactttcctgtgttcatgaacgagaaggaggacatcctgtggtgtaccgagatggagagagtgttcgggttcccagtccactacacagatgtcagcaacatgtctagactggccagacagagactgctgggaagaagctggtccgtccctgtgatcagacacctgttcgcccctctgaaggagtacttcgcctgcgtgagcagcggcaacagcaacgccaacagccggggccccagcttctctagcggcctggtgccactgtccctgagagggagccacatgggccccatggagatctacaaaaccgtgagcgcctggaagcggcagcctgtgcgcgtgctgagcctgtttcggaatatcgataaagtcctgaaaagcctgggattcctggagagcggctctggctccggcggtggcaccctgaagtacgtggaggatgtgacaaacgtggtcagacgggatgtggagaagtggggccccttcgatctggtgtacggcagcacccaacccctgggcagctcttgtgaccggtgccctggctggtacatgtttcagttccaccggatcctgcagtacgccctgccgagacaggagtcccagcggccattcttttggattttcatggacaacttgctgctgaccgaggatgaccaggaaactaccactcggttcctgcagaccgaagccgtgaccctgcaggacgtgagaggccgggactaccagaacgccatgcgggtgtggtccaacatccctggactgaaaagcaagcacgcacctctgacccctaaagaagaggagtacctgcaggcccaggtgcggagcagaagcaagctggacgcccctaaggtggatctgctggtgaagaattgcctcctgcccctgagagagtacttcaagtatttcagccagaatagtctgcccctgggcggcccaagcagcggcgcccctcctcccagcggcggcagcccagccggctccccaacctctaccgaggagggcacctctgagtccgccacccccgagagcggccctggcacctccaccgagcccagcgagggcagcgcacccggcagccctgccggcagccccacctccacagaggagggaaccagcaccgagcccagcgaaggcagcgccccaggcaccagcaccgagcctagtgagggcggctctggcggcggcagcgcccaggagattaaacggatcaacaagatcagaagaagacttgtgaaagacagcaacaccaagaaggccggcaagacaggccccatgaaaaccctgctggttagagtgatgacacccgatctgagagagcggctggaaaacctgagaaagaagcctgaaaatatcccccagcccatcagcaatacatctagagccaacctgaataagctgctgaccgattacaccgaaatgaagaaggcgatcctgcatgtgtactgggaagagttccagaaggaccctgtgggcctgatgagccgggtggcccagcctgccagcaagaagatcgatcagaacaagctgaaacctgagatggacgagaagggcaacctgaccaccgccggctttgcctgctctcagtgtggccagcccctgttcgtgtacaagctggagcaggtgtctgagaagggcaaggcttacaccaactacttcggacggtgcaatgtggccgagcacgaaaagctgatcctgctggcccagctgaagcccgagaaggatagcgacgaagccgtgacatatagcctgggaaagtttgggcagagggccctggatttctacagcattcatgtgaccaaggagtccacccaccccgtgaagcccctggcccagatcgccggaaacagatacgcctccggacctgtgggaaaggccctgagcgacgcatgtatgggcacaatcgcctccttcctgtctaagtaccaggacatcatcatcgaacaccagaaggtggtgaagggcaaccagaagagactggagagcctgcgggagctggccggcaaggaaaacctggaataccctagcgtgaccctgccacctcagcctcacaccaaggagggcgttgatgcctacaacgaagtgatcgcccgggtgcgaatgtgggtgaacctgaacctgtggcagaagctgaagctaagcagagatgatgccaagcctctgctgagactgaagggattcccttcctttcctctggtcgagagacaggccaacgaagtggactggtgggacatggtgtgtaacgtgaagaagctgatcaacgagaaaaaggaggatggcaaggtgttttggcagaatctggctggctacaagagacaggaagccctgagaccatacctgagcagcgaggaagatcggaagaagggaaagaaattcgctcggtaccagctgggcgacctgctgctgcacctggaaaagaagcacggcgaggactggggaaaggtgtacgacgaggcctgggagcggattgacaagaaagtggaaggcctgagcaagcacatcaagctggaagaggaacggagaagcgaggacgcccagagcaaggccgccctgaccgactggctgcgggctaaggccagcttcgtgatcgagggcctgaaggaggccgacaaggacgagttctgcagatgcgagctgaagctgcagaagtggtacggggacctgcggggaaagcccttcgccatcgaagccgagaacagcatcctggacatcagcggcttcagcaagcagtacaactgtgccttcatctggcagaaggacggcgtgaagaagctgaacctgtacctgatcatcaactacttcaagggcggcaagctgcggttcaagaagatcaaacctgaagccttcgaagccaacagattctacaccgtgatcaacaaaaagagcggcgagatcgtgcccatggaggtgaacttcaacttcgacgaccccaacctgatcatcctgcctctggcctttggcaagagacagggcagagaattcatctggaacgacctgctgtccctggaaaccggcagcctgaagctggccaacggaagagtgatcgagaagacactgtacaacagaagaacccggcaggatgagcctgccctgttcgtggccctgaccttcgagcggcgggaggtcctggactcctccaatatcaaaccaatgaacctgatcggcgtggcaagaggcgaaaacatccccgccgtgatcgccctgaccgaccccgagggctgcccactgagccggtttaaggatagcctgggaaacccaacccacatcctgagaatcggcgagagctataaggagaagcagcggaccatccaggccaagaaggaggtggagcagcggagagccggcggctacagccggaagtacgccagcaaagccaagaatctggcagacgatatggtgagaaacaccgctagagatctgctgtactacgccgtgacccaggatgccatgctgatcttcgccaacctgagccggggcttcggccggcagggcaagcggaccttcatggccgagagacagtacacacggatggaggactggctgaccgccaagctggcctacgagggcctgagcaagacctacctgtccaagacactggcccagtacacctccaagacatgcagcaactgtgggtttaccatcaccagcgccgactacgacagggtgctggagaagctgaagaagacagcaacaggctggatgaccacaattaacggcaaggagctgaaggtggagggccagattacctactacaacagatacaagagacagaacgtagtcaaggacctgtccgtcgagctggatagactgagcgaagaatctgtgaacaacgacatctcctcctggacaaagggcagaagcggagaagctctgagcctcctgaagaaaagattctcccatagacccgtgcaggagaagttcgtgtgcctgaactgcggcttcgagacacacgcagccgagcaagccgccctgaacatcgccagatcctggctgttcctgcggagccaggagtacaagaaataccagacaaacaagacaaccggcaacaccgataagagagccttcgtcgagacctggcagtccttttaccggaagaagcttaaggaggtgtggaaacctgccgtgcggtctggcggatctggcggaggctccacaagccccgagaacggcgtgaccttcgaggacatcgccctgtacttcagctgggaggagtggaagctgctggacgaggcccagaggaggctgtaccacgacgtgatgctggagaacttcgccctgatcagcagcctgggcgtgtggagcggcgaggagaacgtggaggccagcttcgagcagagcgtgagcgtggtgatgagccaggtgaggaccagcaaggagcccagcagcagccagaagacccacaccagccccaagaaaaagagaaaagtctaagctgccttctgcggggcttgccttctggccatgcccttcttctctcccttgcacctgtacctcttggtctttgaataaagcctgagtaggaaggctagcaaaaaaaaaaaaaaaaaaaaaaaaaaaaaaaaaaaaaaaaaaaaaaaaaaaaaaaaaaaaaaaaaaaaaaaaaaaaaaaa

SEQ ID NO: 7084 - RNA, 5797 nt, synthetic construct
  source 1..5797: mol_type = other RNA
aggaaataagagagaaaagaagagtaagaagaaatataagagccaccatggcccctaagaagaagcgtaaagtgagccggatggaacgcctcgtctacgaggtgcggcagaagtgcagaaacatcgaggacatctgcatctcctgcggatctctgaacgtgaccctggagcacccactgttcatcggcggcatgtgccagaactgtaaaaactgttttctggagtgtgcctatcaatacgacgatgacggctaccagagctactgcaccatctgttgcggcggaagagaggtgctgatgtgtggaaataacaactgctgccggtgcttctgcgtggaatgcgtggacctgctggtgggccccggcgccgcccaggccgctattaaggaagatccttggaactgctacatgtgcggccacaagggcacatacggcctgctgagacggagagaggactggcctagcagactgcagatgttcttcgccaataaccacgaccaggagttcgacccccctaaggtgtaccctcccgtccccgccgagaagagaaagcccatccgggtcctgagcctgttcgatggcatcgccaccggtctgctggtgctgaaggacctgggcatccaggtggataggtacattgcctccgaggtgtgcgaggactccatcaccgtgggaatggtgcgtcatcagggcaagatcatgtacgtgggcgacgtgcggagcgtgacacagaagcatatccaggagtggggccctttcgacctggtgatcggcggcagcccttgcaatgacctgagcatcgtgaacccagcccggaagggcctgtacgagggaaccggcagactgttcttcgagttttacagactgctgcacgacgcccggcctaaggaaggcgacgaccggcccttcttttggctgttcgagaatgtggtggccatgggagtcagcgacaagcgggatattagccggttcctggagagcaaccccgtgatgatcgatgccaaggaagtgagcgccgcccaccgggccagatacttctggggcaatctgcctggcatgaacagacccctggccagcaccgtgaacgacaagctggagctgcaggagtgcctggagcacggccggatcgccaagttcagcaaggtgagaaccatcaccacccgaagcaacagcatcaaacaaggcaaggaccagcactttcctgtgttcatgaacgagaaggaggacatcctgtggtgtaccgagatggagagagtgttcgggttcccagtccactacacagatgtcagcaacatgtctagactggccagacagagactgctgggaagaagctggtccgtccctgtgatcagacacctgttcgcccctctgaaggagtacttcgcctgcgtgagcagcggcaacagcaacgccaacagccggggccccagcttctctagcggcctggtgccactgtccctgagagggagccacatgggccccatggagatctacaaaaccgtgagcgcctggaagcggcagcctgtgcgcgtgctgagcctgtttcggaatatcgataaagtcctgaaaagcctgggattcctggagagcggctctggctccggcggtggcaccctgaagtacgtggaggatgtgacaaacgtggtcagacgggatgtggagaagtggggccccttcgatctggtgtacggcagcacccaacccctgggcagctcttgtgaccggtgccctggctggtacatgtttcagttccaccggatcctgcagtacgccctgccgagacaggagtcccagcggccattcttttggattttcatggacaacttgctgctgaccgaggatgaccaggaaactaccactcggttcctgcagaccgaagccgtgaccctgcaggacgtgagaggccgggactaccagaacgccatgcgggtgtggtccaacatccctggactgaaaagcaagcacgcacctctgacccctaaagaagaggagtacctgcaggcccaggtgcggagcagaagcaagctggacgcccctaaggtggatctgctggtgaagaattgcctcctgcccctgagagagtacttcaagtatttcagccagaatagtctgcccctgggcggcccaagcagcggcgcccctcctcccagcggcggcagcccagccggctccccaacctctaccgaggagggcacctctgagtccgccacccccgagagcggccctggcacctccaccgagcccagcgagggcagcgcacccggcagccctgccggcagccccacctccacagaggagggaaccagcaccgagcccagcgaaggcagcgccccaggcaccagcaccgagcctagtgagggcggctctggcggcggcagcgcccaggagattaaacggatcaacaagatcagaagaagacttgtgaaagacagcaacaccaagaaggccggcaagacaggccccatgaaaaccctgctggttagagtgatgacacccgatctgagagagcggctggaaaacctgagaaagaagcctgaaaatatcccccagcccatcagcaatacatctagagccaacctgaataagctgctgaccgattacaccgaaatgaagaaggcgatcctgcatgtgtactgggaagagttccagaaggaccctgtgggcctgatgagccgggtggcccagcctgccagcaagaagatcgatcagaacaagctgaaacctgagatggacgagaagggcaacctgaccaccgccggctttgcctgctctcagtgtggccagcccctgttcgtgtacaagctggagcaggtgtctgagaagggcaaggcttacaccaactacttcggacggtgcaatgtggccgagcacgaaaagctgatcctgctggcccagctgaagcccgagaaggatagcgacgaagccgtgacatatagcctgggaaagtttgggcagagggccctggatttctacagcattcatgtgaccaaggagtccacccaccccgtgaagcccctggcccagatcgccggaaacagatacgcctccggacctgtgggaaaggccctgagcgacgcatgtatgggcacaatcgcctccttcctgtctaagtaccaggacatcatcatcgaacaccagaaggtggtgaagggcaaccagaagagactggagagcctgcgggagctggccggcaaggaaaacctggaataccctagcgtgaccctgccacctcagcctcacaccaaggagggcgttgatgcctacaacgaagtgatcgcccgggtgcgaatgtgggtgaacctgaacctgtggcagaagctgaagctaagcagagatgatgccaagcctctgctgagactgaagggattcccttcctttcctctggtcgagagacaggccaacgaagtggactggtgggacatggtgtgtaacgtgaagaagctgatcaacgagaaaaaggaggatggcaaggtgttttggcagaatctggctggctacaagagacaggaagccctgagaccatacctgagcagcgaggaagatcggaagaagggaaagaaattcgctcggtaccagctgggcgacctgctgctgcacctggaaaagaagcacggcgaggactggggaaaggtgtacgacgaggcctgggagcggattgacaagaaagtggaaggcctgagcaagcacatcaagctggaagaggaacggagaagcgaggacgcccagagcaaggccgccctgaccgactggctgcgggctaaggccagcttcgtgatcgagggcctgaaggaggccgacaaggacgagttctgcagatgcgagctgaagctgcagaagtggtacggggacctgcggggaaagcccttcgccatcgaagccgagaacagcatcctggacatcagcggcttcagcaagcagtacaactgtgccttcatctggcagaaggacggcgtgaagaagctgaacctgtacctgatcatcaactacttcaagggcggcaagctgcggttcaagaagatcaaacctgaagccttcgaagccaacagattctacaccgtgatcaacaaaaagagcggcgagatcgtgcccatggaggtgaacttcaacttcgacgaccccaacctgatcatcctgcctctggcctttggcaagagacagggcagagaattcatctggaacgacctgctgtccctggaaaccggcagcctgaagctggccaacggaagagtgatcgagaagacactgtacaacagaagaacccggcaggatgagcctgccctgttcgtggccctgaccttcgagcggcgggaggtcctggactcctccaatatcaaaccaatgaacctgatcggcgtggcaagaggcgaaaacatccccgccgtgatcgccctgaccgaccccgagggctgcccactgagccggtttaaggatagcctgggaaacccaacccacatcctgagaatcggcgagagctataaggagaagcagcggaccatccaggccaagaaggaggtggagcagcggagagccggcggctacagccggaagtacgccagcaaagccaagaatctggcagacgatatggtgagaaacaccgctagagatctgctgtactacgccgtgacccaggatgccatgctgatcttcgccaacctgagccggggcttcggccggcagggcaagcggaccttcatggccgagagacagtacacacggatggaggactggctgaccgccaagctggcctacgagggcctgagcaagacctacctgtccaagacactggcccagtacacctccaagacatgcagcaactgtgggtttaccatcaccagcgccgactacgacagggtgctggagaagctgaagaagacagcaacaggctggatgaccacaattaacggcaaggagctgaaggtggagggccagattacctactacaacagatacaagagacagaacgtagtcaaggacctgtccgtcgagctggatagactgagcgaagaatctgtgaacaacgacatctcctcctggacaaagggcagaagcggagaagctctgagcctcctgaagaaaagattctcccatagacccgtgcaggagaagttcgtgtgcctgaactgcggcttcgagacacacgcagccgagcaagccgccctgaacatcgccagatcctggctgttcctgcggagccaggagtacaagaaataccagacaaacaagacaaccggcaacaccgataagagagccttcgtcgagacctggcagtccttttaccggaagaagcttaaggaggtgtggaaacctgccgtgcggtctggcggatctggcggaggctccacaagcatgcccgtgaccttcgaggaggtggccgtgtacttcaccgagggccagggcgccctgctggaccccgcccagagggccctgtacagggacgtgatgcaggagatctacgagatggtgatcagcctgggcttcctgctgcccaagcccgacgtgatcatccagctggagaggggcgaggagccctgggtgcccgacctgcagggcagcgccgagagggagatgagcaggggcacctgcgccggcaccagccccaagaaaaagagaaaagtctaagctgccttctgcggggcttgccttctggccatgcccttcttctctcccttgcacctgtacctcttggtctttgaataaagcctgagtaggaaggctagcaaaaaaaaaaaaaaaaaaaaaaaaaaaaaaaaaaaaaaaaaaaaaaaaaaaaaaaaaaaaaaaaaaaaaaaaaaaaaaaa

SEQ ID NO: 7085 - RNA, 5794 nt, synthetic construct
  source 1..5794: mol_type = other RNA
aggaaataagagagaaaagaagagtaagaagaaatataagagccaccatggcccctaagaagaagcgtaaagtgagccggatggaacgcctcgtctacgaggtgcggcagaagtgcagaaacatcgaggacatctgcatctcctgcggatctctgaacgtgaccctggagcacccactgttcatcggcggcatgtgccagaactgtaaaaactgttttctggagtgtgcctatcaatacgacgatgacggctaccagagctactgcaccatctgttgcggcggaagagaggtgctgatgtgtggaaataacaactgctgccggtgcttctgcgtggaatgcgtggacctgctggtgggccccggcgccgcccaggccgctattaaggaagatccttggaactgctacatgtgcggccacaagggcacatacggcctgctgagacggagagaggactggcctagcagactgcagatgttcttcgccaataaccacgaccaggagttcgacccccctaaggtgtaccctcccgtccccgccgagaagagaaagcccatccgggtcctgagcctgttcgatggcatcgccaccggtctgctggtgctgaaggacctgggcatccaggtggataggtacattgcctccgaggtgtgcgaggactccatcaccgtgggaatggtgcgtcatcagggcaagatcatgtacgtgggcgacgtgcggagcgtgacacagaagcatatccaggagtggggccctttcgacctggtgatcggcggcagcccttgcaatgacctgagcatcgtgaacccagcccggaagggcctgtacgagggaaccggcagactgttcttcgagttttacagactgctgcacgacgcccggcctaaggaaggcgacgaccggcccttcttttggctgttcgagaatgtggtggccatgggagtcagcgacaagcgggatattagccggttcctggagagcaaccccgtgatgatcgatgccaaggaagtgagcgccgcccaccgggccagatacttctggggcaatctgcctggcatgaacagacccctggccagcaccgtgaacgacaagctggagctgcaggagtgcctggagcacggccggatcgccaagttcagcaaggtgagaaccatcaccacccgaagcaacagcatcaaacaaggcaaggaccagcactttcctgtgttcatgaacgagaaggaggacatcctgtggtgtaccgagatggagagagtgttcgggttcccagtccactacacagatgtcagcaacatgtctagactggccagacagagactgctgggaagaagctggtccgtccctgtgatcagacacctgttcgcccctctgaaggagtacttcgcctgcgtgagcagcggcaacagcaacgccaacagccggggccccagcttctctagcggcctggtgccactgtccctgagagggagccacatgggccccatggagatctacaaaaccgtgagcgcctggaagcggcagcctgtgcgcgtgctgagcctgtttcggaatatcgataaagtcctgaaaagcctgggattcctggagagcggctctggctccggcggtggcaccctgaagtacgtggaggatgtgacaaacgtggtcagacgggatgtggagaagtggggccccttcgatctggtgtacggcagcacccaacccctgggcagctcttgtgaccggtgccctggctggtacatgtttcagttccaccggatcctgcagtacgccctgccgagacaggagtcccagcggccattcttttggattttcatggacaacttgctgctgaccgaggatgaccaggaaactaccactcggttcctgcagaccgaagccgtgaccctgcaggacgtgagaggccgggactaccagaacgccatgcgggtgtggtccaacatccctggactgaaaagcaagcacgcacctctgacccctaaagaagaggagtacctgcaggcccaggtgcggagcagaagcaagctggacgcccctaaggtggatctgctggtgaagaattgcctcctgcccctgagagagtacttcaagtatttcagccagaatagtctgcccctgggcggcccaagcagcggcgcccctcctcccagcggcggcagcccagccggctccccaacctctaccgaggagggcacctctgagtccgccacccccgagagcggccctggcacctccaccgagcccagcgagggcagcgcacccggcagccctgccggcagccccacctccacagaggagggaaccagcaccgagcccagcgaaggcagcgccccaggcaccagcaccgagcctagtgagggcggctctggcggcggcagcgcccaggagattaaacggatcaacaagatcagaagaagacttgtgaaagacagcaacaccaagaaggccggcaagacaggccccatgaaaaccctgctggttagagtgatgacacccgatctgagagagcggctggaaaacctgagaaagaagcctgaaaatatcccccagcccatcagcaatacatctagagccaacctgaataagctgctgaccgattacaccgaaatgaagaaggcgatcctgcatgtgtactgggaagagttccagaaggaccctgtgggcctgatgagccgggtggcccagcctgccagcaagaagatcgatcagaacaagctgaaacctgagatggacgagaagggcaacctgaccaccgccggctttgcctgctctcagtgtggccagcccctgttcgtgtacaagctggagcaggtgtctgagaagggcaaggcttacaccaactacttcggacggtgcaatgtggccgagcacgaaaagctgatcctgctggcccagctgaagcccgagaaggatagcgacgaagccgtgacatatagcctgggaaagtttgggcagagggccctggatttctacagcattcatgtgaccaaggagtccacccaccccgtgaagcccctggcccagatcgccggaaacagatacgcctccggacctgtgggaaaggccctgagcgacgcatgtatgggcacaatcgcctccttcctgtctaagtaccaggacatcatcatcgaacaccagaaggtggtgaagggcaaccagaagagactggagagcctgcgggagctggccggcaaggaaaacctggaataccctagcgtgaccctgccacctcagcctcacaccaaggagggcgttgatgcctacaacgaagtgatcgcccgggtgcgaatgtgggtgaacctgaacctgtggcagaagctgaagctaagcagagatgatgccaagcctctgctgagactgaagggattcccttcctttcctctggtcgagagacaggccaacgaagtggactggtgggacatggtgtgtaacgtgaagaagctgatcaacgagaaaaaggaggatggcaaggtgttttggcagaatctggctggctacaagagacaggaagccctgagaccatacctgagcagcgaggaagatcggaagaagggaaagaaattcgctcggtaccagctgggcgacctgctgctgcacctggaaaagaagcacggcgaggactggggaaaggtgtacgacgaggcctgggagcggattgacaagaaagtggaaggcctgagcaagcacatcaagctggaagaggaacggagaagcgaggacgcccagagcaaggccgccctgaccgactggctgcgggctaaggccagcttcgtgatcgagggcctgaaggaggccgacaaggacgagttctgcagatgcgagctgaagctgcagaagtggtacggggacctgcggggaaagcccttcgccatcgaagccgagaacagcatcctggacatcagcggcttcagcaagcagtacaactgtgccttcatctggcagaaggacggcgtgaagaagctgaacctgtacctgatcatcaactacttcaagggcggcaagctgcggttcaagaagatcaaacctgaagccttcgaagccaacagattctacaccgtgatcaacaaaaagagcggcgagatcgtgcccatggaggtgaacttcaacttcgacgaccccaacctgatcatcctgcctctggcctttggcaagagacagggcagagaattcatctggaacgacctgctgtccctggaaaccggcagcctgaagctggccaacggaagagtgatcgagaagacactgtacaacagaagaacccggcaggatgagcctgccctgttcgtggccctgaccttcgagcggcgggaggtcctggactcctccaatatcaaaccaatgaacctgatcggcgtggcaagaggcgaaaacatccccgccgtgatcgccctgaccgaccccgagggctgcccactgagccggtttaaggatagcctgggaaacccaacccacatcctgagaatcggcgagagctataaggagaagcagcggaccatccaggccaagaaggaggtggagcagcggagagccggcggctacagccggaagtacgccagcaaagccaagaatctggcagacgatatggtgagaaacaccgctagagatctgctgtactacgccgtgacccaggatgccatgctgatcttcgccaacctgagccggggcttcggccggcagggcaagcggaccttcatggccgagagacagtacacacggatggaggactggctgaccgccaagctggcctacgagggcctgagcaagacctacctgtccaagacactggcccagtacacctccaagacatgcagcaactgtgggtttaccatcaccagcgccgactacgacagggtgctggagaagctgaagaagacagcaacaggctggatgaccacaattaacggcaaggagctgaaggtggagggccagattacctactacaacagatacaagagacagaacgtagtcaaggacctgtccgtcgagctggatagactgagcgaagaatctgtgaacaacgacatctcctcctggacaaagggcagaagcggagaagctctgagcctcctgaagaaaagattctcccatagacccgtgcaggagaagttcgtgtgcctgaactgcggcttcgagacacacgcagccgagcaagccgccctgaacatcgccagatcctggctgttcctgcggagccaggagtacaagaaataccagacaaacaagacaaccggcaacaccgataagagagccttcgtcgagacctggcagtccttttaccggaagaagcttaaggaggtgtggaaacctgccgtgcggtctggcggatctggcggaggctccacaagcgaggagacccagggcgagctgaccagcagctgcggcagcaagaccatggccaacgtgagcctggccttcagagacgtgagcatcgacctgagccaggaggagtgggagtgcctggacgccgtgcagagagacctgtacaaggacgtgatgctggagaactacagcaacctggtgagcctgggctacaccatccccaagcccgacgtgatcaccctgctggagcaggagaaggagccctggaccagccccaagaaaaagagaaaagtctaagctgccttctgcggggcttgccttctggccatgcccttcttctctcccttgcacctgtacctcttggtctttgaataaagcctgagtaggaaggctagcaaaaaaaaaaaaaaaaaaaaaaaaaaaaaaaaaaaaaaaaaaaaaaaaaaaaaaaaaaaaaaaaaaaaaaaaaaaaaaaa

SEQ ID NO: 7086 - RNA, 5797 nt, synthetic construct
  source 1..5797: mol_type = other RNA
aggaaataagagagaaaagaagagtaagaagaaatataagagccaccatggcccctaagaagaagcgtaaagtgagccggatggaacgcctcgtctacgaggtgcggcagaagtgcagaaacatcgaggacatctgcatctcctgcggatctctgaacgtgaccctggagcacccactgttcatcggcggcatgtgccagaactgtaaaaactgttttctggagtgtgcctatcaatacgacgatgacggctaccagagctactgcaccatctgttgcggcggaagagaggtgctgatgtgtggaaataacaactgctgccggtgcttctgcgtggaatgcgtggacctgctggtgggccccggcgccgcccaggccgctattaaggaagatccttggaactgctacatgtgcggccacaagggcacatacggcctgctgagacggagagaggactggcctagcagactgcagatgttcttcgccaataaccacgaccaggagttcgacccccctaaggtgtaccctcccgtccccgccgagaagagaaagcccatccgggtcctgagcctgttcgatggcatcgccaccggtctgctggtgctgaaggacctgggcatccaggtggataggtacattgcctccgaggtgtgcgaggactccatcaccgtgggaatggtgcgtcatcagggcaagatcatgtacgtgggcgacgtgcggagcgtgacacagaagcatatccaggagtggggccctttcgacctggtgatcggcggcagcccttgcaatgacctgagcatcgtgaacccagcccggaagggcctgtacgagggaaccggcagactgttcttcgagttttacagactgctgcacgacgcccggcctaaggaaggcgacgaccggcccttcttttggctgttcgagaatgtggtggccatgggagtcagcgacaagcgggatattagccggttcctggagagcaaccccgtgatgatcgatgccaaggaagtgagcgccgcccaccgggccagatacttctggggcaatctgcctggcatgaacagacccctggccagcaccgtgaacgacaagctggagctgcaggagtgcctggagcacggccggatcgccaagttcagcaaggtgagaaccatcaccacccgaagcaacagcatcaaacaaggcaaggaccagcactttcctgtgttcatgaacgagaaggaggacatcctgtggtgtaccgagatggagagagtgttcgggttcccagtccactacacagatgtcagcaacatgtctagactggccagacagagactgctgggaagaagctggtccgtccctgtgatcagacacctgttcgcccctctgaaggagtacttcgcctgcgtgagcagcggcaacagcaacgccaacagccggggccccagcttctctagcggcctggtgccactgtccctgagagggagccacatgggccccatggagatctacaaaaccgtgagcgcctggaagcggcagcctgtgcgcgtgctgagcctgtttcggaatatcgataaagtcctgaaaagcctgggattcctggagagcggctctggctccggcggtggcaccctgaagtacgtggaggatgtgacaaacgtggtcagacgggatgtggagaagtggggccccttcgatctggtgtacggcagcacccaacccctgggcagctcttgtgaccggtgccctggctggtacatgtttcagttccaccggatcctgcagtacgccctgccgagacaggagtcccagcggccattcttttggattttcatggacaacttgctgctgaccgaggatgaccaggaaactaccactcggttcctgcagaccgaagccgtgaccctgcaggacgtgagaggccgggactaccagaacgccatgcgggtgtggtccaacatccctggactgaaaagcaagcacgcacctctgacccctaaagaagaggagtacctgcaggcccaggtgcggagcagaagcaagctggacgcccctaaggtggatctgctggtgaagaattgcctcctgcccctgagagagtacttcaagtatttcagccagaatagtctgcccctgggcggcccaagcagcggcgcccctcctcccagcggcggcagcccagccggctccccaacctctaccgaggagggcacctctgagtccgccacccccgagagcggccctggcacctccaccgagcccagcgagggcagcgcacccggcagccctgccggcagccccacctccacagaggagggaaccagcaccgagcccagcgaaggcagcgccccaggcaccagcaccgagcctagtgagggcggctctggcggcggcagcgcccaggagattaaacggatcaacaagatcagaagaagacttgtgaaagacagcaacaccaagaaggccggcaagacaggccccatgaaaaccctgctggttagagtgatgacacccgatctgagagagcggctggaaaacctgagaaagaagcctgaaaatatcccccagcccatcagcaatacatctagagccaacctgaataagctgctgaccgattacaccgaaatgaagaaggcgatcctgcatgtgtactgggaagagttccagaaggaccctgtgggcctgatgagccgggtggcccagcctgccagcaagaagatcgatcagaacaagctgaaacctgagatggacgagaagggcaacctgaccaccgccggctttgcctgctctcagtgtggccagcccctgttcgtgtacaagctggagcaggtgtctgagaagggcaaggcttacaccaactacttcggacggtgcaatgtggccgagcacgaaaagctgatcctgctggcccagctgaagcccgagaaggatagcgacgaagccgtgacatatagcctgggaaagtttgggcagagggccctggatttctacagcattcatgtgaccaaggagtccacccaccccgtgaagcccctggcccagatcgccggaaacagatacgcctccggacctgtgggaaaggccctgagcgacgcatgtatgggcacaatcgcctccttcctgtctaagtaccaggacatcatcatcgaacaccagaaggtggtgaagggcaaccagaagagactggagagcctgcgggagctggccggcaaggaaaacctggaataccctagcgtgaccctgccacctcagcctcacaccaaggagggcgttgatgcctacaacgaagtgatcgcccgggtgcgaatgtgggtgaacctgaacctgtggcagaagctgaagctaagcagagatgatgccaagcctctgctgagactgaagggattcccttcctttcctctggtcgagagacaggccaacgaagtggactggtgggacatggtgtgtaacgtgaagaagctgatcaacgagaaaaaggaggatggcaaggtgttttggcagaatctggctggctacaagagacaggaagccctgagaccatacctgagcagcgaggaagatcggaagaagggaaagaaattcgctcggtaccagctgggcgacctgctgctgcacctggaaaagaagcacggcgaggactggggaaaggtgtacgacgaggcctgggagcggattgacaagaaagtggaaggcctgagcaagcacatcaagctggaagaggaacggagaagcgaggacgcccagagcaaggccgccctgaccgactggctgcgggctaaggccagcttcgtgatcgagggcctgaaggaggccgacaaggacgagttctgcagatgcgagctgaagctgcagaagtggtacggggacctgcggggaaagcccttcgccatcgaagccgagaacagcatcctggacatcagcggcttcagcaagcagtacaactgtgccttcatctggcagaaggacggcgtgaagaagctgaacctgtacctgatcatcaactacttcaagggcggcaagctgcggttcaagaagatcaaacctgaagccttcgaagccaacagattctacaccgtgatcaacaaaaagagcggcgagatcgtgcccatggaggtgaacttcaacttcgacgaccccaacctgatcatcctgcctctggcctttggcaagagacagggcagagaattcatctggaacgacctgctgtccctggaaaccggcagcctgaagctggccaacggaagagtgatcgagaagacactgtacaacagaagaacccggcaggatgagcctgccctgttcgtggccctgaccttcgagcggcgggaggtcctggactcctccaatatcaaaccaatgaacctgatcggcgtggcaagaggcgaaaacatccccgccgtgatcgccctgaccgaccccgagggctgcccactgagccggtttaaggatagcctgggaaacccaacccacatcctgagaatcggcgagagctataaggagaagcagcggaccatccaggccaagaaggaggtggagcagcggagagccggcggctacagccggaagtacgccagcaaagccaagaatctggcagacgatatggtgagaaacaccgctagagatctgctgtactacgccgtgacccaggatgccatgctgatcttcgccaacctgagccggggcttcggccggcagggcaagcggaccttcatggccgagagacagtacacacggatggaggactggctgaccgccaagctggcctacgagggcctgagcaagacctacctgtccaagacactggcccagtacacctccaagacatgcagcaactgtgggtttaccatcaccagcgccgactacgacagggtgctggagaagctgaagaagacagcaacaggctggatgaccacaattaacggcaaggagctgaaggtggagggccagattacctactacaacagatacaagagacagaacgtagtcaaggacctgtccgtcgagctggatagactgagcgaagaatctgtgaacaacgacatctcctcctggacaaagggcagaagcggagaagctctgagcctcctgaagaaaagattctcccatagacccgtgcaggagaagttcgtgtgcctgaactgcggcttcgagacacacgcagccgagcaagccgccctgaacatcgccagatcctggctgttcctgcggagccaggagtacaagaaataccagacaaacaagacaaccggcaacaccgataagagagccttcgtcgagacctggcagtccttttaccggaagaagcttaaggaggtgtggaaacctgccgtgcggtctggcggatctggcggaggctccacaagcatgggcccccagggcgccaggaggcaggccttcctggccttcggcgacgtgaccgtggacttcacccagaaggagtggaggctgctgagccccgcccagagggccctgtacagggaggtgaccctggagaactacagccacctggtgagcctgggcatcctgcacagcaagcccgagctgatcaggaggctggagcagggcgaggccccctggggcgaggagaggaggaggaggcccggccccaccagccccaagaaaaagagaaaagtctaagctgccttctgcggggcttgccttctggccatgcccttcttctctcccttgcacctgtacctcttggtctttgaataaagcctgagtaggaaggctagcaaaaaaaaaaaaaaaaaaaaaaaaaaaaaaaaaaaaaaaaaaaaaaaaaaaaaaaaaaaaaaaaaaaaaaaaaaaaaaaa

SEQ ID NO: 7087 - RNA, 5797 nt, synthetic construct
  source 1..5797: mol_type = other RNA
aggaaataagagagaaaagaagagtaagaagaaatataagagccaccatggcccctaagaagaagcgtaaagtgagccggatggaacgcctcgtctacgaggtgcggcagaagtgcagaaacatcgaggacatctgcatctcctgcggatctctgaacgtgaccctggagcacccactgttcatcggcggcatgtgccagaactgtaaaaactgttttctggagtgtgcctatcaatacgacgatgacggctaccagagctactgcaccatctgttgcggcggaagagaggtgctgatgtgtggaaataacaactgctgccggtgcttctgcgtggaatgcgtggacctgctggtgggccccggcgccgcccaggccgctattaaggaagatccttggaactgctacatgtgcggccacaagggcacatacggcctgctgagacggagagaggactggcctagcagactgcagatgttcttcgccaataaccacgaccaggagttcgacccccctaaggtgtaccctcccgtccccgccgagaagagaaagcccatccgggtcctgagcctgttcgatggcatcgccaccggtctgctggtgctgaaggacctgggcatccaggtggataggtacattgcctccgaggtgtgcgaggactccatcaccgtgggaatggtgcgtcatcagggcaagatcatgtacgtgggcgacgtgcggagcgtgacacagaagcatatccaggagtggggccctttcgacctggtgatcggcggcagcccttgcaatgacctgagcatcgtgaacccagcccggaagggcctgtacgagggaaccggcagactgttcttcgagttttacagactgctgcacgacgcccggcctaaggaaggcgacgaccggcccttcttttggctgttcgagaatgtggtggccatgggagtcagcgacaagcgggatattagccggttcctggagagcaaccccgtgatgatcgatgccaaggaagtgagcgccgcccaccgggccagatacttctggggcaatctgcctggcatgaacagacccctggccagcaccgtgaacgacaagctggagctgcaggagtgcctggagcacggccggatcgccaagttcagcaaggtgagaaccatcaccacccgaagcaacagcatcaaacaaggcaaggaccagcactttcctgtgttcatgaacgagaaggaggacatcctgtggtgtaccgagatggagagagtgttcgggttcccagtccactacacagatgtcagcaacatgtctagactggccagacagagactgctgggaagaagctggtccgtccctgtgatcagacacctgttcgcccctctgaaggagtacttcgcctgcgtgagcagcggcaacagcaacgccaacagccggggccccagcttctctagcggcctggtgccactgtccctgagagggagccacatgggccccatggagatctacaaaaccgtgagcgcctggaagcggcagcctgtgcgcgtgctgagcctgtttcggaatatcgataaagtcctgaaaagcctgggattcctggagagcggctctggctccggcggtggcaccctgaagtacgtggaggatgtgacaaacgtggtcagacgggatgtggagaagtggggccccttcgatctggtgtacggcagcacccaacccctgggcagctcttgtgaccggtgccctggctggtacatgtttcagttccaccggatcctgcagtacgccctgccgagacaggagtcccagcggccattcttttggattttcatggacaacttgctgctgaccgaggatgaccaggaaactaccactcggttcctgcagaccgaagccgtgaccctgcaggacgtgagaggccgggactaccagaacgccatgcgggtgtggtccaacatccctggactgaaaagcaagcacgcacctctgacccctaaagaagaggagtacctgcaggcccaggtgcggagcagaagcaagctggacgcccctaaggtggatctgctggtgaagaattgcctcctgcccctgagagagtacttcaagtatttcagccagaatagtctgcccctgggcggcccaagcagcggcgcccctcctcccagcggcggcagcccagccggctccccaacctctaccgaggagggcacctctgagtccgccacccccgagagcggccctggcacctccaccgagcccagcgagggcagcgcacccggcagccctgccggcagccccacctccacagaggagggaaccagcaccgagcccagcgaaggcagcgccccaggcaccagcaccgagcctagtgagggcggctctggcggcggcagcgcccaggagattaaacggatcaacaagatcagaagaagacttgtgaaagacagcaacaccaagaaggccggcaagacaggccccatgaaaaccctgctggttagagtgatgacacccgatctgagagagcggctggaaaacctgagaaagaagcctgaaaatatcccccagcccatcagcaatacatctagagccaacctgaataagctgctgaccgattacaccgaaatgaagaaggcgatcctgcatgtgtactgggaagagttccagaaggaccctgtgggcctgatgagccgggtggcccagcctgccagcaagaagatcgatcagaacaagctgaaacctgagatggacgagaagggcaacctgaccaccgccggctttgcctgctctcagtgtggccagcccctgttcgtgtacaagctggagcaggtgtctgagaagggcaaggcttacaccaactacttcggacggtgcaatgtggccgagcacgaaaagctgatcctgctggcccagctgaagcccgagaaggatagcgacgaagccgtgacatatagcctgggaaagtttgggcagagggccctggatttctacagcattcatgtgaccaaggagtccacccaccccgtgaagcccctggcccagatcgccggaaacagatacgcctccggacctgtgggaaaggccctgagcgacgcatgtatgggcacaatcgcctccttcctgtctaagtaccaggacatcatcatcgaacaccagaaggtggtgaagggcaaccagaagagactggagagcctgcgggagctggccggcaaggaaaacctggaataccctagcgtgaccctgccacctcagcctcacaccaaggagggcgttgatgcctacaacgaagtgatcgcccgggtgcgaatgtgggtgaacctgaacctgtggcagaagctgaagctaagcagagatgatgccaagcctctgctgagactgaagggattcccttcctttcctctggtcgagagacaggccaacgaagtggactggtgggacatggtgtgtaacgtgaagaagctgatcaacgagaaaaaggaggatggcaaggtgttttggcagaatctggctggctacaagagacaggaagccctgagaccatacctgagcagcgaggaagatcggaagaagggaaagaaattcgctcggtaccagctgggcgacctgctgctgcacctggaaaagaagcacggcgaggactggggaaaggtgtacgacgaggcctgggagcggattgacaagaaagtggaaggcctgagcaagcacatcaagctggaagaggaacggagaagcgaggacgcccagagcaaggccgccctgaccgactggctgcgggctaaggccagcttcgtgatcgagggcctgaaggaggccgacaaggacgagttctgcagatgcgagctgaagctgcagaagtggtacggggacctgcggggaaagcccttcgccatcgaagccgagaacagcatcctggacatcagcggcttcagcaagcagtacaactgtgccttcatctggcagaaggacggcgtgaagaagctgaacctgtacctgatcatcaactacttcaagggcggcaagctgcggttcaagaagatcaaacctgaagccttcgaagccaacagattctacaccgtgatcaacaaaaagagcggcgagatcgtgcccatggaggtgaacttcaacttcgacgaccccaacctgatcatcctgcctctggcctttggcaagagacagggcagagaattcatctggaacgacctgctgtccctggaaaccggcagcctgaagctggccaacggaagagtgatcgagaagacactgtacaacagaagaacccggcaggatgagcctgccctgttcgtggccctgaccttcgagcggcgggaggtcctggactcctccaatatcaaaccaatgaacctgatcggcgtggcaagaggcgaaaacatccccgccgtgatcgccctgaccgaccccgagggctgcccactgagccggtttaaggatagcctgggaaacccaacccacatcctgagaatcggcgagagctataaggagaagcagcggaccatccaggccaagaaggaggtggagcagcggagagccggcggctacagccggaagtacgccagcaaagccaagaatctggcagacgatatggtgagaaacaccgctagagatctgctgtactacgccgtgacccaggatgccatgctgatcttcgccaacctgagccggggcttcggccggcagggcaagcggaccttcatggccgagagacagtacacacggatggaggactggctgaccgccaagctggcctacgagggcctgagcaagacctacctgtccaagacactggcccagtacacctccaagacatgcagcaactgtgggtttaccatcaccagcgccgactacgacagggtgctggagaagctgaagaagacagcaacaggctggatgaccacaattaacggcaaggagctgaaggtggagggccagattacctactacaacagatacaagagacagaacgtagtcaaggacctgtccgtcgagctggatagactgagcgaagaatctgtgaacaacgacatctcctcctggacaaagggcagaagcggagaagctctgagcctcctgaagaaaagattctcccatagacccgtgcaggagaagttcgtgtgcctgaactgcggcttcgagacacacgcagccgagcaagccgccctgaacatcgccagatcctggctgttcctgcggagccaggagtacaagaaataccagacaaacaagacaaccggcaacaccgataagagagccttcgtcgagacctggcagtccttttaccggaagaagcttaaggaggtgtggaaacctgccgtgcggtctggcggatctggcggaggctccacaagcttccagggcagcgtgaccttcaccgacgtggccatcgacttcagccaggaggagtggaggtggctgcagcccgcccagagggacctgtacaggtgcgtgatgctggagaactacggccacctggtgagcctgggcctgagcatcagcaagcccgacgtggtgagcctgctggagcagggcaaggagccctggctgggcaagaggaacgtgaacagggacctgttcagcgtgagcgagagcaggaccagccccaagaaaaagagaaaagtctaagctgccttctgcggggcttgccttctggccatgcccttcttctctcccttgcacctgtacctcttggtctttgaataaagcctgagtaggaaggctagcaaaaaaaaaaaaaaaaaaaaaaaaaaaaaaaaaaaaaaaaaaaaaaaaaaaaaaaaaaaaaaaaaaaaaaaaaaaaaaaa

SEQ ID NO: 7088 - RNA, 5797 nt, synthetic construct
  source 1..5797: mol_type = other RNA
aggaaataagagagaaaagaagagtaagaagaaatataagagccaccatggcccctaagaagaagcgtaaagtgagccggatggaacgcctcgtctacgaggtgcggcagaagtgcagaaacatcgaggacatctgcatctcctgcggatctctgaacgtgaccctggagcacccactgttcatcggcggcatgtgccagaactgtaaaaactgttttctggagtgtgcctatcaatacgacgatgacggctaccagagctactgcaccatctgttgcggcggaagagaggtgctgatgtgtggaaataacaactgctgccggtgcttctgcgtggaatgcgtggacctgctggtgggccccggcgccgcccaggccgctattaaggaagatccttggaactgctacatgtgcggccacaagggcacatacggcctgctgagacggagagaggactggcctagcagactgcagatgttcttcgccaataaccacgaccaggagttcgacccccctaaggtgtaccctcccgtccccgccgagaagagaaagcccatccgggtcctgagcctgttcgatggcatcgccaccggtctgctggtgctgaaggacctgggcatccaggtggataggtacattgcctccgaggtgtgcgaggactccatcaccgtgggaatggtgcgtcatcagggcaagatcatgtacgtgggcgacgtgcggagcgtgacacagaagcatatccaggagtggggccctttcgacctggtgatcggcggcagcccttgcaatgacctgagcatcgtgaacccagcccggaagggcctgtacgagggaaccggcagactgttcttcgagttttacagactgctgcacgacgcccggcctaaggaaggcgacgaccggcccttcttttggctgttcgagaatgtggtggccatgggagtcagcgacaagcgggatattagccggttcctggagagcaaccccgtgatgatcgatgccaaggaagtgagcgccgcccaccgggccagatacttctggggcaatctgcctggcatgaacagacccctggccagcaccgtgaacgacaagctggagctgcaggagtgcctggagcacggccggatcgccaagttcagcaaggtgagaaccatcaccacccgaagcaacagcatcaaacaaggcaaggaccagcactttcctgtgttcatgaacgagaaggaggacatcctgtggtgtaccgagatggagagagtgttcgggttcccagtccactacacagatgtcagcaacatgtctagactggccagacagagactgctgggaagaagctggtccgtccctgtgatcagacacctgttcgcccctctgaaggagtacttcgcctgcgtgagcagcggcaacagcaacgccaacagccggggccccagcttctctagcggcctggtgccactgtccctgagagggagccacatgggccccatggagatctacaaaaccgtgagcgcctggaagcggcagcctgtgcgcgtgctgagcctgtttcggaatatcgataaagtcctgaaaagcctgggattcctggagagcggctctggctccggcggtggcaccctgaagtacgtggaggatgtgacaaacgtggtcagacgggatgtggagaagtggggccccttcgatctggtgtacggcagcacccaacccctgggcagctcttgtgaccggtgccctggctggtacatgtttcagttccaccggatcctgcagtacgccctgccgagacaggagtcccagcggccattcttttggattttcatggacaacttgctgctgaccgaggatgaccaggaaactaccactcggttcctgcagaccgaagccgtgaccctgcaggacgtgagaggccgggactaccagaacgccatgcgggtgtggtccaacatccctggactgaaaagcaagcacgcacctctgacccctaaagaagaggagtacctgcaggcccaggtgcggagcagaagcaagctggacgcccctaaggtggatctgctggtgaagaattgcctcctgcccctgagagagtacttcaagtatttcagccagaatagtctgcccctgggcggcccaagcagcggcgcccctcctcccagcggcggcagcccagccggctccccaacctctaccgaggagggcacctctgagtccgccacccccgagagcggccctggcacctccaccgagcccagcgagggcagcgcacccggcagccctgccggcagccccacctccacagaggagggaaccagcaccgagcccagcgaaggcagcgccccaggcaccagcaccgagcctagtgagggcggctctggcggcggcagcgcccaggagattaaacggatcaacaagatcagaagaagacttgtgaaagacagcaacaccaagaaggccggcaagacaggccccatgaaaaccctgctggttagagtgatgacacccgatctgagagagcggctggaaaacctgagaaagaagcctgaaaatatcccccagcccatcagcaatacatctagagccaacctgaataagctgctgaccgattacaccgaaatgaagaaggcgatcctgcatgtgtactgggaagagttccagaaggaccctgtgggcctgatgagccgggtggcccagcctgccagcaagaagatcgatcagaacaagctgaaacctgagatggacgagaagggcaacctgaccaccgccggctttgcctgctctcagtgtggccagcccctgttcgtgtacaagctggagcaggtgtctgagaagggcaaggcttacaccaactacttcggacggtgcaatgtggccgagcacgaaaagctgatcctgctggcccagctgaagcccgagaaggatagcgacgaagccgtgacatatagcctgggaaagtttgggcagagggccctggatttctacagcattcatgtgaccaaggagtccacccaccccgtgaagcccctggcccagatcgccggaaacagatacgcctccggacctgtgggaaaggccctgagcgacgcatgtatgggcacaatcgcctccttcctgtctaagtaccaggacatcatcatcgaacaccagaaggtggtgaagggcaaccagaagagactggagagcctgcgggagctggccggcaaggaaaacctggaataccctagcgtgaccctgccacctcagcctcacaccaaggagggcgttgatgcctacaacgaagtgatcgcccgggtgcgaatgtgggtgaacctgaacctgtggcagaagctgaagctaagcagagatgatgccaagcctctgctgagactgaagggattcccttcctttcctctggtcgagagacaggccaacgaagtggactggtgggacatggtgtgtaacgtgaagaagctgatcaacgagaaaaaggaggatggcaaggtgttttggcagaatctggctggctacaagagacaggaagccctgagaccatacctgagcagcgaggaagatcggaagaagggaaagaaattcgctcggtaccagctgggcgacctgctgctgcacctggaaaagaagcacggcgaggactggggaaaggtgtacgacgaggcctgggagcggattgacaagaaagtggaaggcctgagcaagcacatcaagctggaagaggaacggagaagcgaggacgcccagagcaaggccgccctgaccgactggctgcgggctaaggccagcttcgtgatcgagggcctgaaggaggccgacaaggacgagttctgcagatgcgagctgaagctgcagaagtggtacggggacctgcggggaaagcccttcgccatcgaagccgagaacagcatcctggacatcagcggcttcagcaagcagtacaactgtgccttcatctggcagaaggacggcgtgaagaagctgaacctgtacctgatcatcaactacttcaagggcggcaagctgcggttcaagaagatcaaacctgaagccttcgaagccaacagattctacaccgtgatcaacaaaaagagcggcgagatcgtgcccatggaggtgaacttcaacttcgacgaccccaacctgatcatcctgcctctggcctttggcaagagacagggcagagaattcatctggaacgacctgctgtccctggaaaccggcagcctgaagctggccaacggaagagtgatcgagaagacactgtacaacagaagaacccggcaggatgagcctgccctgttcgtggccctgaccttcgagcggcgggaggtcctggactcctccaatatcaaaccaatgaacctgatcggcgtggcaagaggcgaaaacatccccgccgtgatcgccctgaccgaccccgagggctgcccactgagccggtttaaggatagcctgggaaacccaacccacatcctgagaatcggcgagagctataaggagaagcagcggaccatccaggccaagaaggaggtggagcagcggagagccggcggctacagccggaagtacgccagcaaagccaagaatctggcagacgatatggtgagaaacaccgctagagatctgctgtactacgccgtgacccaggatgccatgctgatcttcgccaacctgagccggggcttcggccggcagggcaagcggaccttcatggccgagagacagtacacacggatggaggactggctgaccgccaagctggcctacgagggcctgagcaagacctacctgtccaagacactggcccagtacacctccaagacatgcagcaactgtgggtttaccatcaccagcgccgactacgacagggtgctggagaagctgaagaagacagcaacaggctggatgaccacaattaacggcaaggagctgaaggtggagggccagattacctactacaacagatacaagagacagaacgtagtcaaggacctgtccgtcgagctggatagactgagcgaagaatctgtgaacaacgacatctcctcctggacaaagggcagaagcggagaagctctgagcctcctgaagaaaagattctcccatagacccgtgcaggagaagttcgtgtgcctgaactgcggcttcgagacacacgcagccgagcaagccgccctgaacatcgccagatcctggctgttcctgcggagccaggagtacaagaaataccagacaaacaagacaaccggcaacaccgataagagagccttcgtcgagacctggcagtccttttaccggaagaagcttaaggaggtgtggaaacctgccgtgcggtctggcggatctggcggaggctccacaagctggaaggagctgctgagcttcgaggacgtggccatgtacttcaccagggaggagtggaacaggctggactgggcccagaaggacctgtacagggacgtgatgctggagaactacaggaacatgatcctgctgggcttccagttccccaagcccgaggtgatctgcctgctggagcagtgggaggagccctggatcctggacctgcccagggccggcaccaggaaggccagcagcagcgcctgcaccagccccaagaaaaagagaaaagtctaagctgccttctgcggggcttgccttctggccatgcccttcttctctcccttgcacctgtacctcttggtctttgaataaagcctgagtaggaaggctagcaaaaaaaaaaaaaaaaaaaaaaaaaaaaaaaaaaaaaaaaaaaaaaaaaaaaaaaaaaaaaaaaaaaaaaaaaaaaaaaa

SEQ ID NO: 7089 - RNA, 5797 nt, synthetic construct
  source 1..5797: mol_type = other RNA
aggaaataagagagaaaagaagagtaagaagaaatataagagccaccatggcccctaagaagaagcgtaaagtgagccggatggaacgcctcgtctacgaggtgcggcagaagtgcagaaacatcgaggacatctgcatctcctgcggatctctgaacgtgaccctggagcacccactgttcatcggcggcatgtgccagaactgtaaaaactgttttctggagtgtgcctatcaatacgacgatgacggctaccagagctactgcaccatctgttgcggcggaagagaggtgctgatgtgtggaaataacaactgctgccggtgcttctgcgtggaatgcgtggacctgctggtgggccccggcgccgcccaggccgctattaaggaagatccttggaactgctacatgtgcggccacaagggcacatacggcctgctgagacggagagaggactggcctagcagactgcagatgttcttcgccaataaccacgaccaggagttcgacccccctaaggtgtaccctcccgtccccgccgagaagagaaagcccatccgggtcctgagcctgttcgatggcatcgccaccggtctgctggtgctgaaggacctgggcatccaggtggataggtacattgcctccgaggtgtgcgaggactccatcaccgtgggaatggtgcgtcatcagggcaagatcatgtacgtgggcgacgtgcggagcgtgacacagaagcatatccaggagtggggccctttcgacctggtgatcggcggcagcccttgcaatgacctgagcatcgtgaacccagcccggaagggcctgtacgagggaaccggcagactgttcttcgagttttacagactgctgcacgacgcccggcctaaggaaggcgacgaccggcccttcttttggctgttcgagaatgtggtggccatgggagtcagcgacaagcgggatattagccggttcctggagagcaaccccgtgatgatcgatgccaaggaagtgagcgccgcccaccgggccagatacttctggggcaatctgcctggcatgaacagacccctggccagcaccgtgaacgacaagctggagctgcaggagtgcctggagcacggccggatcgccaagttcagcaaggtgagaaccatcaccacccgaagcaacagcatcaaacaaggcaaggaccagcactttcctgtgttcatgaacgagaaggaggacatcctgtggtgtaccgagatggagagagtgttcgggttcccagtccactacacagatgtcagcaacatgtctagactggccagacagagactgctgggaagaagctggtccgtccctgtgatcagacacctgttcgcccctctgaaggagtacttcgcctgcgtgagcagcggcaacagcaacgccaacagccggggccccagcttctctagcggcctggtgccactgtccctgagagggagccacatgggccccatggagatctacaaaaccgtgagcgcctggaagcggcagcctgtgcgcgtgctgagcctgtttcggaatatcgataaagtcctgaaaagcctgggattcctggagagcggctctggctccggcggtggcaccctgaagtacgtggaggatgtgacaaacgtggtcagacgggatgtggagaagtggggccccttcgatctggtgtacggcagcacccaacccctgggcagctcttgtgaccggtgccctggctggtacatgtttcagttccaccggatcctgcagtacgccctgccgagacaggagtcccagcggccattcttttggattttcatggacaacttgctgctgaccgaggatgaccaggaaactaccactcggttcctgcagaccgaagccgtgaccctgcaggacgtgagaggccgggactaccagaacgccatgcgggtgtggtccaacatccctggactgaaaagcaagcacgcacctctgacccctaaagaagaggagtacctgcaggcccaggtgcggagcagaagcaagctggacgcccctaaggtggatctgctggtgaagaattgcctcctgcccctgagagagtacttcaagtatttcagccagaatagtctgcccctgggcggcccaagcagcggcgcccctcctcccagcggcggcagcccagccggctccccaacctctaccgaggagggcacctctgagtccgccacccccgagagcggccctggcacctccaccgagcccagcgagggcagcgcacccggcagccctgccggcagccccacctccacagaggagggaaccagcaccgagcccagcgaaggcagcgccccaggcaccagcaccgagcctagtgagggcggctctggcggcggcagcgcccaggagattaaacggatcaacaagatcagaagaagacttgtgaaagacagcaacaccaagaaggccggcaagacaggccccatgaaaaccctgctggttagagtgatgacacccgatctgagagagcggctggaaaacctgagaaagaagcctgaaaatatcccccagcccatcagcaatacatctagagccaacctgaataagctgctgaccgattacaccgaaatgaagaaggcgatcctgcatgtgtactgggaagagttccagaaggaccctgtgggcctgatgagccgggtggcccagcctgccagcaagaagatcgatcagaacaagctgaaacctgagatggacgagaagggcaacctgaccaccgccggctttgcctgctctcagtgtggccagcccctgttcgtgtacaagctggagcaggtgtctgagaagggcaaggcttacaccaactacttcggacggtgcaatgtggccgagcacgaaaagctgatcctgctggcccagctgaagcccgagaaggatagcgacgaagccgtgacatatagcctgggaaagtttgggcagagggccctggatttctacagcattcatgtgaccaaggagtccacccaccccgtgaagcccctggcccagatcgccggaaacagatacgcctccggacctgtgggaaaggccctgagcgacgcatgtatgggcacaatcgcctccttcctgtctaagtaccaggacatcatcatcgaacaccagaaggtggtgaagggcaaccagaagagactggagagcctgcgggagctggccggcaaggaaaacctggaataccctagcgtgaccctgccacctcagcctcacaccaaggagggcgttgatgcctacaacgaagtgatcgcccgggtgcgaatgtgggtgaacctgaacctgtggcagaagctgaagctaagcagagatgatgccaagcctctgctgagactgaagggattcccttcctttcctctggtcgagagacaggccaacgaagtggactggtgggacatggtgtgtaacgtgaagaagctgatcaacgagaaaaaggaggatggcaaggtgttttggcagaatctggctggctacaagagacaggaagccctgagaccatacctgagcagcgaggaagatcggaagaagggaaagaaattcgctcggtaccagctgggcgacctgctgctgcacctggaaaagaagcacggcgaggactggggaaaggtgtacgacgaggcctgggagcggattgacaagaaagtggaaggcctgagcaagcacatcaagctggaagaggaacggagaagcgaggacgcccagagcaaggccgccctgaccgactggctgcgggctaaggccagcttcgtgatcgagggcctgaaggaggccgacaaggacgagttctgcagatgcgagctgaagctgcagaagtggtacggggacctgcggggaaagcccttcgccatcgaagccgagaacagcatcctggacatcagcggcttcagcaagcagtacaactgtgccttcatctggcagaaggacggcgtgaagaagctgaacctgtacctgatcatcaactacttcaagggcggcaagctgcggttcaagaagatcaaacctgaagccttcgaagccaacagattctacaccgtgatcaacaaaaagagcggcgagatcgtgcccatggaggtgaacttcaacttcgacgaccccaacctgatcatcctgcctctggcctttggcaagagacagggcagagaattcatctggaacgacctgctgtccctggaaaccggcagcctgaagctggccaacggaagagtgatcgagaagacactgtacaacagaagaacccggcaggatgagcctgccctgttcgtggccctgaccttcgagcggcgggaggtcctggactcctccaatatcaaaccaatgaacctgatcggcgtggcaagaggcgaaaacatccccgccgtgatcgccctgaccgaccccgagggctgcccactgagccggtttaaggatagcctgggaaacccaacccacatcctgagaatcggcgagagctataaggagaagcagcggaccatccaggccaagaaggaggtggagcagcggagagccggcggctacagccggaagtacgccagcaaagccaagaatctggcagacgatatggtgagaaacaccgctagagatctgctgtactacgccgtgacccaggatgccatgctgatcttcgccaacctgagccggggcttcggccggcagggcaagcggaccttcatggccgagagacagtacacacggatggaggactggctgaccgccaagctggcctacgagggcctgagcaagacctacctgtccaagacactggcccagtacacctccaagacatgcagcaactgtgggtttaccatcaccagcgccgactacgacagggtgctggagaagctgaagaagacagcaacaggctggatgaccacaattaacggcaaggagctgaaggtggagggccagattacctactacaacagatacaagagacagaacgtagtcaaggacctgtccgtcgagctggatagactgagcgaagaatctgtgaacaacgacatctcctcctggacaaagggcagaagcggagaagctctgagcctcctgaagaaaagattctcccatagacccgtgcaggagaagttcgtgtgcctgaactgcggcttcgagacacacgcagccgagcaagccgccctgaacatcgccagatcctggctgttcctgcggagccaggagtacaagaaataccagacaaacaagacaaccggcaacaccgataagagagccttcgtcgagacctggcagtccttttaccggaagaagcttaaggaggtgtggaaacctgccgtgcggtctggcggatctggcggaggctccacaagcagcctgggccccgtgagcttcaaggacgtggccgtgggcttcacccaggaggagtggaggcagctggagcccgcccagaggaggacctacagggaggtgatgctggagaactacagccacctggtggccgtgggctgccacttcatcaagcccgacgtgatcaccaagctggagaggggcgaggagccctggatcgagggcggcttcctgccccagggctgcgccgacgaggtgtggcaggccaccagccccaagaaaaagagaaaagtctaagctgccttctgcggggcttgccttctggccatgcccttcttctctcccttgcacctgtacctcttggtctttgaataaagcctgagtaggaaggctagcaaaaaaaaaaaaaaaaaaaaaaaaaaaaaaaaaaaaaaaaaaaaaaaaaaaaaaaaaaaaaaaaaaaaaaaaaaaaaaaa

SEQ ID NO: 7090 - RNA, 5797 nt, synthetic construct
  source 1..5797: mol_type = other RNA
aggaaataagagagaaaagaagagtaagaagaaatataagagccaccatggcccctaagaagaagcgtaaagtgagccggatggaacgcctcgtctacgaggtgcggcagaagtgcagaaacatcgaggacatctgcatctcctgcggatctctgaacgtgaccctggagcacccactgttcatcggcggcatgtgccagaactgtaaaaactgttttctggagtgtgcctatcaatacgacgatgacggctaccagagctactgcaccatctgttgcggcggaagagaggtgctgatgtgtggaaataacaactgctgccggtgcttctgcgtggaatgcgtggacctgctggtgggccccggcgccgcccaggccgctattaaggaagatccttggaactgctacatgtgcggccacaagggcacatacggcctgctgagacggagagaggactggcctagcagactgcagatgttcttcgccaataaccacgaccaggagttcgacccccctaaggtgtaccctcccgtccccgccgagaagagaaagcccatccgggtcctgagcctgttcgatggcatcgccaccggtctgctggtgctgaaggacctgggcatccaggtggataggtacattgcctccgaggtgtgcgaggactccatcaccgtgggaatggtgcgtcatcagggcaagatcatgtacgtgggcgacgtgcggagcgtgacacagaagcatatccaggagtggggccctttcgacctggtgatcggcggcagcccttgcaatgacctgagcatcgtgaacccagcccggaagggcctgtacgagggaaccggcagactgttcttcgagttttacagactgctgcacgacgcccggcctaaggaaggcgacgaccggcccttcttttggctgttcgagaatgtggtggccatgggagtcagcgacaagcgggatattagccggttcctggagagcaaccccgtgatgatcgatgccaaggaagtgagcgccgcccaccgggccagatacttctggggcaatctgcctggcatgaacagacccctggccagcaccgtgaacgacaagctggagctgcaggagtgcctggagcacggccggatcgccaagttcagcaaggtgagaaccatcaccacccgaagcaacagcatcaaacaaggcaaggaccagcactttcctgtgttcatgaacgagaaggaggacatcctgtggtgtaccgagatggagagagtgttcgggttcccagtccactacacagatgtcagcaacatgtctagactggccagacagagactgctgggaagaagctggtccgtccctgtgatcagacacctgttcgcccctctgaaggagtacttcgcctgcgtgagcagcggcaacagcaacgccaacagccggggccccagcttctctagcggcctggtgccactgtccctgagagggagccacatgggccccatggagatctacaaaaccgtgagcgcctggaagcggcagcctgtgcgcgtgctgagcctgtttcggaatatcgataaagtcctgaaaagcctgggattcctggagagcggctctggctccggcggtggcaccctgaagtacgtggaggatgtgacaaacgtggtcagacgggatgtggagaagtggggccccttcgatctggtgtacggcagcacccaacccctgggcagctcttgtgaccggtgccctggctggtacatgtttcagttccaccggatcctgcagtacgccctgccgagacaggagtcccagcggccattcttttggattttcatggacaacttgctgctgaccgaggatgaccaggaaactaccactcggttcctgcagaccgaagccgtgaccctgcaggacgtgagaggccgggactaccagaacgccatgcgggtgtggtccaacatccctggactgaaaagcaagcacgcacctctgacccctaaagaagaggagtacctgcaggcccaggtgcggagcagaagcaagctggacgcccctaaggtggatctgctggtgaagaattgcctcctgcccctgagagagtacttcaagtatttcagccagaatagtctgcccctgggcggcccaagcagcggcgcccctcctcccagcggcggcagcccagccggctccccaacctctaccgaggagggcacctctgagtccgccacccccgagagcggccctggcacctccaccgagcccagcgagggcagcgcacccggcagccctgccggcagccccacctccacagaggagggaaccagcaccgagcccagcgaaggcagcgccccaggcaccagcaccgagcctagtgagggcggctctggcggcggcagcgcccaggagattaaacggatcaacaagatcagaagaagacttgtgaaagacagcaacaccaagaaggccggcaagacaggccccatgaaaaccctgctggttagagtgatgacacccgatctgagagagcggctggaaaacctgagaaagaagcctgaaaatatcccccagcccatcagcaatacatctagagccaacctgaataagctgctgaccgattacaccgaaatgaagaaggcgatcctgcatgtgtactgggaagagttccagaaggaccctgtgggcctgatgagccgggtggcccagcctgccagcaagaagatcgatcagaacaagctgaaacctgagatggacgagaagggcaacctgaccaccgccggctttgcctgctctcagtgtggccagcccctgttcgtgtacaagctggagcaggtgtctgagaagggcaaggcttacaccaactacttcggacggtgcaatgtggccgagcacgaaaagctgatcctgctggcccagctgaagcccgagaaggatagcgacgaagccgtgacatatagcctgggaaagtttgggcagagggccctggatttctacagcattcatgtgaccaaggagtccacccaccccgtgaagcccctggcccagatcgccggaaacagatacgcctccggacctgtgggaaaggccctgagcgacgcatgtatgggcacaatcgcctccttcctgtctaagtaccaggacatcatcatcgaacaccagaaggtggtgaagggcaaccagaagagactggagagcctgcgggagctggccggcaaggaaaacctggaataccctagcgtgaccctgccacctcagcctcacaccaaggagggcgttgatgcctacaacgaagtgatcgcccgggtgcgaatgtgggtgaacctgaacctgtggcagaagctgaagctaagcagagatgatgccaagcctctgctgagactgaagggattcccttcctttcctctggtcgagagacaggccaacgaagtggactggtgggacatggtgtgtaacgtgaagaagctgatcaacgagaaaaaggaggatggcaaggtgttttggcagaatctggctggctacaagagacaggaagccctgagaccatacctgagcagcgaggaagatcggaagaagggaaagaaattcgctcggtaccagctgggcgacctgctgctgcacctggaaaagaagcacggcgaggactggggaaaggtgtacgacgaggcctgggagcggattgacaagaaagtggaaggcctgagcaagcacatcaagctggaagaggaacggagaagcgaggacgcccagagcaaggccgccctgaccgactggctgcgggctaaggccagcttcgtgatcgagggcctgaaggaggccgacaaggacgagttctgcagatgcgagctgaagctgcagaagtggtacggggacctgcggggaaagcccttcgccatcgaagccgagaacagcatcctggacatcagcggcttcagcaagcagtacaactgtgccttcatctggcagaaggacggcgtgaagaagctgaacctgtacctgatcatcaactacttcaagggcggcaagctgcggttcaagaagatcaaacctgaagccttcgaagccaacagattctacaccgtgatcaacaaaaagagcggcgagatcgtgcccatggaggtgaacttcaacttcgacgaccccaacctgatcatcctgcctctggcctttggcaagagacagggcagagaattcatctggaacgacctgctgtccctggaaaccggcagcctgaagctggccaacggaagagtgatcgagaagacactgtacaacagaagaacccggcaggatgagcctgccctgttcgtggccctgaccttcgagcggcgggaggtcctggactcctccaatatcaaaccaatgaacctgatcggcgtggcaagaggcgaaaacatccccgccgtgatcgccctgaccgaccccgagggctgcccactgagccggtttaaggatagcctgggaaacccaacccacatcctgagaatcggcgagagctataaggagaagcagcggaccatccaggccaagaaggaggtggagcagcggagagccggcggctacagccggaagtacgccagcaaagccaagaatctggcagacgatatggtgagaaacaccgctagagatctgctgtactacgccgtgacccaggatgccatgctgatcttcgccaacctgagccggggcttcggccggcagggcaagcggaccttcatggccgagagacagtacacacggatggaggactggctgaccgccaagctggcctacgagggcctgagcaagacctacctgtccaagacactggcccagtacacctccaagacatgcagcaactgtgggtttaccatcaccagcgccgactacgacagggtgctggagaagctgaagaagacagcaacaggctggatgaccacaattaacggcaaggagctgaaggtggagggccagattacctactacaacagatacaagagacagaacgtagtcaaggacctgtccgtcgagctggatagactgagcgaagaatctgtgaacaacgacatctcctcctggacaaagggcagaagcggagaagctctgagcctcctgaagaaaagattctcccatagacccgtgcaggagaagttcgtgtgcctgaactgcggcttcgagacacacgcagccgagcaagccgccctgaacatcgccagatcctggctgttcctgcggagccaggagtacaagaaataccagacaaacaagacaaccggcaacaccgataagagagccttcgtcgagacctggcagtccttttaccggaagaagcttaaggaggtgtggaaacctgccgtgcggtctggcggatctggcggaggctccacaagcaccctgggcctgctgagcttcaacgacgtgagcctggagttcagctgggaggagtggcagctgctggacagcgcccagaggtacctgtacagggaggtgatcctggagaactacagcaacctgctgagcgtgggctaccacggcaccaagcccgacctgatcttcaggctggagcagggcgaggagccctggatcctgaacgccaagatgagcacccagaactgccccgaggtgtgggaggacaccagccccaagaaaaagagaaaagtctaagctgccttctgcggggcttgccttctggccatgcccttcttctctcccttgcacctgtacctcttggtctttgaataaagcctgagtaggaaggctagcaaaaaaaaaaaaaaaaaaaaaaaaaaaaaaaaaaaaaaaaaaaaaaaaaaaaaaaaaaaaaaaaaaaaaaaaaaaaaaaa

SEQ ID NO: 7091 - RNA, 5797 nt, synthetic construct
  source 1..5797: mol_type = other RNA
aggaaataagagagaaaagaagagtaagaagaaatataagagccaccatggcccctaagaagaagcgtaaagtgagccggatggaacgcctcgtctacgaggtgcggcagaagtgcagaaacatcgaggacatctgcatctcctgcggatctctgaacgtgaccctggagcacccactgttcatcggcggcatgtgccagaactgtaaaaactgttttctggagtgtgcctatcaatacgacgatgacggctaccagagctactgcaccatctgttgcggcggaagagaggtgctgatgtgtggaaataacaactgctgccggtgcttctgcgtggaatgcgtggacctgctggtgggccccggcgccgcccaggccgctattaaggaagatccttggaactgctacatgtgcggccacaagggcacatacggcctgctgagacggagagaggactggcctagcagactgcagatgttcttcgccaataaccacgaccaggagttcgacccccctaaggtgtaccctcccgtccccgccgagaagagaaagcccatccgggtcctgagcctgttcgatggcatcgccaccggtctgctggtgctgaaggacctgggcatccaggtggataggtacattgcctccgaggtgtgcgaggactccatcaccgtgggaatggtgcgtcatcagggcaagatcatgtacgtgggcgacgtgcggagcgtgacacagaagcatatccaggagtggggccctttcgacctggtgatcggcggcagcccttgcaatgacctgagcatcgtgaacccagcccggaagggcctgtacgagggaaccggcagactgttcttcgagttttacagactgctgcacgacgcccggcctaaggaaggcgacgaccggcccttcttttggctgttcgagaatgtggtggccatgggagtcagcgacaagcgggatattagccggttcctggagagcaaccccgtgatgatcgatgccaaggaagtgagcgccgcccaccgggccagatacttctggggcaatctgcctggcatgaacagacccctggccagcaccgtgaacgacaagctggagctgcaggagtgcctggagcacggccggatcgccaagttcagcaaggtgagaaccatcaccacccgaagcaacagcatcaaacaaggcaaggaccagcactttcctgtgttcatgaacgagaaggaggacatcctgtggtgtaccgagatggagagagtgttcgggttcccagtccactacacagatgtcagcaacatgtctagactggccagacagagactgctgggaagaagctggtccgtccctgtgatcagacacctgttcgcccctctgaaggagtacttcgcctgcgtgagcagcggcaacagcaacgccaacagccggggccccagcttctctagcggcctggtgccactgtccctgagagggagccacatgggccccatggagatctacaaaaccgtgagcgcctggaagcggcagcctgtgcgcgtgctgagcctgtttcggaatatcgataaagtcctgaaaagcctgggattcctggagagcggctctggctccggcggtggcaccctgaagtacgtggaggatgtgacaaacgtggtcagacgggatgtggagaagtggggccccttcgatctggtgtacggcagcacccaacccctgggcagctcttgtgaccggtgccctggctggtacatgtttcagttccaccggatcctgcagtacgccctgccgagacaggagtcccagcggccattcttttggattttcatggacaacttgctgctgaccgaggatgaccaggaaactaccactcggttcctgcagaccgaagccgtgaccctgcaggacgtgagaggccgggactaccagaacgccatgcgggtgtggtccaacatccctggactgaaaagcaagcacgcacctctgacccctaaagaagaggagtacctgcaggcccaggtgcggagcagaagcaagctggacgcccctaaggtggatctgctggtgaagaattgcctcctgcccctgagagagtacttcaagtatttcagccagaatagtctgcccctgggcggcccaagcagcggcgcccctcctcccagcggcggcagcccagccggctccccaacctctaccgaggagggcacctctgagtccgccacccccgagagcggccctggcacctccaccgagcccagcgagggcagcgcacccggcagccctgccggcagccccacctccacagaggagggaaccagcaccgagcccagcgaaggcagcgccccaggcaccagcaccgagcctagtgagggcggctctggcggcggcagcgcccaggagattaaacggatcaacaagatcagaagaagacttgtgaaagacagcaacaccaagaaggccggcaagacaggccccatgaaaaccctgctggttagagtgatgacacccgatctgagagagcggctggaaaacctgagaaagaagcctgaaaatatcccccagcccatcagcaatacatctagagccaacctgaataagctgctgaccgattacaccgaaatgaagaaggcgatcctgcatgtgtactgggaagagttccagaaggaccctgtgggcctgatgagccgggtggcccagcctgccagcaagaagatcgatcagaacaagctgaaacctgagatggacgagaagggcaacctgaccaccgccggctttgcctgctctcagtgtggccagcccctgttcgtgtacaagctggagcaggtgtctgagaagggcaaggcttacaccaactacttcggacggtgcaatgtggccgagcacgaaaagctgatcctgctggcccagctgaagcccgagaaggatagcgacgaagccgtgacatatagcctgggaaagtttgggcagagggccctggatttctacagcattcatgtgaccaaggagtccacccaccccgtgaagcccctggcccagatcgccggaaacagatacgcctccggacctgtgggaaaggccctgagcgacgcatgtatgggcacaatcgcctccttcctgtctaagtaccaggacatcatcatcgaacaccagaaggtggtgaagggcaaccagaagagactggagagcctgcgggagctggccggcaaggaaaacctggaataccctagcgtgaccctgccacctcagcctcacaccaaggagggcgttgatgcctacaacgaagtgatcgcccgggtgcgaatgtgggtgaacctgaacctgtggcagaagctgaagctaagcagagatgatgccaagcctctgctgagactgaagggattcccttcctttcctctggtcgagagacaggccaacgaagtggactggtgggacatggtgtgtaacgtgaagaagctgatcaacgagaaaaaggaggatggcaaggtgttttggcagaatctggctggctacaagagacaggaagccctgagaccatacctgagcagcgaggaagatcggaagaagggaaagaaattcgctcggtaccagctgggcgacctgctgctgcacctggaaaagaagcacggcgaggactggggaaaggtgtacgacgaggcctgggagcggattgacaagaaagtggaaggcctgagcaagcacatcaagctggaagaggaacggagaagcgaggacgcccagagcaaggccgccctgaccgactggctgcgggctaaggccagcttcgtgatcgagggcctgaaggaggccgacaaggacgagttctgcagatgcgagctgaagctgcagaagtggtacggggacctgcggggaaagcccttcgccatcgaagccgagaacagcatcctggacatcagcggcttcagcaagcagtacaactgtgccttcatctggcagaaggacggcgtgaagaagctgaacctgtacctgatcatcaactacttcaagggcggcaagctgcggttcaagaagatcaaacctgaagccttcgaagccaacagattctacaccgtgatcaacaaaaagagcggcgagatcgtgcccatggaggtgaacttcaacttcgacgaccccaacctgatcatcctgcctctggcctttggcaagagacagggcagagaattcatctggaacgacctgctgtccctggaaaccggcagcctgaagctggccaacggaagagtgatcgagaagacactgtacaacagaagaacccggcaggatgagcctgccctgttcgtggccctgaccttcgagcggcgggaggtcctggactcctccaatatcaaaccaatgaacctgatcggcgtggcaagaggcgaaaacatccccgccgtgatcgccctgaccgaccccgagggctgcccactgagccggtttaaggatagcctgggaaacccaacccacatcctgagaatcggcgagagctataaggagaagcagcggaccatccaggccaagaaggaggtggagcagcggagagccggcggctacagccggaagtacgccagcaaagccaagaatctggcagacgatatggtgagaaacaccgctagagatctgctgtactacgccgtgacccaggatgccatgctgatcttcgccaacctgagccggggcttcggccggcagggcaagcggaccttcatggccgagagacagtacacacggatggaggactggctgaccgccaagctggcctacgagggcctgagcaagacctacctgtccaagacactggcccagtacacctccaagacatgcagcaactgtgggtttaccatcaccagcgccgactacgacagggtgctggagaagctgaagaagacagcaacaggctggatgaccacaattaacggcaaggagctgaaggtggagggccagattacctactacaacagatacaagagacagaacgtagtcaaggacctgtccgtcgagctggatagactgagcgaagaatctgtgaacaacgacatctcctcctggacaaagggcagaagcggagaagctctgagcctcctgaagaaaagattctcccatagacccgtgcaggagaagttcgtgtgcctgaactgcggcttcgagacacacgcagccgagcaagccgccctgaacatcgccagatcctggctgttcctgcggagccaggagtacaagaaataccagacaaacaagacaaccggcaacaccgataagagagccttcgtcgagacctggcagtccttttaccggaagaagcttaaggaggtgtggaaacctgccgtgcggtctggcggatctggcggaggctccacaagcgcccagggccacgtgaccttcgaggacgtggccgtgtacttcagctgggaggagtggggcctgctggacgaggcccagaggctgctgtacagggacgtgatgctggagaacttcagcctgatggccagcctgggcctggccagcagcatgacccacgagatcacccagctggagtggtggagggagcccttcctgcccccctgcggcgtgatgaccgccgccatgcccagggacggcaggcagaccagccccaagaaaaagagaaaagtctaagctgccttctgcggggcttgccttctggccatgcccttcttctctcccttgcacctgtacctcttggtctttgaataaagcctgagtaggaaggctagcaaaaaaaaaaaaaaaaaaaaaaaaaaaaaaaaaaaaaaaaaaaaaaaaaaaaaaaaaaaaaaaaaaaaaaaaaaaaaaaa

SEQ ID NO: 7092 - RNA, 5797 nt, synthetic construct
  source 1..5797: mol_type = other RNA
aggaaataagagagaaaagaagagtaagaagaaatataagagccaccatggcccctaagaagaagcgtaaagtgagccggatggaacgcctcgtctacgaggtgcggcagaagtgcagaaacatcgaggacatctgcatctcctgcggatctctgaacgtgaccctggagcacccactgttcatcggcggcatgtgccagaactgtaaaaactgttttctggagtgtgcctatcaatacgacgatgacggctaccagagctactgcaccatctgttgcggcggaagagaggtgctgatgtgtggaaataacaactgctgccggtgcttctgcgtggaatgcgtggacctgctggtgggccccggcgccgcccaggccgctattaaggaagatccttggaactgctacatgtgcggccacaagggcacatacggcctgctgagacggagagaggactggcctagcagactgcagatgttcttcgccaataaccacgaccaggagttcgacccccctaaggtgtaccctcccgtccccgccgagaagagaaagcccatccgggtcctgagcctgttcgatggcatcgccaccggtctgctggtgctgaaggacctgggcatccaggtggataggtacattgcctccgaggtgtgcgaggactccatcaccgtgggaatggtgcgtcatcagggcaagatcatgtacgtgggcgacgtgcggagcgtgacacagaagcatatccaggagtggggccctttcgacctggtgatcggcggcagcccttgcaatgacctgagcatcgtgaacccagcccggaagggcctgtacgagggaaccggcagactgttcttcgagttttacagactgctgcacgacgcccggcctaaggaaggcgacgaccggcccttcttttggctgttcgagaatgtggtggccatgggagtcagcgacaagcgggatattagccggttcctggagagcaaccccgtgatgatcgatgccaaggaagtgagcgccgcccaccgggccagatacttctggggcaatctgcctggcatgaacagacccctggccagcaccgtgaacgacaagctggagctgcaggagtgcctggagcacggccggatcgccaagttcagcaaggtgagaaccatcaccacccgaagcaacagcatcaaacaaggcaaggaccagcactttcctgtgttcatgaacgagaaggaggacatcctgtggtgtaccgagatggagagagtgttcgggttcccagtccactacacagatgtcagcaacatgtctagactggccagacagagactgctgggaagaagctggtccgtccctgtgatcagacacctgttcgcccctctgaaggagtacttcgcctgcgtgagcagcggcaacagcaacgccaacagccggggccccagcttctctagcggcctggtgccactgtccctgagagggagccacatgggccccatggagatctacaaaaccgtgagcgcctggaagcggcagcctgtgcgcgtgctgagcctgtttcggaatatcgataaagtcctgaaaagcctgggattcctggagagcggctctggctccggcggtggcaccctgaagtacgtggaggatgtgacaaacgtggtcagacgggatgtggagaagtggggccccttcgatctggtgtacggcagcacccaacccctgggcagctcttgtgaccggtgccctggctggtacatgtttcagttccaccggatcctgcagtacgccctgccgagacaggagtcccagcggccattcttttggattttcatggacaacttgctgctgaccgaggatgaccaggaaactaccactcggttcctgcagaccgaagccgtgaccctgcaggacgtgagaggccgggactaccagaacgccatgcgggtgtggtccaacatccctggactgaaaagcaagcacgcacctctgacccctaaagaagaggagtacctgcaggcccaggtgcggagcagaagcaagctggacgcccctaaggtggatctgctggtgaagaattgcctcctgcccctgagagagtacttcaagtatttcagccagaatagtctgcccctgggcggcccaagcagcggcgcccctcctcccagcggcggcagcccagccggctccccaacctctaccgaggagggcacctctgagtccgccacccccgagagcggccctggcacctccaccgagcccagcgagggcagcgcacccggcagccctgccggcagccccacctccacagaggagggaaccagcaccgagcccagcgaaggcagcgccccaggcaccagcaccgagcctagtgagggcggctctggcggcggcagcgcccaggagattaaacggatcaacaagatcagaagaagacttgtgaaagacagcaacaccaagaaggccggcaagacaggccccatgaaaaccctgctggttagagtgatgacacccgatctgagagagcggctggaaaacctgagaaagaagcctgaaaatatcccccagcccatcagcaatacatctagagccaacctgaataagctgctgaccgattacaccgaaatgaagaaggcgatcctgcatgtgtactgggaagagttccagaaggaccctgtgggcctgatgagccgggtggcccagcctgccagcaagaagatcgatcagaacaagctgaaacctgagatggacgagaagggcaacctgaccaccgccggctttgcctgctctcagtgtggccagcccctgttcgtgtacaagctggagcaggtgtctgagaagggcaaggcttacaccaactacttcggacggtgcaatgtggccgagcacgaaaagctgatcctgctggcccagctgaagcccgagaaggatagcgacgaagccgtgacatatagcctgggaaagtttgggcagagggccctggatttctacagcattcatgtgaccaaggagtccacccaccccgtgaagcccctggcccagatcgccggaaacagatacgcctccggacctgtgggaaaggccctgagcgacgcatgtatgggcacaatcgcctccttcctgtctaagtaccaggacatcatcatcgaacaccagaaggtggtgaagggcaaccagaagagactggagagcctgcgggagctggccggcaaggaaaacctggaataccctagcgtgaccctgccacctcagcctcacaccaaggagggcgttgatgcctacaacgaagtgatcgcccgggtgcgaatgtgggtgaacctgaacctgtggcagaagctgaagctaagcagagatgatgccaagcctctgctgagactgaagggattcccttcctttcctctggtcgagagacaggccaacgaagtggactggtgggacatggtgtgtaacgtgaagaagctgatcaacgagaaaaaggaggatggcaaggtgttttggcagaatctggctggctacaagagacaggaagccctgagaccatacctgagcagcgaggaagatcggaagaagggaaagaaattcgctcggtaccagctgggcgacctgctgctgcacctggaaaagaagcacggcgaggactggggaaaggtgtacgacgaggcctgggagcggattgacaagaaagtggaaggcctgagcaagcacatcaagctggaagaggaacggagaagcgaggacgcccagagcaaggccgccctgaccgactggctgcgggctaaggccagcttcgtgatcgagggcctgaaggaggccgacaaggacgagttctgcagatgcgagctgaagctgcagaagtggtacggggacctgcggggaaagcccttcgccatcgaagccgagaacagcatcctggacatcagcggcttcagcaagcagtacaactgtgccttcatctggcagaaggacggcgtgaagaagctgaacctgtacctgatcatcaactacttcaagggcggcaagctgcggttcaagaagatcaaacctgaagccttcgaagccaacagattctacaccgtgatcaacaaaaagagcggcgagatcgtgcccatggaggtgaacttcaacttcgacgaccccaacctgatcatcctgcctctggcctttggcaagagacagggcagagaattcatctggaacgacctgctgtccctggaaaccggcagcctgaagctggccaacggaagagtgatcgagaagacactgtacaacagaagaacccggcaggatgagcctgccctgttcgtggccctgaccttcgagcggcgggaggtcctggactcctccaatatcaaaccaatgaacctgatcggcgtggcaagaggcgaaaacatccccgccgtgatcgccctgaccgaccccgagggctgcccactgagccggtttaaggatagcctgggaaacccaacccacatcctgagaatcggcgagagctataaggagaagcagcggaccatccaggccaagaaggaggtggagcagcggagagccggcggctacagccggaagtacgccagcaaagccaagaatctggcagacgatatggtgagaaacaccgctagagatctgctgtactacgccgtgacccaggatgccatgctgatcttcgccaacctgagccggggcttcggccggcagggcaagcggaccttcatggccgagagacagtacacacggatggaggactggctgaccgccaagctggcctacgagggcctgagcaagacctacctgtccaagacactggcccagtacacctccaagacatgcagcaactgtgggtttaccatcaccagcgccgactacgacagggtgctggagaagctgaagaagacagcaacaggctggatgaccacaattaacggcaaggagctgaaggtggagggccagattacctactacaacagatacaagagacagaacgtagtcaaggacctgtccgtcgagctggatagactgagcgaagaatctgtgaacaacgacatctcctcctggacaaagggcagaagcggagaagctctgagcctcctgaagaaaagattctcccatagacccgtgcaggagaagttcgtgtgcctgaactgcggcttcgagacacacgcagccgagcaagccgccctgaacatcgccagatcctggctgttcctgcggagccaggagtacaagaaataccagacaaacaagacaaccggcaacaccgataagagagccttcgtcgagacctggcagtccttttaccggaagaagcttaaggaggtgtggaaacctgccgtgcggtctggcggatctggcggaggctccacaagcatggcccccggcctgctgaccaccagggaggaggccctgatggccttcagggacgtggccgtggccttcacccagaaggagtggaagctgctgagcagcgcccagaggaccctgtacagggaggtgatgctggagaactacagccacctggtgagcctgggcatcgccttcagcaagcccaagctgatcgagcagctggagcagggcaacgagccctggagggaggagaacgagcacctgctgaccagccccaagaaaaagagaaaagtctaagctgccttctgcggggcttgccttctggccatgcccttcttctctcccttgcacctgtacctcttggtctttgaataaagcctgagtaggaaggctagcaaaaaaaaaaaaaaaaaaaaaaaaaaaaaaaaaaaaaaaaaaaaaaaaaaaaaaaaaaaaaaaaaaaaaaaaaaaaaaaa

SEQ ID NO: 7093 - RNA, 5797 nt, synthetic construct
  source 1..5797: mol_type = other RNA
aggaaataagagagaaaagaagagtaagaagaaatataagagccaccatggcccctaagaagaagcgtaaagtgagccggatggaacgcctcgtctacgaggtgcggcagaagtgcagaaacatcgaggacatctgcatctcctgcggatctctgaacgtgaccctggagcacccactgttcatcggcggcatgtgccagaactgtaaaaactgttttctggagtgtgcctatcaatacgacgatgacggctaccagagctactgcaccatctgttgcggcggaagagaggtgctgatgtgtggaaataacaactgctgccggtgcttctgcgtggaatgcgtggacctgctggtgggccccggcgccgcccaggccgctattaaggaagatccttggaactgctacatgtgcggccacaagggcacatacggcctgctgagacggagagaggactggcctagcagactgcagatgttcttcgccaataaccacgaccaggagttcgacccccctaaggtgtaccctcccgtccccgccgagaagagaaagcccatccgggtcctgagcctgttcgatggcatcgccaccggtctgctggtgctgaaggacctgggcatccaggtggataggtacattgcctccgaggtgtgcgaggactccatcaccgtgggaatggtgcgtcatcagggcaagatcatgtacgtgggcgacgtgcggagcgtgacacagaagcatatccaggagtggggccctttcgacctggtgatcggcggcagcccttgcaatgacctgagcatcgtgaacccagcccggaagggcctgtacgagggaaccggcagactgttcttcgagttttacagactgctgcacgacgcccggcctaaggaaggcgacgaccggcccttcttttggctgttcgagaatgtggtggccatgggagtcagcgacaagcgggatattagccggttcctggagagcaaccccgtgatgatcgatgccaaggaagtgagcgccgcccaccgggccagatacttctggggcaatctgcctggcatgaacagacccctggccagcaccgtgaacgacaagctggagctgcaggagtgcctggagcacggccggatcgccaagttcagcaaggtgagaaccatcaccacccgaagcaacagcatcaaacaaggcaaggaccagcactttcctgtgttcatgaacgagaaggaggacatcctgtggtgtaccgagatggagagagtgttcgggttcccagtccactacacagatgtcagcaacatgtctagactggccagacagagactgctgggaagaagctggtccgtccctgtgatcagacacctgttcgcccctctgaaggagtacttcgcctgcgtgagcagcggcaacagcaacgccaacagccggggccccagcttctctagcggcctggtgccactgtccctgagagggagccacatgggccccatggagatctacaaaaccgtgagcgcctggaagcggcagcctgtgcgcgtgctgagcctgtttcggaatatcgataaagtcctgaaaagcctgggattcctggagagcggctctggctccggcggtggcaccctgaagtacgtggaggatgtgacaaacgtggtcagacgggatgtggagaagtggggccccttcgatctggtgtacggcagcacccaacccctgggcagctcttgtgaccggtgccctggctggtacatgtttcagttccaccggatcctgcagtacgccctgccgagacaggagtcccagcggccattcttttggattttcatggacaacttgctgctgaccgaggatgaccaggaaactaccactcggttcctgcagaccgaagccgtgaccctgcaggacgtgagaggccgggactaccagaacgccatgcgggtgtggtccaacatccctggactgaaaagcaagcacgcacctctgacccctaaagaagaggagtacctgcaggcccaggtgcggagcagaagcaagctggacgcccctaaggtggatctgctggtgaagaattgcctcctgcccctgagagagtacttcaagtatttcagccagaatagtctgcccctgggcggcccaagcagcggcgcccctcctcccagcggcggcagcccagccggctccccaacctctaccgaggagggcacctctgagtccgccacccccgagagcggccctggcacctccaccgagcccagcgagggcagcgcacccggcagccctgccggcagccccacctccacagaggagggaaccagcaccgagcccagcgaaggcagcgccccaggcaccagcaccgagcctagtgagggcggctctggcggcggcagcgcccaggagattaaacggatcaacaagatcagaagaagacttgtgaaagacagcaacaccaagaaggccggcaagacaggccccatgaaaaccctgctggttagagtgatgacacccgatctgagagagcggctggaaaacctgagaaagaagcctgaaaatatcccccagcccatcagcaatacatctagagccaacctgaataagctgctgaccgattacaccgaaatgaagaaggcgatcctgcatgtgtactgggaagagttccagaaggaccctgtgggcctgatgagccgggtggcccagcctgccagcaagaagatcgatcagaacaagctgaaacctgagatggacgagaagggcaacctgaccaccgccggctttgcctgctctcagtgtggccagcccctgttcgtgtacaagctggagcaggtgtctgagaagggcaaggcttacaccaactacttcggacggtgcaatgtggccgagcacgaaaagctgatcctgctggcccagctgaagcccgagaaggatagcgacgaagccgtgacatatagcctgggaaagtttgggcagagggccctggatttctacagcattcatgtgaccaaggagtccacccaccccgtgaagcccctggcccagatcgccggaaacagatacgcctccggacctgtgggaaaggccctgagcgacgcatgtatgggcacaatcgcctccttcctgtctaagtaccaggacatcatcatcgaacaccagaaggtggtgaagggcaaccagaagagactggagagcctgcgggagctggccggcaaggaaaacctggaataccctagcgtgaccctgccacctcagcctcacaccaaggagggcgttgatgcctacaacgaagtgatcgcccgggtgcgaatgtgggtgaacctgaacctgtggcagaagctgaagctaagcagagatgatgccaagcctctgctgagactgaagggattcccttcctttcctctggtcgagagacaggccaacgaagtggactggtgggacatggtgtgtaacgtgaagaagctgatcaacgagaaaaaggaggatggcaaggtgttttggcagaatctggctggctacaagagacaggaagccctgagaccatacctgagcagcgaggaagatcggaagaagggaaagaaattcgctcggtaccagctgggcgacctgctgctgcacctggaaaagaagcacggcgaggactggggaaaggtgtacgacgaggcctgggagcggattgacaagaaagtggaaggcctgagcaagcacatcaagctggaagaggaacggagaagcgaggacgcccagagcaaggccgccctgaccgactggctgcgggctaaggccagcttcgtgatcgagggcctgaaggaggccgacaaggacgagttctgcagatgcgagctgaagctgcagaagtggtacggggacctgcggggaaagcccttcgccatcgaagccgagaacagcatcctggacatcagcggcttcagcaagcagtacaactgtgccttcatctggcagaaggacggcgtgaagaagctgaacctgtacctgatcatcaactacttcaagggcggcaagctgcggttcaagaagatcaaacctgaagccttcgaagccaacagattctacaccgtgatcaacaaaaagagcggcgagatcgtgcccatggaggtgaacttcaacttcgacgaccccaacctgatcatcctgcctctggcctttggcaagagacagggcagagaattcatctggaacgacctgctgtccctggaaaccggcagcctgaagctggccaacggaagagtgatcgagaagacactgtacaacagaagaacccggcaggatgagcctgccctgttcgtggccctgaccttcgagcggcgggaggtcctggactcctccaatatcaaaccaatgaacctgatcggcgtggcaagaggcgaaaacatccccgccgtgatcgccctgaccgaccccgagggctgcccactgagccggtttaaggatagcctgggaaacccaacccacatcctgagaatcggcgagagctataaggagaagcagcggaccatccaggccaagaaggaggtggagcagcggagagccggcggctacagccggaagtacgccagcaaagccaagaatctggcagacgatatggtgagaaacaccgctagagatctgctgtactacgccgtgacccaggatgccatgctgatcttcgccaacctgagccggggcttcggccggcagggcaagcggaccttcatggccgagagacagtacacacggatggaggactggctgaccgccaagctggcctacgagggcctgagcaagacctacctgtccaagacactggcccagtacacctccaagacatgcagcaactgtgggtttaccatcaccagcgccgactacgacagggtgctggagaagctgaagaagacagcaacaggctggatgaccacaattaacggcaaggagctgaaggtggagggccagattacctactacaacagatacaagagacagaacgtagtcaaggacctgtccgtcgagctggatagactgagcgaagaatctgtgaacaacgacatctcctcctggacaaagggcagaagcggagaagctctgagcctcctgaagaaaagattctcccatagacccgtgcaggagaagttcgtgtgcctgaactgcggcttcgagacacacgcagccgagcaagccgccctgaacatcgccagatcctggctgttcctgcggagccaggagtacaagaaataccagacaaacaagacaaccggcaacaccgataagagagccttcgtcgagacctggcagtccttttaccggaagaagcttaaggaggtgtggaaacctgccgtgcggtctggcggatctggcggaggctccacaagcaagccctgggccgtgaacttcgccgacgtggccgtgtacttcagccccgaggagtggaggtacctgaggcccgcccagagggccctgtacagggaggtgatgagggagacctacggcctgctggcctacctggacgtgggctgcgccaagcccgccctgatctgctgggtggaggaggagagcgaggtgtggggcccctgcgcccaggaccccgaggtggccatgtgcaggaccgaggtgcacaccagccccaagaaaaagagaaaagtctaagctgccttctgcggggcttgccttctggccatgcccttcttctctcccttgcacctgtacctcttggtctttgaataaagcctgagtaggaaggctagcaaaaaaaaaaaaaaaaaaaaaaaaaaaaaaaaaaaaaaaaaaaaaaaaaaaaaaaaaaaaaaaaaaaaaaaaaaaaaaaa

SEQ ID NO: 7094 - RNA, 5797 nt, synthetic construct
  source 1..5797: mol_type = other RNA
aggaaataagagagaaaagaagagtaagaagaaatataagagccaccatggcccctaagaagaagcgtaaagtgagccggatggaacgcctcgtctacgaggtgcggcagaagtgcagaaacatcgaggacatctgcatctcctgcggatctctgaacgtgaccctggagcacccactgttcatcggcggcatgtgccagaactgtaaaaactgttttctggagtgtgcctatcaatacgacgatgacggctaccagagctactgcaccatctgttgcggcggaagagaggtgctgatgtgtggaaataacaactgctgccggtgcttctgcgtggaatgcgtggacctgctggtgggccccggcgccgcccaggccgctattaaggaagatccttggaactgctacatgtgcggccacaagggcacatacggcctgctgagacggagagaggactggcctagcagactgcagatgttcttcgccaataaccacgaccaggagttcgacccccctaaggtgtaccctcccgtccccgccgagaagagaaagcccatccgggtcctgagcctgttcgatggcatcgccaccggtctgctggtgctgaaggacctgggcatccaggtggataggtacattgcctccgaggtgtgcgaggactccatcaccgtgggaatggtgcgtcatcagggcaagatcatgtacgtgggcgacgtgcggagcgtgacacagaagcatatccaggagtggggccctttcgacctggtgatcggcggcagcccttgcaatgacctgagcatcgtgaacccagcccggaagggcctgtacgagggaaccggcagactgttcttcgagttttacagactgctgcacgacgcccggcctaaggaaggcgacgaccggcccttcttttggctgttcgagaatgtggtggccatgggagtcagcgacaagcgggatattagccggttcctggagagcaaccccgtgatgatcgatgccaaggaagtgagcgccgcccaccgggccagatacttctggggcaatctgcctggcatgaacagacccctggccagcaccgtgaacgacaagctggagctgcaggagtgcctggagcacggccggatcgccaagttcagcaaggtgagaaccatcaccacccgaagcaacagcatcaaacaaggcaaggaccagcactttcctgtgttcatgaacgagaaggaggacatcctgtggtgtaccgagatggagagagtgttcgggttcccagtccactacacagatgtcagcaacatgtctagactggccagacagagactgctgggaagaagctggtccgtccctgtgatcagacacctgttcgcccctctgaaggagtacttcgcctgcgtgagcagcggcaacagcaacgccaacagccggggccccagcttctctagcggcctggtgccactgtccctgagagggagccacatgggccccatggagatctacaaaaccgtgagcgcctggaagcggcagcctgtgcgcgtgctgagcctgtttcggaatatcgataaagtcctgaaaagcctgggattcctggagagcggctctggctccggcggtggcaccctgaagtacgtggaggatgtgacaaacgtggtcagacgggatgtggagaagtggggccccttcgatctggtgtacggcagcacccaacccctgggcagctcttgtgaccggtgccctggctggtacatgtttcagttccaccggatcctgcagtacgccctgccgagacaggagtcccagcggccattcttttggattttcatggacaacttgctgctgaccgaggatgaccaggaaactaccactcggttcctgcagaccgaagccgtgaccctgcaggacgtgagaggccgggactaccagaacgccatgcgggtgtggtccaacatccctggactgaaaagcaagcacgcacctctgacccctaaagaagaggagtacctgcaggcccaggtgcggagcagaagcaagctggacgcccctaaggtggatctgctggtgaagaattgcctcctgcccctgagagagtacttcaagtatttcagccagaatagtctgcccctgggcggcccaagcagcggcgcccctcctcccagcggcggcagcccagccggctccccaacctctaccgaggagggcacctctgagtccgccacccccgagagcggccctggcacctccaccgagcccagcgagggcagcgcacccggcagccctgccggcagccccacctccacagaggagggaaccagcaccgagcccagcgaaggcagcgccccaggcaccagcaccgagcctagtgagggcggctctggcggcggcagcgcccaggagattaaacggatcaacaagatcagaagaagacttgtgaaagacagcaacaccaagaaggccggcaagacaggccccatgaaaaccctgctggttagagtgatgacacccgatctgagagagcggctggaaaacctgagaaagaagcctgaaaatatcccccagcccatcagcaatacatctagagccaacctgaataagctgctgaccgattacaccgaaatgaagaaggcgatcctgcatgtgtactgggaagagttccagaaggaccctgtgggcctgatgagccgggtggcccagcctgccagcaagaagatcgatcagaacaagctgaaacctgagatggacgagaagggcaacctgaccaccgccggctttgcctgctctcagtgtggccagcccctgttcgtgtacaagctggagcaggtgtctgagaagggcaaggcttacaccaactacttcggacggtgcaatgtggccgagcacgaaaagctgatcctgctggcccagctgaagcccgagaaggatagcgacgaagccgtgacatatagcctgggaaagtttgggcagagggccctggatttctacagcattcatgtgaccaaggagtccacccaccccgtgaagcccctggcccagatcgccggaaacagatacgcctccggacctgtgggaaaggccctgagcgacgcatgtatgggcacaatcgcctccttcctgtctaagtaccaggacatcatcatcgaacaccagaaggtggtgaagggcaaccagaagagactggagagcctgcgggagctggccggcaaggaaaacctggaataccctagcgtgaccctgccacctcagcctcacaccaaggagggcgttgatgcctacaacgaagtgatcgcccgggtgcgaatgtgggtgaacctgaacctgtggcagaagctgaagctaagcagagatgatgccaagcctctgctgagactgaagggattcccttcctttcctctggtcgagagacaggccaacgaagtggactggtgggacatggtgtgtaacgtgaagaagctgatcaacgagaaaaaggaggatggcaaggtgttttggcagaatctggctggctacaagagacaggaagccctgagaccatacctgagcagcgaggaagatcggaagaagggaaagaaattcgctcggtaccagctgggcgacctgctgctgcacctggaaaagaagcacggcgaggactggggaaaggtgtacgacgaggcctgggagcggattgacaagaaagtggaaggcctgagcaagcacatcaagctggaagaggaacggagaagcgaggacgcccagagcaaggccgccctgaccgactggctgcgggctaaggccagcttcgtgatcgagggcctgaaggaggccgacaaggacgagttctgcagatgcgagctgaagctgcagaagtggtacggggacctgcggggaaagcccttcgccatcgaagccgagaacagcatcctggacatcagcggcttcagcaagcagtacaactgtgccttcatctggcagaaggacggcgtgaagaagctgaacctgtacctgatcatcaactacttcaagggcggcaagctgcggttcaagaagatcaaacctgaagccttcgaagccaacagattctacaccgtgatcaacaaaaagagcggcgagatcgtgcccatggaggtgaacttcaacttcgacgaccccaacctgatcatcctgcctctggcctttggcaagagacagggcagagaattcatctggaacgacctgctgtccctggaaaccggcagcctgaagctggccaacggaagagtgatcgagaagacactgtacaacagaagaacccggcaggatgagcctgccctgttcgtggccctgaccttcgagcggcgggaggtcctggactcctccaatatcaaaccaatgaacctgatcggcgtggcaagaggcgaaaacatccccgccgtgatcgccctgaccgaccccgagggctgcccactgagccggtttaaggatagcctgggaaacccaacccacatcctgagaatcggcgagagctataaggagaagcagcggaccatccaggccaagaaggaggtggagcagcggagagccggcggctacagccggaagtacgccagcaaagccaagaatctggcagacgatatggtgagaaacaccgctagagatctgctgtactacgccgtgacccaggatgccatgctgatcttcgccaacctgagccggggcttcggccggcagggcaagcggaccttcatggccgagagacagtacacacggatggaggactggctgaccgccaagctggcctacgagggcctgagcaagacctacctgtccaagacactggcccagtacacctccaagacatgcagcaactgtgggtttaccatcaccagcgccgactacgacagggtgctggagaagctgaagaagacagcaacaggctggatgaccacaattaacggcaaggagctgaaggtggagggccagattacctactacaacagatacaagagacagaacgtagtcaaggacctgtccgtcgagctggatagactgagcgaagaatctgtgaacaacgacatctcctcctggacaaagggcagaagcggagaagctctgagcctcctgaagaaaagattctcccatagacccgtgcaggagaagttcgtgtgcctgaactgcggcttcgagacacacgcagccgagcaagccgccctgaacatcgccagatcctggctgttcctgcggagccaggagtacaagaaataccagacaaacaagacaaccggcaacaccgataagagagccttcgtcgagacctggcagtccttttaccggaagaagcttaaggaggtgtggaaacctgccgtgcggtctggcggatctggcggaggctccacaagcagccagatccccctgaccttccaggacgtggccgtggacttcacctgggaggagtggggcctgctggagcccagccagaaggacatgtactgggacgtgatgctggagaactacgagaacttcgtgagcctgggcggcatccccgtgagcttccccgacgtgatcagccagatggagaggatcgaggccccctggatgaccgagaggggcgtgctggtgagcgccttcctggacagccccaacaccagccccaagaaaaagagaaaagtctaagctgccttctgcggggcttgccttctggccatgcccttcttctctcccttgcacctgtacctcttggtctttgaataaagcctgagtaggaaggctagcaaaaaaaaaaaaaaaaaaaaaaaaaaaaaaaaaaaaaaaaaaaaaaaaaaaaaaaaaaaaaaaaaaaaaaaaaaaaaaaa

SEQ ID NO: 7095 - RNA, 5797 nt, synthetic construct
  source 1..5797: mol_type = other RNA
aggaaataagagagaaaagaagagtaagaagaaatataagagccaccatggcccctaagaagaagcgtaaagtgagccggatggaacgcctcgtctacgaggtgcggcagaagtgcagaaacatcgaggacatctgcatctcctgcggatctctgaacgtgaccctggagcacccactgttcatcggcggcatgtgccagaactgtaaaaactgttttctggagtgtgcctatcaatacgacgatgacggctaccagagctactgcaccatctgttgcggcggaagagaggtgctgatgtgtggaaataacaactgctgccggtgcttctgcgtggaatgcgtggacctgctggtgggccccggcgccgcccaggccgctattaaggaagatccttggaactgctacatgtgcggccacaagggcacatacggcctgctgagacggagagaggactggcctagcagactgcagatgttcttcgccaataaccacgaccaggagttcgacccccctaaggtgtaccctcccgtccccgccgagaagagaaagcccatccgggtcctgagcctgttcgatggcatcgccaccggtctgctggtgctgaaggacctgggcatccaggtggataggtacattgcctccgaggtgtgcgaggactccatcaccgtgggaatggtgcgtcatcagggcaagatcatgtacgtgggcgacgtgcggagcgtgacacagaagcatatccaggagtggggccctttcgacctggtgatcggcggcagcccttgcaatgacctgagcatcgtgaacccagcccggaagggcctgtacgagggaaccggcagactgttcttcgagttttacagactgctgcacgacgcccggcctaaggaaggcgacgaccggcccttcttttggctgttcgagaatgtggtggccatgggagtcagcgacaagcgggatattagccggttcctggagagcaaccccgtgatgatcgatgccaaggaagtgagcgccgcccaccgggccagatacttctggggcaatctgcctggcatgaacagacccctggccagcaccgtgaacgacaagctggagctgcaggagtgcctggagcacggccggatcgccaagttcagcaaggtgagaaccatcaccacccgaagcaacagcatcaaacaaggcaaggaccagcactttcctgtgttcatgaacgagaaggaggacatcctgtggtgtaccgagatggagagagtgttcgggttcccagtccactacacagatgtcagcaacatgtctagactggccagacagagactgctgggaagaagctggtccgtccctgtgatcagacacctgttcgcccctctgaaggagtacttcgcctgcgtgagcagcggcaacagcaacgccaacagccggggccccagcttctctagcggcctggtgccactgtccctgagagggagccacatgggccccatggagatctacaaaaccgtgagcgcctggaagcggcagcctgtgcgcgtgctgagcctgtttcggaatatcgataaagtcctgaaaagcctgggattcctggagagcggctctggctccggcggtggcaccctgaagtacgtggaggatgtgacaaacgtggtcagacgggatgtggagaagtggggccccttcgatctggtgtacggcagcacccaacccctgggcagctcttgtgaccggtgccctggctggtacatgtttcagttccaccggatcctgcagtacgccctgccgagacaggagtcccagcggccattcttttggattttcatggacaacttgctgctgaccgaggatgaccaggaaactaccactcggttcctgcagaccgaagccgtgaccctgcaggacgtgagaggccgggactaccagaacgccatgcgggtgtggtccaacatccctggactgaaaagcaagcacgcacctctgacccctaaagaagaggagtacctgcaggcccaggtgcggagcagaagcaagctggacgcccctaaggtggatctgctggtgaagaattgcctcctgcccctgagagagtacttcaagtatttcagccagaatagtctgcccctgggcggcccaagcagcggcgcccctcctcccagcggcggcagcccagccggctccccaacctctaccgaggagggcacctctgagtccgccacccccgagagcggccctggcacctccaccgagcccagcgagggcagcgcacccggcagccctgccggcagccccacctccacagaggagggaaccagcaccgagcccagcgaaggcagcgccccaggcaccagcaccgagcctagtgagggcggctctggcggcggcagcgcccaggagattaaacggatcaacaagatcagaagaagacttgtgaaagacagcaacaccaagaaggccggcaagacaggccccatgaaaaccctgctggttagagtgatgacacccgatctgagagagcggctggaaaacctgagaaagaagcctgaaaatatcccccagcccatcagcaatacatctagagccaacctgaataagctgctgaccgattacaccgaaatgaagaaggcgatcctgcatgtgtactgggaagagttccagaaggaccctgtgggcctgatgagccgggtggcccagcctgccagcaagaagatcgatcagaacaagctgaaacctgagatggacgagaagggcaacctgaccaccgccggctttgcctgctctcagtgtggccagcccctgttcgtgtacaagctggagcaggtgtctgagaagggcaaggcttacaccaactacttcggacggtgcaatgtggccgagcacgaaaagctgatcctgctggcccagctgaagcccgagaaggatagcgacgaagccgtgacatatagcctgggaaagtttgggcagagggccctggatttctacagcattcatgtgaccaaggagtccacccaccccgtgaagcccctggcccagatcgccggaaacagatacgcctccggacctgtgggaaaggccctgagcgacgcatgtatgggcacaatcgcctccttcctgtctaagtaccaggacatcatcatcgaacaccagaaggtggtgaagggcaaccagaagagactggagagcctgcgggagctggccggcaaggaaaacctggaataccctagcgtgaccctgccacctcagcctcacaccaaggagggcgttgatgcctacaacgaagtgatcgcccgggtgcgaatgtgggtgaacctgaacctgtggcagaagctgaagctaagcagagatgatgccaagcctctgctgagactgaagggattcccttcctttcctctggtcgagagacaggccaacgaagtggactggtgggacatggtgtgtaacgtgaagaagctgatcaacgagaaaaaggaggatggcaaggtgttttggcagaatctggctggctacaagagacaggaagccctgagaccatacctgagcagcgaggaagatcggaagaagggaaagaaattcgctcggtaccagctgggcgacctgctgctgcacctggaaaagaagcacggcgaggactggggaaaggtgtacgacgaggcctgggagcggattgacaagaaagtggaaggcctgagcaagcacatcaagctggaagaggaacggagaagcgaggacgcccagagcaaggccgccctgaccgactggctgcgggctaaggccagcttcgtgatcgagggcctgaaggaggccgacaaggacgagttctgcagatgcgagctgaagctgcagaagtggtacggggacctgcggggaaagcccttcgccatcgaagccgagaacagcatcctggacatcagcggcttcagcaagcagtacaactgtgccttcatctggcagaaggacggcgtgaagaagctgaacctgtacctgatcatcaactacttcaagggcggcaagctgcggttcaagaagatcaaacctgaagccttcgaagccaacagattctacaccgtgatcaacaaaaagagcggcgagatcgtgcccatggaggtgaacttcaacttcgacgaccccaacctgatcatcctgcctctggcctttggcaagagacagggcagagaattcatctggaacgacctgctgtccctggaaaccggcagcctgaagctggccaacggaagagtgatcgagaagacactgtacaacagaagaacccggcaggatgagcctgccctgttcgtggccctgaccttcgagcggcgggaggtcctggactcctccaatatcaaaccaatgaacctgatcggcgtggcaagaggcgaaaacatccccgccgtgatcgccctgaccgaccccgagggctgcccactgagccggtttaaggatagcctgggaaacccaacccacatcctgagaatcggcgagagctataaggagaagcagcggaccatccaggccaagaaggaggtggagcagcggagagccggcggctacagccggaagtacgccagcaaagccaagaatctggcagacgatatggtgagaaacaccgctagagatctgctgtactacgccgtgacccaggatgccatgctgatcttcgccaacctgagccggggcttcggccggcagggcaagcggaccttcatggccgagagacagtacacacggatggaggactggctgaccgccaagctggcctacgagggcctgagcaagacctacctgtccaagacactggcccagtacacctccaagacatgcagcaactgtgggtttaccatcaccagcgccgactacgacagggtgctggagaagctgaagaagacagcaacaggctggatgaccacaattaacggcaaggagctgaaggtggagggccagattacctactacaacagatacaagagacagaacgtagtcaaggacctgtccgtcgagctggatagactgagcgaagaatctgtgaacaacgacatctcctcctggacaaagggcagaagcggagaagctctgagcctcctgaagaaaagattctcccatagacccgtgcaggagaagttcgtgtgcctgaactgcggcttcgagacacacgcagccgagcaagccgccctgaacatcgccagatcctggctgttcctgcggagccaggagtacaagaaataccagacaaacaagacaaccggcaacaccgataagagagccttcgtcgagacctggcagtccttttaccggaagaagcttaaggaggtgtggaaacctgccgtgcggtctggcggatctggcggaggctccacaagcttccaggaggccgtgaccttcaaggacgtggccgtggccttcaccgaggaggagctgggcctgctggacagcgcccagaggaagctgtacagggacgtgatgctggagaacttcaggaacctggtgagcgtgggccaccagagcttcaagcccgacatgatcagccagctggagagggaggagaagctgtggatgaaggagttccagacccagaggggcaagcacagcggcttcctgtgcttcaccagccccaagaaaaagagaaaagtctaagctgccttctgcggggcttgccttctggccatgcccttcttctctcccttgcacctgtacctcttggtctttgaataaagcctgagtaggaaggctagcaaaaaaaaaaaaaaaaaaaaaaaaaaaaaaaaaaaaaaaaaaaaaaaaaaaaaaaaaaaaaaaaaaaaaaaaaaaaaaaa

SEQ ID NO: 7096 - RNA, 5797 nt, synthetic construct
  source 1..5797: mol_type = other RNA
aggaaataagagagaaaagaagagtaagaagaaatataagagccaccatggcccctaagaagaagcgtaaagtgagccggatggaacgcctcgtctacgaggtgcggcagaagtgcagaaacatcgaggacatctgcatctcctgcggatctctgaacgtgaccctggagcacccactgttcatcggcggcatgtgccagaactgtaaaaactgttttctggagtgtgcctatcaatacgacgatgacggctaccagagctactgcaccatctgttgcggcggaagagaggtgctgatgtgtggaaataacaactgctgccggtgcttctgcgtggaatgcgtggacctgctggtgggccccggcgccgcccaggccgctattaaggaagatccttggaactgctacatgtgcggccacaagggcacatacggcctgctgagacggagagaggactggcctagcagactgcagatgttcttcgccaataaccacgaccaggagttcgacccccctaaggtgtaccctcccgtccccgccgagaagagaaagcccatccgggtcctgagcctgttcgatggcatcgccaccggtctgctggtgctgaaggacctgggcatccaggtggataggtacattgcctccgaggtgtgcgaggactccatcaccgtgggaatggtgcgtcatcagggcaagatcatgtacgtgggcgacgtgcggagcgtgacacagaagcatatccaggagtggggccctttcgacctggtgatcggcggcagcccttgcaatgacctgagcatcgtgaacccagcccggaagggcctgtacgagggaaccggcagactgttcttcgagttttacagactgctgcacgacgcccggcctaaggaaggcgacgaccggcccttcttttggctgttcgagaatgtggtggccatgggagtcagcgacaagcgggatattagccggttcctggagagcaaccccgtgatgatcgatgccaaggaagtgagcgccgcccaccgggccagatacttctggggcaatctgcctggcatgaacagacccctggccagcaccgtgaacgacaagctggagctgcaggagtgcctggagcacggccggatcgccaagttcagcaaggtgagaaccatcaccacccgaagcaacagcatcaaacaaggcaaggaccagcactttcctgtgttcatgaacgagaaggaggacatcctgtggtgtaccgagatggagagagtgttcgggttcccagtccactacacagatgtcagcaacatgtctagactggccagacagagactgctgggaagaagctggtccgtccctgtgatcagacacctgttcgcccctctgaaggagtacttcgcctgcgtgagcagcggcaacagcaacgccaacagccggggccccagcttctctagcggcctggtgccactgtccctgagagggagccacatgggccccatggagatctacaaaaccgtgagcgcctggaagcggcagcctgtgcgcgtgctgagcctgtttcggaatatcgataaagtcctgaaaagcctgggattcctggagagcggctctggctccggcggtggcaccctgaagtacgtggaggatgtgacaaacgtggtcagacgggatgtggagaagtggggccccttcgatctggtgtacggcagcacccaacccctgggcagctcttgtgaccggtgccctggctggtacatgtttcagttccaccggatcctgcagtacgccctgccgagacaggagtcccagcggccattcttttggattttcatggacaacttgctgctgaccgaggatgaccaggaaactaccactcggttcctgcagaccgaagccgtgaccctgcaggacgtgagaggccgggactaccagaacgccatgcgggtgtggtccaacatccctggactgaaaagcaagcacgcacctctgacccctaaagaagaggagtacctgcaggcccaggtgcggagcagaagcaagctggacgcccctaaggtggatctgctggtgaagaattgcctcctgcccctgagagagtacttcaagtatttcagccagaatagtctgcccctgggcggcccaagcagcggcgcccctcctcccagcggcggcagcccagccggctccccaacctctaccgaggagggcacctctgagtccgccacccccgagagcggccctggcacctccaccgagcccagcgagggcagcgcacccggcagccctgccggcagccccacctccacagaggagggaaccagcaccgagcccagcgaaggcagcgccccaggcaccagcaccgagcctagtgagggcggctctggcggcggcagcgcccaggagattaaacggatcaacaagatcagaagaagacttgtgaaagacagcaacaccaagaaggccggcaagacaggccccatgaaaaccctgctggttagagtgatgacacccgatctgagagagcggctggaaaacctgagaaagaagcctgaaaatatcccccagcccatcagcaatacatctagagccaacctgaataagctgctgaccgattacaccgaaatgaagaaggcgatcctgcatgtgtactgggaagagttccagaaggaccctgtgggcctgatgagccgggtggcccagcctgccagcaagaagatcgatcagaacaagctgaaacctgagatggacgagaagggcaacctgaccaccgccggctttgcctgctctcagtgtggccagcccctgttcgtgtacaagctggagcaggtgtctgagaagggcaaggcttacaccaactacttcggacggtgcaatgtggccgagcacgaaaagctgatcctgctggcccagctgaagcccgagaaggatagcgacgaagccgtgacatatagcctgggaaagtttgggcagagggccctggatttctacagcattcatgtgaccaaggagtccacccaccccgtgaagcccctggcccagatcgccggaaacagatacgcctccggacctgtgggaaaggccctgagcgacgcatgtatgggcacaatcgcctccttcctgtctaagtaccaggacatcatcatcgaacaccagaaggtggtgaagggcaaccagaagagactggagagcctgcgggagctggccggcaaggaaaacctggaataccctagcgtgaccctgccacctcagcctcacaccaaggagggcgttgatgcctacaacgaagtgatcgcccgggtgcgaatgtgggtgaacctgaacctgtggcagaagctgaagctaagcagagatgatgccaagcctctgctgagactgaagggattcccttcctttcctctggtcgagagacaggccaacgaagtggactggtgggacatggtgtgtaacgtgaagaagctgatcaacgagaaaaaggaggatggcaaggtgttttggcagaatctggctggctacaagagacaggaagccctgagaccatacctgagcagcgaggaagatcggaagaagggaaagaaattcgctcggtaccagctgggcgacctgctgctgcacctggaaaagaagcacggcgaggactggggaaaggtgtacgacgaggcctgggagcggattgacaagaaagtggaaggcctgagcaagcacatcaagctggaagaggaacggagaagcgaggacgcccagagcaaggccgccctgaccgactggctgcgggctaaggccagcttcgtgatcgagggcctgaaggaggccgacaaggacgagttctgcagatgcgagctgaagctgcagaagtggtacggggacctgcggggaaagcccttcgccatcgaagccgagaacagcatcctggacatcagcggcttcagcaagcagtacaactgtgccttcatctggcagaaggacggcgtgaagaagctgaacctgtacctgatcatcaactacttcaagggcggcaagctgcggttcaagaagatcaaacctgaagccttcgaagccaacagattctacaccgtgatcaacaaaaagagcggcgagatcgtgcccatggaggtgaacttcaacttcgacgaccccaacctgatcatcctgcctctggcctttggcaagagacagggcagagaattcatctggaacgacctgctgtccctggaaaccggcagcctgaagctggccaacggaagagtgatcgagaagacactgtacaacagaagaacccggcaggatgagcctgccctgttcgtggccctgaccttcgagcggcgggaggtcctggactcctccaatatcaaaccaatgaacctgatcggcgtggcaagaggcgaaaacatccccgccgtgatcgccctgaccgaccccgagggctgcccactgagccggtttaaggatagcctgggaaacccaacccacatcctgagaatcggcgagagctataaggagaagcagcggaccatccaggccaagaaggaggtggagcagcggagagccggcggctacagccggaagtacgccagcaaagccaagaatctggcagacgatatggtgagaaacaccgctagagatctgctgtactacgccgtgacccaggatgccatgctgatcttcgccaacctgagccggggcttcggccggcagggcaagcggaccttcatggccgagagacagtacacacggatggaggactggctgaccgccaagctggcctacgagggcctgagcaagacctacctgtccaagacactggcccagtacacctccaagacatgcagcaactgtgggtttaccatcaccagcgccgactacgacagggtgctggagaagctgaagaagacagcaacaggctggatgaccacaattaacggcaaggagctgaaggtggagggccagattacctactacaacagatacaagagacagaacgtagtcaaggacctgtccgtcgagctggatagactgagcgaagaatctgtgaacaacgacatctcctcctggacaaagggcagaagcggagaagctctgagcctcctgaagaaaagattctcccatagacccgtgcaggagaagttcgtgtgcctgaactgcggcttcgagacacacgcagccgagcaagccgccctgaacatcgccagatcctggctgttcctgcggagccaggagtacaagaaataccagacaaacaagacaaccggcaacaccgataagagagccttcgtcgagacctggcagtccttttaccggaagaagcttaaggaggtgtggaaacctgccgtgcggtctggcggatctggcggaggctccacaagcagcctgggcagcgtgaccttcaccgacgtggccatcgacttcagccaggacgagtgggagtggctgaacctggcccagaggagcctgtacaagaaggtgatgctggagaactacaggaacctggtgagcgtgggcctgtgcatcagcaagcccgtggtgatcagcctgctggagcaggagaaggacccctgggtgatcaagggcggcatgaacaggggcctgtgccccgacctggagtgcgtgaccagccccaagaaaaagagaaaagtctaagctgccttctgcggggcttgccttctggccatgcccttcttctctcccttgcacctgtacctcttggtctttgaataaagcctgagtaggaaggctagcaaaaaaaaaaaaaaaaaaaaaaaaaaaaaaaaaaaaaaaaaaaaaaaaaaaaaaaaaaaaaaaaaaaaaaaaaaaaaaaa

SEQ ID NO: 7097 - RNA, 5797 nt, synthetic construct
  source 1..5797: mol_type = other RNA
aggaaataagagagaaaagaagagtaagaagaaatataagagccaccatggcccctaagaagaagcgtaaagtgagccggatggaacgcctcgtctacgaggtgcggcagaagtgcagaaacatcgaggacatctgcatctcctgcggatctctgaacgtgaccctggagcacccactgttcatcggcggcatgtgccagaactgtaaaaactgttttctggagtgtgcctatcaatacgacgatgacggctaccagagctactgcaccatctgttgcggcggaagagaggtgctgatgtgtggaaataacaactgctgccggtgcttctgcgtggaatgcgtggacctgctggtgggccccggcgccgcccaggccgctattaaggaagatccttggaactgctacatgtgcggccacaagggcacatacggcctgctgagacggagagaggactggcctagcagactgcagatgttcttcgccaataaccacgaccaggagttcgacccccctaaggtgtaccctcccgtccccgccgagaagagaaagcccatccgggtcctgagcctgttcgatggcatcgccaccggtctgctggtgctgaaggacctgggcatccaggtggataggtacattgcctccgaggtgtgcgaggactccatcaccgtgggaatggtgcgtcatcagggcaagatcatgtacgtgggcgacgtgcggagcgtgacacagaagcatatccaggagtggggccctttcgacctggtgatcggcggcagcccttgcaatgacctgagcatcgtgaacccagcccggaagggcctgtacgagggaaccggcagactgttcttcgagttttacagactgctgcacgacgcccggcctaaggaaggcgacgaccggcccttcttttggctgttcgagaatgtggtggccatgggagtcagcgacaagcgggatattagccggttcctggagagcaaccccgtgatgatcgatgccaaggaagtgagcgccgcccaccgggccagatacttctggggcaatctgcctggcatgaacagacccctggccagcaccgtgaacgacaagctggagctgcaggagtgcctggagcacggccggatcgccaagttcagcaaggtgagaaccatcaccacccgaagcaacagcatcaaacaaggcaaggaccagcactttcctgtgttcatgaacgagaaggaggacatcctgtggtgtaccgagatggagagagtgttcgggttcccagtccactacacagatgtcagcaacatgtctagactggccagacagagactgctgggaagaagctggtccgtccctgtgatcagacacctgttcgcccctctgaaggagtacttcgcctgcgtgagcagcggcaacagcaacgccaacagccggggccccagcttctctagcggcctggtgccactgtccctgagagggagccacatgggccccatggagatctacaaaaccgtgagcgcctggaagcggcagcctgtgcgcgtgctgagcctgtttcggaatatcgataaagtcctgaaaagcctgggattcctggagagcggctctggctccggcggtggcaccctgaagtacgtggaggatgtgacaaacgtggtcagacgggatgtggagaagtggggccccttcgatctggtgtacggcagcacccaacccctgggcagctcttgtgaccggtgccctggctggtacatgtttcagttccaccggatcctgcagtacgccctgccgagacaggagtcccagcggccattcttttggattttcatggacaacttgctgctgaccgaggatgaccaggaaactaccactcggttcctgcagaccgaagccgtgaccctgcaggacgtgagaggccgggactaccagaacgccatgcgggtgtggtccaacatccctggactgaaaagcaagcacgcacctctgacccctaaagaagaggagtacctgcaggcccaggtgcggagcagaagcaagctggacgcccctaaggtggatctgctggtgaagaattgcctcctgcccctgagagagtacttcaagtatttcagccagaatagtctgcccctgggcggcccaagcagcggcgcccctcctcccagcggcggcagcccagccggctccccaacctctaccgaggagggcacctctgagtccgccacccccgagagcggccctggcacctccaccgagcccagcgagggcagcgcacccggcagccctgccggcagccccacctccacagaggagggaaccagcaccgagcccagcgaaggcagcgccccaggcaccagcaccgagcctagtgagggcggctctggcggcggcagcgcccaggagattaaacggatcaacaagatcagaagaagacttgtgaaagacagcaacaccaagaaggccggcaagacaggccccatgaaaaccctgctggttagagtgatgacacccgatctgagagagcggctggaaaacctgagaaagaagcctgaaaatatcccccagcccatcagcaatacatctagagccaacctgaataagctgctgaccgattacaccgaaatgaagaaggcgatcctgcatgtgtactgggaagagttccagaaggaccctgtgggcctgatgagccgggtggcccagcctgccagcaagaagatcgatcagaacaagctgaaacctgagatggacgagaagggcaacctgaccaccgccggctttgcctgctctcagtgtggccagcccctgttcgtgtacaagctggagcaggtgtctgagaagggcaaggcttacaccaactacttcggacggtgcaatgtggccgagcacgaaaagctgatcctgctggcccagctgaagcccgagaaggatagcgacgaagccgtgacatatagcctgggaaagtttgggcagagggccctggatttctacagcattcatgtgaccaaggagtccacccaccccgtgaagcccctggcccagatcgccggaaacagatacgcctccggacctgtgggaaaggccctgagcgacgcatgtatgggcacaatcgcctccttcctgtctaagtaccaggacatcatcatcgaacaccagaaggtggtgaagggcaaccagaagagactggagagcctgcgggagctggccggcaaggaaaacctggaataccctagcgtgaccctgccacctcagcctcacaccaaggagggcgttgatgcctacaacgaagtgatcgcccgggtgcgaatgtgggtgaacctgaacctgtggcagaagctgaagctaagcagagatgatgccaagcctctgctgagactgaagggattcccttcctttcctctggtcgagagacaggccaacgaagtggactggtgggacatggtgtgtaacgtgaagaagctgatcaacgagaaaaaggaggatggcaaggtgttttggcagaatctggctggctacaagagacaggaagccctgagaccatacctgagcagcgaggaagatcggaagaagggaaagaaattcgctcggtaccagctgggcgacctgctgctgcacctggaaaagaagcacggcgaggactggggaaaggtgtacgacgaggcctgggagcggattgacaagaaagtggaaggcctgagcaagcacatcaagctggaagaggaacggagaagcgaggacgcccagagcaaggccgccctgaccgactggctgcgggctaaggccagcttcgtgatcgagggcctgaaggaggccgacaaggacgagttctgcagatgcgagctgaagctgcagaagtggtacggggacctgcggggaaagcccttcgccatcgaagccgagaacagcatcctggacatcagcggcttcagcaagcagtacaactgtgccttcatctggcagaaggacggcgtgaagaagctgaacctgtacctgatcatcaactacttcaagggcggcaagctgcggttcaagaagatcaaacctgaagccttcgaagccaacagattctacaccgtgatcaacaaaaagagcggcgagatcgtgcccatggaggtgaacttcaacttcgacgaccccaacctgatcatcctgcctctggcctttggcaagagacagggcagagaattcatctggaacgacctgctgtccctggaaaccggcagcctgaagctggccaacggaagagtgatcgagaagacactgtacaacagaagaacccggcaggatgagcctgccctgttcgtggccctgaccttcgagcggcgggaggtcctggactcctccaatatcaaaccaatgaacctgatcggcgtggcaagaggcgaaaacatccccgccgtgatcgccctgaccgaccccgagggctgcccactgagccggtttaaggatagcctgggaaacccaacccacatcctgagaatcggcgagagctataaggagaagcagcggaccatccaggccaagaaggaggtggagcagcggagagccggcggctacagccggaagtacgccagcaaagccaagaatctggcagacgatatggtgagaaacaccgctagagatctgctgtactacgccgtgacccaggatgccatgctgatcttcgccaacctgagccggggcttcggccggcagggcaagcggaccttcatggccgagagacagtacacacggatggaggactggctgaccgccaagctggcctacgagggcctgagcaagacctacctgtccaagacactggcccagtacacctccaagacatgcagcaactgtgggtttaccatcaccagcgccgactacgacagggtgctggagaagctgaagaagacagcaacaggctggatgaccacaattaacggcaaggagctgaaggtggagggccagattacctactacaacagatacaagagacagaacgtagtcaaggacctgtccgtcgagctggatagactgagcgaagaatctgtgaacaacgacatctcctcctggacaaagggcagaagcggagaagctctgagcctcctgaagaaaagattctcccatagacccgtgcaggagaagttcgtgtgcctgaactgcggcttcgagacacacgcagccgagcaagccgccctgaacatcgccagatcctggctgttcctgcggagccaggagtacaagaaataccagacaaacaagacaaccggcaacaccgataagagagccttcgtcgagacctggcagtccttttaccggaagaagcttaaggaggtgtggaaacctgccgtgcggtctggcggatctggcggaggctccacaagcatgggccccctgcagttcagggacgtggccatcgagttcagcctggaggagtggcactgcctggacaccgcccagaggaacctgtacaggaacgtgatgctggagaactacagcaacctggtgttcctgggcatcgtggtgagcaagcccgacctgatcaccaggctggagcagggcaagaagcccctgaccatgaagaggcacgagatggtggccaaccccagcggccccggcgtgttcgtgaccagccccaagaaaaagagaaaagtctaagctgccttctgcggggcttgccttctggccatgcccttcttctctcccttgcacctgtacctcttggtctttgaataaagcctgagtaggaaggctagcaaaaaaaaaaaaaaaaaaaaaaaaaaaaaaaaaaaaaaaaaaaaaaaaaaaaaaaaaaaaaaaaaaaaaaaaaaaaaaaa

SEQ ID NO: 7098 - RNA, 5797 nt, synthetic construct
  source 1..5797: mol_type = other RNA
aggaaataagagagaaaagaagagtaagaagaaatataagagccaccatggcccctaagaagaagcgtaaagtgagccggatggaacgcctcgtctacgaggtgcggcagaagtgcagaaacatcgaggacatctgcatctcctgcggatctctgaacgtgaccctggagcacccactgttcatcggcggcatgtgccagaactgtaaaaactgttttctggagtgtgcctatcaatacgacgatgacggctaccagagctactgcaccatctgttgcggcggaagagaggtgctgatgtgtggaaataacaactgctgccggtgcttctgcgtggaatgcgtggacctgctggtgggccccggcgccgcccaggccgctattaaggaagatccttggaactgctacatgtgcggccacaagggcacatacggcctgctgagacggagagaggactggcctagcagactgcagatgttcttcgccaataaccacgaccaggagttcgacccccctaaggtgtaccctcccgtccccgccgagaagagaaagcccatccgggtcctgagcctgttcgatggcatcgccaccggtctgctggtgctgaaggacctgggcatccaggtggataggtacattgcctccgaggtgtgcgaggactccatcaccgtgggaatggtgcgtcatcagggcaagatcatgtacgtgggcgacgtgcggagcgtgacacagaagcatatccaggagtggggccctttcgacctggtgatcggcggcagcccttgcaatgacctgagcatcgtgaacccagcccggaagggcctgtacgagggaaccggcagactgttcttcgagttttacagactgctgcacgacgcccggcctaaggaaggcgacgaccggcccttcttttggctgttcgagaatgtggtggccatgggagtcagcgacaagcgggatattagccggttcctggagagcaaccccgtgatgatcgatgccaaggaagtgagcgccgcccaccgggccagatacttctggggcaatctgcctggcatgaacagacccctggccagcaccgtgaacgacaagctggagctgcaggagtgcctggagcacggccggatcgccaagttcagcaaggtgagaaccatcaccacccgaagcaacagcatcaaacaaggcaaggaccagcactttcctgtgttcatgaacgagaaggaggacatcctgtggtgtaccgagatggagagagtgttcgggttcccagtccactacacagatgtcagcaacatgtctagactggccagacagagactgctgggaagaagctggtccgtccctgtgatcagacacctgttcgcccctctgaaggagtacttcgcctgcgtgagcagcggcaacagcaacgccaacagccggggccccagcttctctagcggcctggtgccactgtccctgagagggagccacatgggccccatggagatctacaaaaccgtgagcgcctggaagcggcagcctgtgcgcgtgctgagcctgtttcggaatatcgataaagtcctgaaaagcctgggattcctggagagcggctctggctccggcggtggcaccctgaagtacgtggaggatgtgacaaacgtggtcagacgggatgtggagaagtggggccccttcgatctggtgtacggcagcacccaacccctgggcagctcttgtgaccggtgccctggctggtacatgtttcagttccaccggatcctgcagtacgccctgccgagacaggagtcccagcggccattcttttggattttcatggacaacttgctgctgaccgaggatgaccaggaaactaccactcggttcctgcagaccgaagccgtgaccctgcaggacgtgagaggccgggactaccagaacgccatgcgggtgtggtccaacatccctggactgaaaagcaagcacgcacctctgacccctaaagaagaggagtacctgcaggcccaggtgcggagcagaagcaagctggacgcccctaaggtggatctgctggtgaagaattgcctcctgcccctgagagagtacttcaagtatttcagccagaatagtctgcccctgggcggcccaagcagcggcgcccctcctcccagcggcggcagcccagccggctccccaacctctaccgaggagggcacctctgagtccgccacccccgagagcggccctggcacctccaccgagcccagcgagggcagcgcacccggcagccctgccggcagccccacctccacagaggagggaaccagcaccgagcccagcgaaggcagcgccccaggcaccagcaccgagcctagtgagggcggctctggcggcggcagcgcccaggagattaaacggatcaacaagatcagaagaagacttgtgaaagacagcaacaccaagaaggccggcaagacaggccccatgaaaaccctgctggttagagtgatgacacccgatctgagagagcggctggaaaacctgagaaagaagcctgaaaatatcccccagcccatcagcaatacatctagagccaacctgaataagctgctgaccgattacaccgaaatgaagaaggcgatcctgcatgtgtactgggaagagttccagaaggaccctgtgggcctgatgagccgggtggcccagcctgccagcaagaagatcgatcagaacaagctgaaacctgagatggacgagaagggcaacctgaccaccgccggctttgcctgctctcagtgtggccagcccctgttcgtgtacaagctggagcaggtgtctgagaagggcaaggcttacaccaactacttcggacggtgcaatgtggccgagcacgaaaagctgatcctgctggcccagctgaagcccgagaaggatagcgacgaagccgtgacatatagcctgggaaagtttgggcagagggccctggatttctacagcattcatgtgaccaaggagtccacccaccccgtgaagcccctggcccagatcgccggaaacagatacgcctccggacctgtgggaaaggccctgagcgacgcatgtatgggcacaatcgcctccttcctgtctaagtaccaggacatcatcatcgaacaccagaaggtggtgaagggcaaccagaagagactggagagcctgcgggagctggccggcaaggaaaacctggaataccctagcgtgaccctgccacctcagcctcacaccaaggagggcgttgatgcctacaacgaagtgatcgcccgggtgcgaatgtgggtgaacctgaacctgtggcagaagctgaagctaagcagagatgatgccaagcctctgctgagactgaagggattcccttcctttcctctggtcgagagacaggccaacgaagtggactggtgggacatggtgtgtaacgtgaagaagctgatcaacgagaaaaaggaggatggcaaggtgttttggcagaatctggctggctacaagagacaggaagccctgagaccatacctgagcagcgaggaagatcggaagaagggaaagaaattcgctcggtaccagctgggcgacctgctgctgcacctggaaaagaagcacggcgaggactggggaaaggtgtacgacgaggcctgggagcggattgacaagaaagtggaaggcctgagcaagcacatcaagctggaagaggaacggagaagcgaggacgcccagagcaaggccgccctgaccgactggctgcgggctaaggccagcttcgtgatcgagggcctgaaggaggccgacaaggacgagttctgcagatgcgagctgaagctgcagaagtggtacggggacctgcggggaaagcccttcgccatcgaagccgagaacagcatcctggacatcagcggcttcagcaagcagtacaactgtgccttcatctggcagaaggacggcgtgaagaagctgaacctgtacctgatcatcaactacttcaagggcggcaagctgcggttcaagaagatcaaacctgaagccttcgaagccaacagattctacaccgtgatcaacaaaaagagcggcgagatcgtgcccatggaggtgaacttcaacttcgacgaccccaacctgatcatcctgcctctggcctttggcaagagacagggcagagaattcatctggaacgacctgctgtccctggaaaccggcagcctgaagctggccaacggaagagtgatcgagaagacactgtacaacagaagaacccggcaggatgagcctgccctgttcgtggccctgaccttcgagcggcgggaggtcctggactcctccaatatcaaaccaatgaacctgatcggcgtggcaagaggcgaaaacatccccgccgtgatcgccctgaccgaccccgagggctgcccactgagccggtttaaggatagcctgggaaacccaacccacatcctgagaatcggcgagagctataaggagaagcagcggaccatccaggccaagaaggaggtggagcagcggagagccggcggctacagccggaagtacgccagcaaagccaagaatctggcagacgatatggtgagaaacaccgctagagatctgctgtactacgccgtgacccaggatgccatgctgatcttcgccaacctgagccggggcttcggccggcagggcaagcggaccttcatggccgagagacagtacacacggatggaggactggctgaccgccaagctggcctacgagggcctgagcaagacctacctgtccaagacactggcccagtacacctccaagacatgcagcaactgtgggtttaccatcaccagcgccgactacgacagggtgctggagaagctgaagaagacagcaacaggctggatgaccacaattaacggcaaggagctgaaggtggagggccagattacctactacaacagatacaagagacagaacgtagtcaaggacctgtccgtcgagctggatagactgagcgaagaatctgtgaacaacgacatctcctcctggacaaagggcagaagcggagaagctctgagcctcctgaagaaaagattctcccatagacccgtgcaggagaagttcgtgtgcctgaactgcggcttcgagacacacgcagccgagcaagccgccctgaacatcgccagatcctggctgttcctgcggagccaggagtacaagaaataccagacaaacaagacaaccggcaacaccgataagagagccttcgtcgagacctggcagtccttttaccggaagaagcttaaggaggtgtggaaacctgccgtgcggtctggcggatctggcggaggctccacaagctgctggggcctgctgagcttcaaggacatcagcatggacttcacctgggaggagtggcagctgctggacagcgcccagaagtacctgtacagggacgtgatcctggagaactacaggaacctggtgagcgtgggctaccacggcaccaagcccgacctgatcttcaagctggagcagggcgaggagccctggatcaggaacgccaagatcagcaggcccaggtgcagcgagggctggaaggagaccagccccaagaaaaagagaaaagtctaagctgccttctgcggggcttgccttctggccatgcccttcttctctcccttgcacctgtacctcttggtctttgaataaagcctgagtaggaaggctagcaaaaaaaaaaaaaaaaaaaaaaaaaaaaaaaaaaaaaaaaaaaaaaaaaaaaaaaaaaaaaaaaaaaaaaaaaaaaaaaa

SEQ ID NO: 7099 - RNA, 5797 nt, synthetic construct
  source 1..5797: mol_type = other RNA
aggaaataagagagaaaagaagagtaagaagaaatataagagccaccatggcccctaagaagaagcgtaaagtgagccggatggaacgcctcgtctacgaggtgcggcagaagtgcagaaacatcgaggacatctgcatctcctgcggatctctgaacgtgaccctggagcacccactgttcatcggcggcatgtgccagaactgtaaaaactgttttctggagtgtgcctatcaatacgacgatgacggctaccagagctactgcaccatctgttgcggcggaagagaggtgctgatgtgtggaaataacaactgctgccggtgcttctgcgtggaatgcgtggacctgctggtgggccccggcgccgcccaggccgctattaaggaagatccttggaactgctacatgtgcggccacaagggcacatacggcctgctgagacggagagaggactggcctagcagactgcagatgttcttcgccaataaccacgaccaggagttcgacccccctaaggtgtaccctcccgtccccgccgagaagagaaagcccatccgggtcctgagcctgttcgatggcatcgccaccggtctgctggtgctgaaggacctgggcatccaggtggataggtacattgcctccgaggtgtgcgaggactccatcaccgtgggaatggtgcgtcatcagggcaagatcatgtacgtgggcgacgtgcggagcgtgacacagaagcatatccaggagtggggccctttcgacctggtgatcggcggcagcccttgcaatgacctgagcatcgtgaacccagcccggaagggcctgtacgagggaaccggcagactgttcttcgagttttacagactgctgcacgacgcccggcctaaggaaggcgacgaccggcccttcttttggctgttcgagaatgtggtggccatgggagtcagcgacaagcgggatattagccggttcctggagagcaaccccgtgatgatcgatgccaaggaagtgagcgccgcccaccgggccagatacttctggggcaatctgcctggcatgaacagacccctggccagcaccgtgaacgacaagctggagctgcaggagtgcctggagcacggccggatcgccaagttcagcaaggtgagaaccatcaccacccgaagcaacagcatcaaacaaggcaaggaccagcactttcctgtgttcatgaacgagaaggaggacatcctgtggtgtaccgagatggagagagtgttcgggttcccagtccactacacagatgtcagcaacatgtctagactggccagacagagactgctgggaagaagctggtccgtccctgtgatcagacacctgttcgcccctctgaaggagtacttcgcctgcgtgagcagcggcaacagcaacgccaacagccggggccccagcttctctagcggcctggtgccactgtccctgagagggagccacatgggccccatggagatctacaaaaccgtgagcgcctggaagcggcagcctgtgcgcgtgctgagcctgtttcggaatatcgataaagtcctgaaaagcctgggattcctggagagcggctctggctccggcggtggcaccctgaagtacgtggaggatgtgacaaacgtggtcagacgggatgtggagaagtggggccccttcgatctggtgtacggcagcacccaacccctgggcagctcttgtgaccggtgccctggctggtacatgtttcagttccaccggatcctgcagtacgccctgccgagacaggagtcccagcggccattcttttggattttcatggacaacttgctgctgaccgaggatgaccaggaaactaccactcggttcctgcagaccgaagccgtgaccctgcaggacgtgagaggccgggactaccagaacgccatgcgggtgtggtccaacatccctggactgaaaagcaagcacgcacctctgacccctaaagaagaggagtacctgcaggcccaggtgcggagcagaagcaagctggacgcccctaaggtggatctgctggtgaagaattgcctcctgcccctgagagagtacttcaagtatttcagccagaatagtctgcccctgggcggcccaagcagcggcgcccctcctcccagcggcggcagcccagccggctccccaacctctaccgaggagggcacctctgagtccgccacccccgagagcggccctggcacctccaccgagcccagcgagggcagcgcacccggcagccctgccggcagccccacctccacagaggagggaaccagcaccgagcccagcgaaggcagcgccccaggcaccagcaccgagcctagtgagggcggctctggcggcggcagcgcccaggagattaaacggatcaacaagatcagaagaagacttgtgaaagacagcaacaccaagaaggccggcaagacaggccccatgaaaaccctgctggttagagtgatgacacccgatctgagagagcggctggaaaacctgagaaagaagcctgaaaatatcccccagcccatcagcaatacatctagagccaacctgaataagctgctgaccgattacaccgaaatgaagaaggcgatcctgcatgtgtactgggaagagttccagaaggaccctgtgggcctgatgagccgggtggcccagcctgccagcaagaagatcgatcagaacaagctgaaacctgagatggacgagaagggcaacctgaccaccgccggctttgcctgctctcagtgtggccagcccctgttcgtgtacaagctggagcaggtgtctgagaagggcaaggcttacaccaactacttcggacggtgcaatgtggccgagcacgaaaagctgatcctgctggcccagctgaagcccgagaaggatagcgacgaagccgtgacatatagcctgggaaagtttgggcagagggccctggatttctacagcattcatgtgaccaaggagtccacccaccccgtgaagcccctggcccagatcgccggaaacagatacgcctccggacctgtgggaaaggccctgagcgacgcatgtatgggcacaatcgcctccttcctgtctaagtaccaggacatcatcatcgaacaccagaaggtggtgaagggcaaccagaagagactggagagcctgcgggagctggccggcaaggaaaacctggaataccctagcgtgaccctgccacctcagcctcacaccaaggagggcgttgatgcctacaacgaagtgatcgcccgggtgcgaatgtgggtgaacctgaacctgtggcagaagctgaagctaagcagagatgatgccaagcctctgctgagactgaagggattcccttcctttcctctggtcgagagacaggccaacgaagtggactggtgggacatggtgtgtaacgtgaagaagctgatcaacgagaaaaaggaggatggcaaggtgttttggcagaatctggctggctacaagagacaggaagccctgagaccatacctgagcagcgaggaagatcggaagaagggaaagaaattcgctcggtaccagctgggcgacctgctgctgcacctggaaaagaagcacggcgaggactggggaaaggtgtacgacgaggcctgggagcggattgacaagaaagtggaaggcctgagcaagcacatcaagctggaagaggaacggagaagcgaggacgcccagagcaaggccgccctgaccgactggctgcgggctaaggccagcttcgtgatcgagggcctgaaggaggccgacaaggacgagttctgcagatgcgagctgaagctgcagaagtggtacggggacctgcggggaaagcccttcgccatcgaagccgagaacagcatcctggacatcagcggcttcagcaagcagtacaactgtgccttcatctggcagaaggacggcgtgaagaagctgaacctgtacctgatcatcaactacttcaagggcggcaagctgcggttcaagaagatcaaacctgaagccttcgaagccaacagattctacaccgtgatcaacaaaaagagcggcgagatcgtgcccatggaggtgaacttcaacttcgacgaccccaacctgatcatcctgcctctggcctttggcaagagacagggcagagaattcatctggaacgacctgctgtccctggaaaccggcagcctgaagctggccaacggaagagtgatcgagaagacactgtacaacagaagaacccggcaggatgagcctgccctgttcgtggccctgaccttcgagcggcgggaggtcctggactcctccaatatcaaaccaatgaacctgatcggcgtggcaagaggcgaaaacatccccgccgtgatcgccctgaccgaccccgagggctgcccactgagccggtttaaggatagcctgggaaacccaacccacatcctgagaatcggcgagagctataaggagaagcagcggaccatccaggccaagaaggaggtggagcagcggagagccggcggctacagccggaagtacgccagcaaagccaagaatctggcagacgatatggtgagaaacaccgctagagatctgctgtactacgccgtgacccaggatgccatgctgatcttcgccaacctgagccggggcttcggccggcagggcaagcggaccttcatggccgagagacagtacacacggatggaggactggctgaccgccaagctggcctacgagggcctgagcaagacctacctgtccaagacactggcccagtacacctccaagacatgcagcaactgtgggtttaccatcaccagcgccgactacgacagggtgctggagaagctgaagaagacagcaacaggctggatgaccacaattaacggcaaggagctgaaggtggagggccagattacctactacaacagatacaagagacagaacgtagtcaaggacctgtccgtcgagctggatagactgagcgaagaatctgtgaacaacgacatctcctcctggacaaagggcagaagcggagaagctctgagcctcctgaagaaaagattctcccatagacccgtgcaggagaagttcgtgtgcctgaactgcggcttcgagacacacgcagccgagcaagccgccctgaacatcgccagatcctggctgttcctgcggagccaggagtacaagaaataccagacaaacaagacaaccggcaacaccgataagagagccttcgtcgagacctggcagtccttttaccggaagaagcttaaggaggtgtggaaacctgccgtgcggtctggcggatctggcggaggctccacaagccccatcaccttcgacgacgtggccatcatcttcagccccgaggagtgggagtgcctggacagcgcccagagggacctgtacagggacgtgatggtggagaactgcaggaacctgctgagcgtggaggccagcaggcacggcaccaagggcttcagcagcaagaaggacatgaagaggagcttccaggaggagctgagcaggaggctgagcaagtgcggcgccgacatcttccaccccaggaagaccagccccaagaaaaagagaaaagtctaagctgccttctgcggggcttgccttctggccatgcccttcttctctcccttgcacctgtacctcttggtctttgaataaagcctgagtaggaaggctagcaaaaaaaaaaaaaaaaaaaaaaaaaaaaaaaaaaaaaaaaaaaaaaaaaaaaaaaaaaaaaaaaaaaaaaaaaaaaaaaa

SEQ ID NO: 7100 - RNA, 5797 nt, synthetic construct
  source 1..5797: mol_type = other RNA
aggaaataagagagaaaagaagagtaagaagaaatataagagccaccatggcccctaagaagaagcgtaaagtgagccggatggaacgcctcgtctacgaggtgcggcagaagtgcagaaacatcgaggacatctgcatctcctgcggatctctgaacgtgaccctggagcacccactgttcatcggcggcatgtgccagaactgtaaaaactgttttctggagtgtgcctatcaatacgacgatgacggctaccagagctactgcaccatctgttgcggcggaagagaggtgctgatgtgtggaaataacaactgctgccggtgcttctgcgtggaatgcgtggacctgctggtgggccccggcgccgcccaggccgctattaaggaagatccttggaactgctacatgtgcggccacaagggcacatacggcctgctgagacggagagaggactggcctagcagactgcagatgttcttcgccaataaccacgaccaggagttcgacccccctaaggtgtaccctcccgtccccgccgagaagagaaagcccatccgggtcctgagcctgttcgatggcatcgccaccggtctgctggtgctgaaggacctgggcatccaggtggataggtacattgcctccgaggtgtgcgaggactccatcaccgtgggaatggtgcgtcatcagggcaagatcatgtacgtgggcgacgtgcggagcgtgacacagaagcatatccaggagtggggccctttcgacctggtgatcggcggcagcccttgcaatgacctgagcatcgtgaacccagcccggaagggcctgtacgagggaaccggcagactgttcttcgagttttacagactgctgcacgacgcccggcctaaggaaggcgacgaccggcccttcttttggctgttcgagaatgtggtggccatgggagtcagcgacaagcgggatattagccggttcctggagagcaaccccgtgatgatcgatgccaaggaagtgagcgccgcccaccgggccagatacttctggggcaatctgcctggcatgaacagacccctggccagcaccgtgaacgacaagctggagctgcaggagtgcctggagcacggccggatcgccaagttcagcaaggtgagaaccatcaccacccgaagcaacagcatcaaacaaggcaaggaccagcactttcctgtgttcatgaacgagaaggaggacatcctgtggtgtaccgagatggagagagtgttcgggttcccagtccactacacagatgtcagcaacatgtctagactggccagacagagactgctgggaagaagctggtccgtccctgtgatcagacacctgttcgcccctctgaaggagtacttcgcctgcgtgagcagcggcaacagcaacgccaacagccggggccccagcttctctagcggcctggtgccactgtccctgagagggagccacatgggccccatggagatctacaaaaccgtgagcgcctggaagcggcagcctgtgcgcgtgctgagcctgtttcggaatatcgataaagtcctgaaaagcctgggattcctggagagcggctctggctccggcggtggcaccctgaagtacgtggaggatgtgacaaacgtggtcagacgggatgtggagaagtggggccccttcgatctggtgtacggcagcacccaacccctgggcagctcttgtgaccggtgccctggctggtacatgtttcagttccaccggatcctgcagtacgccctgccgagacaggagtcccagcggccattcttttggattttcatggacaacttgctgctgaccgaggatgaccaggaaactaccactcggttcctgcagaccgaagccgtgaccctgcaggacgtgagaggccgggactaccagaacgccatgcgggtgtggtccaacatccctggactgaaaagcaagcacgcacctctgacccctaaagaagaggagtacctgcaggcccaggtgcggagcagaagcaagctggacgcccctaaggtggatctgctggtgaagaattgcctcctgcccctgagagagtacttcaagtatttcagccagaatagtctgcccctgggcggcccaagcagcggcgcccctcctcccagcggcggcagcccagccggctccccaacctctaccgaggagggcacctctgagtccgccacccccgagagcggccctggcacctccaccgagcccagcgagggcagcgcacccggcagccctgccggcagccccacctccacagaggagggaaccagcaccgagcccagcgaaggcagcgccccaggcaccagcaccgagcctagtgagggcggctctggcggcggcagcgcccaggagattaaacggatcaacaagatcagaagaagacttgtgaaagacagcaacaccaagaaggccggcaagacaggccccatgaaaaccctgctggttagagtgatgacacccgatctgagagagcggctggaaaacctgagaaagaagcctgaaaatatcccccagcccatcagcaatacatctagagccaacctgaataagctgctgaccgattacaccgaaatgaagaaggcgatcctgcatgtgtactgggaagagttccagaaggaccctgtgggcctgatgagccgggtggcccagcctgccagcaagaagatcgatcagaacaagctgaaacctgagatggacgagaagggcaacctgaccaccgccggctttgcctgctctcagtgtggccagcccctgttcgtgtacaagctggagcaggtgtctgagaagggcaaggcttacaccaactacttcggacggtgcaatgtggccgagcacgaaaagctgatcctgctggcccagctgaagcccgagaaggatagcgacgaagccgtgacatatagcctgggaaagtttgggcagagggccctggatttctacagcattcatgtgaccaaggagtccacccaccccgtgaagcccctggcccagatcgccggaaacagatacgcctccggacctgtgggaaaggccctgagcgacgcatgtatgggcacaatcgcctccttcctgtctaagtaccaggacatcatcatcgaacaccagaaggtggtgaagggcaaccagaagagactggagagcctgcgggagctggccggcaaggaaaacctggaataccctagcgtgaccctgccacctcagcctcacaccaaggagggcgttgatgcctacaacgaagtgatcgcccgggtgcgaatgtgggtgaacctgaacctgtggcagaagctgaagctaagcagagatgatgccaagcctctgctgagactgaagggattcccttcctttcctctggtcgagagacaggccaacgaagtggactggtgggacatggtgtgtaacgtgaagaagctgatcaacgagaaaaaggaggatggcaaggtgttttggcagaatctggctggctacaagagacaggaagccctgagaccatacctgagcagcgaggaagatcggaagaagggaaagaaattcgctcggtaccagctgggcgacctgctgctgcacctggaaaagaagcacggcgaggactggggaaaggtgtacgacgaggcctgggagcggattgacaagaaagtggaaggcctgagcaagcacatcaagctggaagaggaacggagaagcgaggacgcccagagcaaggccgccctgaccgactggctgcgggctaaggccagcttcgtgatcgagggcctgaaggaggccgacaaggacgagttctgcagatgcgagctgaagctgcagaagtggtacggggacctgcggggaaagcccttcgccatcgaagccgagaacagcatcctggacatcagcggcttcagcaagcagtacaactgtgccttcatctggcagaaggacggcgtgaagaagctgaacctgtacctgatcatcaactacttcaagggcggcaagctgcggttcaagaagatcaaacctgaagccttcgaagccaacagattctacaccgtgatcaacaaaaagagcggcgagatcgtgcccatggaggtgaacttcaacttcgacgaccccaacctgatcatcctgcctctggcctttggcaagagacagggcagagaattcatctggaacgacctgctgtccctggaaaccggcagcctgaagctggccaacggaagagtgatcgagaagacactgtacaacagaagaacccggcaggatgagcctgccctgttcgtggccctgaccttcgagcggcgggaggtcctggactcctccaatatcaaaccaatgaacctgatcggcgtggcaagaggcgaaaacatccccgccgtgatcgccctgaccgaccccgagggctgcccactgagccggtttaaggatagcctgggaaacccaacccacatcctgagaatcggcgagagctataaggagaagcagcggaccatccaggccaagaaggaggtggagcagcggagagccggcggctacagccggaagtacgccagcaaagccaagaatctggcagacgatatggtgagaaacaccgctagagatctgctgtactacgccgtgacccaggatgccatgctgatcttcgccaacctgagccggggcttcggccggcagggcaagcggaccttcatggccgagagacagtacacacggatggaggactggctgaccgccaagctggcctacgagggcctgagcaagacctacctgtccaagacactggcccagtacacctccaagacatgcagcaactgtgggtttaccatcaccagcgccgactacgacagggtgctggagaagctgaagaagacagcaacaggctggatgaccacaattaacggcaaggagctgaaggtggagggccagattacctactacaacagatacaagagacagaacgtagtcaaggacctgtccgtcgagctggatagactgagcgaagaatctgtgaacaacgacatctcctcctggacaaagggcagaagcggagaagctctgagcctcctgaagaaaagattctcccatagacccgtgcaggagaagttcgtgtgcctgaactgcggcttcgagacacacgcagccgagcaagccgccctgaacatcgccagatcctggctgttcctgcggagccaggagtacaagaaataccagacaaacaagacaaccggcaacaccgataagagagccttcgtcgagacctggcagtccttttaccggaagaagcttaaggaggtgtggaaacctgccgtgcggtctggcggatctggcggaggctccacaagcccccaggagagcgtggccttcgacgacgtggccgtgtacttcaccaagaaggagtgggccatcatggtgcccgaccagagggccctgtacagggacgtgatgctggagaactacgaggccgtggccttcgtggtgccccccaccagcaagcccgccctggtgagccacctggagcagggcaaggagccctgcttcacccagccccagggcgtgctgagcaggagcaactggagggccggcttcaccagccccaagaaaaagagaaaagtctaagctgccttctgcggggcttgccttctggccatgcccttcttctctcccttgcacctgtacctcttggtctttgaataaagcctgagtaggaaggctagcaaaaaaaaaaaaaaaaaaaaaaaaaaaaaaaaaaaaaaaaaaaaaaaaaaaaaaaaaaaaaaaaaaaaaaaaaaaaaaaa

SEQ ID NO: 7101 - RNA, 5797 nt, synthetic construct
  source 1..5797: mol_type = other RNA
aggaaataagagagaaaagaagagtaagaagaaatataagagccaccatggcccctaagaagaagcgtaaagtgagccggatggaacgcctcgtctacgaggtgcggcagaagtgcagaaacatcgaggacatctgcatctcctgcggatctctgaacgtgaccctggagcacccactgttcatcggcggcatgtgccagaactgtaaaaactgttttctggagtgtgcctatcaatacgacgatgacggctaccagagctactgcaccatctgttgcggcggaagagaggtgctgatgtgtggaaataacaactgctgccggtgcttctgcgtggaatgcgtggacctgctggtgggccccggcgccgcccaggccgctattaaggaagatccttggaactgctacatgtgcggccacaagggcacatacggcctgctgagacggagagaggactggcctagcagactgcagatgttcttcgccaataaccacgaccaggagttcgacccccctaaggtgtaccctcccgtccccgccgagaagagaaagcccatccgggtcctgagcctgttcgatggcatcgccaccggtctgctggtgctgaaggacctgggcatccaggtggataggtacattgcctccgaggtgtgcgaggactccatcaccgtgggaatggtgcgtcatcagggcaagatcatgtacgtgggcgacgtgcggagcgtgacacagaagcatatccaggagtggggccctttcgacctggtgatcggcggcagcccttgcaatgacctgagcatcgtgaacccagcccggaagggcctgtacgagggaaccggcagactgttcttcgagttttacagactgctgcacgacgcccggcctaaggaaggcgacgaccggcccttcttttggctgttcgagaatgtggtggccatgggagtcagcgacaagcgggatattagccggttcctggagagcaaccccgtgatgatcgatgccaaggaagtgagcgccgcccaccgggccagatacttctggggcaatctgcctggcatgaacagacccctggccagcaccgtgaacgacaagctggagctgcaggagtgcctggagcacggccggatcgccaagttcagcaaggtgagaaccatcaccacccgaagcaacagcatcaaacaaggcaaggaccagcactttcctgtgttcatgaacgagaaggaggacatcctgtggtgtaccgagatggagagagtgttcgggttcccagtccactacacagatgtcagcaacatgtctagactggccagacagagactgctgggaagaagctggtccgtccctgtgatcagacacctgttcgcccctctgaaggagtacttcgcctgcgtgagcagcggcaacagcaacgccaacagccggggccccagcttctctagcggcctggtgccactgtccctgagagggagccacatgggccccatggagatctacaaaaccgtgagcgcctggaagcggcagcctgtgcgcgtgctgagcctgtttcggaatatcgataaagtcctgaaaagcctgggattcctggagagcggctctggctccggcggtggcaccctgaagtacgtggaggatgtgacaaacgtggtcagacgggatgtggagaagtggggccccttcgatctggtgtacggcagcacccaacccctgggcagctcttgtgaccggtgccctggctggtacatgtttcagttccaccggatcctgcagtacgccctgccgagacaggagtcccagcggccattcttttggattttcatggacaacttgctgctgaccgaggatgaccaggaaactaccactcggttcctgcagaccgaagccgtgaccctgcaggacgtgagaggccgggactaccagaacgccatgcgggtgtggtccaacatccctggactgaaaagcaagcacgcacctctgacccctaaagaagaggagtacctgcaggcccaggtgcggagcagaagcaagctggacgcccctaaggtggatctgctggtgaagaattgcctcctgcccctgagagagtacttcaagtatttcagccagaatagtctgcccctgggcggcccaagcagcggcgcccctcctcccagcggcggcagcccagccggctccccaacctctaccgaggagggcacctctgagtccgccacccccgagagcggccctggcacctccaccgagcccagcgagggcagcgcacccggcagccctgccggcagccccacctccacagaggagggaaccagcaccgagcccagcgaaggcagcgccccaggcaccagcaccgagcctagtgagggcggctctggcggcggcagcgcccaggagattaaacggatcaacaagatcagaagaagacttgtgaaagacagcaacaccaagaaggccggcaagacaggccccatgaaaaccctgctggttagagtgatgacacccgatctgagagagcggctggaaaacctgagaaagaagcctgaaaatatcccccagcccatcagcaatacatctagagccaacctgaataagctgctgaccgattacaccgaaatgaagaaggcgatcctgcatgtgtactgggaagagttccagaaggaccctgtgggcctgatgagccgggtggcccagcctgccagcaagaagatcgatcagaacaagctgaaacctgagatggacgagaagggcaacctgaccaccgccggctttgcctgctctcagtgtggccagcccctgttcgtgtacaagctggagcaggtgtctgagaagggcaaggcttacaccaactacttcggacggtgcaatgtggccgagcacgaaaagctgatcctgctggcccagctgaagcccgagaaggatagcgacgaagccgtgacatatagcctgggaaagtttgggcagagggccctggatttctacagcattcatgtgaccaaggagtccacccaccccgtgaagcccctggcccagatcgccggaaacagatacgcctccggacctgtgggaaaggccctgagcgacgcatgtatgggcacaatcgcctccttcctgtctaagtaccaggacatcatcatcgaacaccagaaggtggtgaagggcaaccagaagagactggagagcctgcgggagctggccggcaaggaaaacctggaataccctagcgtgaccctgccacctcagcctcacaccaaggagggcgttgatgcctacaacgaagtgatcgcccgggtgcgaatgtgggtgaacctgaacctgtggcagaagctgaagctaagcagagatgatgccaagcctctgctgagactgaagggattcccttcctttcctctggtcgagagacaggccaacgaagtggactggtgggacatggtgtgtaacgtgaagaagctgatcaacgagaaaaaggaggatggcaaggtgttttggcagaatctggctggctacaagagacaggaagccctgagaccatacctgagcagcgaggaagatcggaagaagggaaagaaattcgctcggtaccagctgggcgacctgctgctgcacctggaaaagaagcacggcgaggactggggaaaggtgtacgacgaggcctgggagcggattgacaagaaagtggaaggcctgagcaagcacatcaagctggaagaggaacggagaagcgaggacgcccagagcaaggccgccctgaccgactggctgcgggctaaggccagcttcgtgatcgagggcctgaaggaggccgacaaggacgagttctgcagatgcgagctgaagctgcagaagtggtacggggacctgcggggaaagcccttcgccatcgaagccgagaacagcatcctggacatcagcggcttcagcaagcagtacaactgtgccttcatctggcagaaggacggcgtgaagaagctgaacctgtacctgatcatcaactacttcaagggcggcaagctgcggttcaagaagatcaaacctgaagccttcgaagccaacagattctacaccgtgatcaacaaaaagagcggcgagatcgtgcccatggaggtgaacttcaacttcgacgaccccaacctgatcatcctgcctctggcctttggcaagagacagggcagagaattcatctggaacgacctgctgtccctggaaaccggcagcctgaagctggccaacggaagagtgatcgagaagacactgtacaacagaagaacccggcaggatgagcctgccctgttcgtggccctgaccttcgagcggcgggaggtcctggactcctccaatatcaaaccaatgaacctgatcggcgtggcaagaggcgaaaacatccccgccgtgatcgccctgaccgaccccgagggctgcccactgagccggtttaaggatagcctgggaaacccaacccacatcctgagaatcggcgagagctataaggagaagcagcggaccatccaggccaagaaggaggtggagcagcggagagccggcggctacagccggaagtacgccagcaaagccaagaatctggcagacgatatggtgagaaacaccgctagagatctgctgtactacgccgtgacccaggatgccatgctgatcttcgccaacctgagccggggcttcggccggcagggcaagcggaccttcatggccgagagacagtacacacggatggaggactggctgaccgccaagctggcctacgagggcctgagcaagacctacctgtccaagacactggcccagtacacctccaagacatgcagcaactgtgggtttaccatcaccagcgccgactacgacagggtgctggagaagctgaagaagacagcaacaggctggatgaccacaattaacggcaaggagctgaaggtggagggccagattacctactacaacagatacaagagacagaacgtagtcaaggacctgtccgtcgagctggatagactgagcgaagaatctgtgaacaacgacatctcctcctggacaaagggcagaagcggagaagctctgagcctcctgaagaaaagattctcccatagacccgtgcaggagaagttcgtgtgcctgaactgcggcttcgagacacacgcagccgagcaagccgccctgaacatcgccagatcctggctgttcctgcggagccaggagtacaagaaataccagacaaacaagacaaccggcaacaccgataagagagccttcgtcgagacctggcagtccttttaccggaagaagcttaaggaggtgtggaaacctgccgtgcggtctggcggatctggcggaggctccacaagcagccagggccacgtgaccttcgaggacatcgccgtgtacttcagccaggaggagtggggcctgctggacgaggcccagaggtgcctgtaccacgacgtgatgctggagaacttcagcctgatgaccagcgtggccggcctgagccagaacaaccacaaggacagctgcctgcagtggaaggtgcccgtgagcatgaacaacgtggcccagtgcagccccgacgaggtgcactacacccccatgaccagccccaagaaaaagagaaaagtctaagctgccttctgcggggcttgccttctggccatgcccttcttctctcccttgcacctgtacctcttggtctttgaataaagcctgagtaggaaggctagcaaaaaaaaaaaaaaaaaaaaaaaaaaaaaaaaaaaaaaaaaaaaaaaaaaaaaaaaaaaaaaaaaaaaaaaaaaaaaaaa

SEQ ID NO: 7102 - RNA, 5797 nt, synthetic construct
  source 1..5797: mol_type = other RNA
aggaaataagagagaaaagaagagtaagaagaaatataagagccaccatggcccctaagaagaagcgtaaagtgagccggatggaacgcctcgtctacgaggtgcggcagaagtgcagaaacatcgaggacatctgcatctcctgcggatctctgaacgtgaccctggagcacccactgttcatcggcggcatgtgccagaactgtaaaaactgttttctggagtgtgcctatcaatacgacgatgacggctaccagagctactgcaccatctgttgcggcggaagagaggtgctgatgtgtggaaataacaactgctgccggtgcttctgcgtggaatgcgtggacctgctggtgggccccggcgccgcccaggccgctattaaggaagatccttggaactgctacatgtgcggccacaagggcacatacggcctgctgagacggagagaggactggcctagcagactgcagatgttcttcgccaataaccacgaccaggagttcgacccccctaaggtgtaccctcccgtccccgccgagaagagaaagcccatccgggtcctgagcctgttcgatggcatcgccaccggtctgctggtgctgaaggacctgggcatccaggtggataggtacattgcctccgaggtgtgcgaggactccatcaccgtgggaatggtgcgtcatcagggcaagatcatgtacgtgggcgacgtgcggagcgtgacacagaagcatatccaggagtggggccctttcgacctggtgatcggcggcagcccttgcaatgacctgagcatcgtgaacccagcccggaagggcctgtacgagggaaccggcagactgttcttcgagttttacagactgctgcacgacgcccggcctaaggaaggcgacgaccggcccttcttttggctgttcgagaatgtggtggccatgggagtcagcgacaagcgggatattagccggttcctggagagcaaccccgtgatgatcgatgccaaggaagtgagcgccgcccaccgggccagatacttctggggcaatctgcctggcatgaacagacccctggccagcaccgtgaacgacaagctggagctgcaggagtgcctggagcacggccggatcgccaagttcagcaaggtgagaaccatcaccacccgaagcaacagcatcaaacaaggcaaggaccagcactttcctgtgttcatgaacgagaaggaggacatcctgtggtgtaccgagatggagagagtgttcgggttcccagtccactacacagatgtcagcaacatgtctagactggccagacagagactgctgggaagaagctggtccgtccctgtgatcagacacctgttcgcccctctgaaggagtacttcgcctgcgtgagcagcggcaacagcaacgccaacagccggggccccagcttctctagcggcctggtgccactgtccctgagagggagccacatgggccccatggagatctacaaaaccgtgagcgcctggaagcggcagcctgtgcgcgtgctgagcctgtttcggaatatcgataaagtcctgaaaagcctgggattcctggagagcggctctggctccggcggtggcaccctgaagtacgtggaggatgtgacaaacgtggtcagacgggatgtggagaagtggggccccttcgatctggtgtacggcagcacccaacccctgggcagctcttgtgaccggtgccctggctggtacatgtttcagttccaccggatcctgcagtacgccctgccgagacaggagtcccagcggccattcttttggattttcatggacaacttgctgctgaccgaggatgaccaggaaactaccactcggttcctgcagaccgaagccgtgaccctgcaggacgtgagaggccgggactaccagaacgccatgcgggtgtggtccaacatccctggactgaaaagcaagcacgcacctctgacccctaaagaagaggagtacctgcaggcccaggtgcggagcagaagcaagctggacgcccctaaggtggatctgctggtgaagaattgcctcctgcccctgagagagtacttcaagtatttcagccagaatagtctgcccctgggcggcccaagcagcggcgcccctcctcccagcggcggcagcccagccggctccccaacctctaccgaggagggcacctctgagtccgccacccccgagagcggccctggcacctccaccgagcccagcgagggcagcgcacccggcagccctgccggcagccccacctccacagaggagggaaccagcaccgagcccagcgaaggcagcgccccaggcaccagcaccgagcctagtgagggcggctctggcggcggcagcgcccaggagattaaacggatcaacaagatcagaagaagacttgtgaaagacagcaacaccaagaaggccggcaagacaggccccatgaaaaccctgctggttagagtgatgacacccgatctgagagagcggctggaaaacctgagaaagaagcctgaaaatatcccccagcccatcagcaatacatctagagccaacctgaataagctgctgaccgattacaccgaaatgaagaaggcgatcctgcatgtgtactgggaagagttccagaaggaccctgtgggcctgatgagccgggtggcccagcctgccagcaagaagatcgatcagaacaagctgaaacctgagatggacgagaagggcaacctgaccaccgccggctttgcctgctctcagtgtggccagcccctgttcgtgtacaagctggagcaggtgtctgagaagggcaaggcttacaccaactacttcggacggtgcaatgtggccgagcacgaaaagctgatcctgctggcccagctgaagcccgagaaggatagcgacgaagccgtgacatatagcctgggaaagtttgggcagagggccctggatttctacagcattcatgtgaccaaggagtccacccaccccgtgaagcccctggcccagatcgccggaaacagatacgcctccggacctgtgggaaaggccctgagcgacgcatgtatgggcacaatcgcctccttcctgtctaagtaccaggacatcatcatcgaacaccagaaggtggtgaagggcaaccagaagagactggagagcctgcgggagctggccggcaaggaaaacctggaataccctagcgtgaccctgccacctcagcctcacaccaaggagggcgttgatgcctacaacgaagtgatcgcccgggtgcgaatgtgggtgaacctgaacctgtggcagaagctgaagctaagcagagatgatgccaagcctctgctgagactgaagggattcccttcctttcctctggtcgagagacaggccaacgaagtggactggtgggacatggtgtgtaacgtgaagaagctgatcaacgagaaaaaggaggatggcaaggtgttttggcagaatctggctggctacaagagacaggaagccctgagaccatacctgagcagcgaggaagatcggaagaagggaaagaaattcgctcggtaccagctgggcgacctgctgctgcacctggaaaagaagcacggcgaggactggggaaaggtgtacgacgaggcctgggagcggattgacaagaaagtggaaggcctgagcaagcacatcaagctggaagaggaacggagaagcgaggacgcccagagcaaggccgccctgaccgactggctgcgggctaaggccagcttcgtgatcgagggcctgaaggaggccgacaaggacgagttctgcagatgcgagctgaagctgcagaagtggtacggggacctgcggggaaagcccttcgccatcgaagccgagaacagcatcctggacatcagcggcttcagcaagcagtacaactgtgccttcatctggcagaaggacggcgtgaagaagctgaacctgtacctgatcatcaactacttcaagggcggcaagctgcggttcaagaagatcaaacctgaagccttcgaagccaacagattctacaccgtgatcaacaaaaagagcggcgagatcgtgcccatggaggtgaacttcaacttcgacgaccccaacctgatcatcctgcctctggcctttggcaagagacagggcagagaattcatctggaacgacctgctgtccctggaaaccggcagcctgaagctggccaacggaagagtgatcgagaagacactgtacaacagaagaacccggcaggatgagcctgccctgttcgtggccctgaccttcgagcggcgggaggtcctggactcctccaatatcaaaccaatgaacctgatcggcgtggcaagaggcgaaaacatccccgccgtgatcgccctgaccgaccccgagggctgcccactgagccggtttaaggatagcctgggaaacccaacccacatcctgagaatcggcgagagctataaggagaagcagcggaccatccaggccaagaaggaggtggagcagcggagagccggcggctacagccggaagtacgccagcaaagccaagaatctggcagacgatatggtgagaaacaccgctagagatctgctgtactacgccgtgacccaggatgccatgctgatcttcgccaacctgagccggggcttcggccggcagggcaagcggaccttcatggccgagagacagtacacacggatggaggactggctgaccgccaagctggcctacgagggcctgagcaagacctacctgtccaagacactggcccagtacacctccaagacatgcagcaactgtgggtttaccatcaccagcgccgactacgacagggtgctggagaagctgaagaagacagcaacaggctggatgaccacaattaacggcaaggagctgaaggtggagggccagattacctactacaacagatacaagagacagaacgtagtcaaggacctgtccgtcgagctggatagactgagcgaagaatctgtgaacaacgacatctcctcctggacaaagggcagaagcggagaagctctgagcctcctgaagaaaagattctcccatagacccgtgcaggagaagttcgtgtgcctgaactgcggcttcgagacacacgcagccgagcaagccgccctgaacatcgccagatcctggctgttcctgcggagccaggagtacaagaaataccagacaaacaagacaaccggcaacaccgataagagagccttcgtcgagacctggcagtccttttaccggaagaagcttaaggaggtgtggaaacctgccgtgcggtctggcggatctggcggaggctccacaagcgtgcacggcagcgtgaccttcagggacgtggccatcgacttctgccaggaggagtgggagtgcctgggccccatccagagggacctgtacagggacgtgatgctggagaactacagcaacctgatcgccgtgggcagcaccatcagcaagcccgacgtgatcgccctgctggagcagggcaccgagccctggatgggcgtgaggaaggacaggagcaggtggtaccccggcctgaacagcggcaccagccccaagaaaaagagaaaagtctaagctgccttctgcggggcttgccttctggccatgcccttcttctctcccttgcacctgtacctcttggtctttgaataaagcctgagtaggaaggctagcaaaaaaaaaaaaaaaaaaaaaaaaaaaaaaaaaaaaaaaaaaaaaaaaaaaaaaaaaaaaaaaaaaaaaaaaaaaaaaaa

SEQ ID NO: 7103 - RNA, 5797 nt, synthetic construct
  source 1..5797: mol_type = other RNA
aggaaataagagagaaaagaagagtaagaagaaatataagagccaccatggcccctaagaagaagcgtaaagtgagccggatggaacgcctcgtctacgaggtgcggcagaagtgcagaaacatcgaggacatctgcatctcctgcggatctctgaacgtgaccctggagcacccactgttcatcggcggcatgtgccagaactgtaaaaactgttttctggagtgtgcctatcaatacgacgatgacggctaccagagctactgcaccatctgttgcggcggaagagaggtgctgatgtgtggaaataacaactgctgccggtgcttctgcgtggaatgcgtggacctgctggtgggccccggcgccgcccaggccgctattaaggaagatccttggaactgctacatgtgcggccacaagggcacatacggcctgctgagacggagagaggactggcctagcagactgcagatgttcttcgccaataaccacgaccaggagttcgacccccctaaggtgtaccctcccgtccccgccgagaagagaaagcccatccgggtcctgagcctgttcgatggcatcgccaccggtctgctggtgctgaaggacctgggcatccaggtggataggtacattgcctccgaggtgtgcgaggactccatcaccgtgggaatggtgcgtcatcagggcaagatcatgtacgtgggcgacgtgcggagcgtgacacagaagcatatccaggagtggggccctttcgacctggtgatcggcggcagcccttgcaatgacctgagcatcgtgaacccagcccggaagggcctgtacgagggaaccggcagactgttcttcgagttttacagactgctgcacgacgcccggcctaaggaaggcgacgaccggcccttcttttggctgttcgagaatgtggtggccatgggagtcagcgacaagcgggatattagccggttcctggagagcaaccccgtgatgatcgatgccaaggaagtgagcgccgcccaccgggccagatacttctggggcaatctgcctggcatgaacagacccctggccagcaccgtgaacgacaagctggagctgcaggagtgcctggagcacggccggatcgccaagttcagcaaggtgagaaccatcaccacccgaagcaacagcatcaaacaaggcaaggaccagcactttcctgtgttcatgaacgagaaggaggacatcctgtggtgtaccgagatggagagagtgttcgggttcccagtccactacacagatgtcagcaacatgtctagactggccagacagagactgctgggaagaagctggtccgtccctgtgatcagacacctgttcgcccctctgaaggagtacttcgcctgcgtgagcagcggcaacagcaacgccaacagccggggccccagcttctctagcggcctggtgccactgtccctgagagggagccacatgggccccatggagatctacaaaaccgtgagcgcctggaagcggcagcctgtgcgcgtgctgagcctgtttcggaatatcgataaagtcctgaaaagcctgggattcctggagagcggctctggctccggcggtggcaccctgaagtacgtggaggatgtgacaaacgtggtcagacgggatgtggagaagtggggccccttcgatctggtgtacggcagcacccaacccctgggcagctcttgtgaccggtgccctggctggtacatgtttcagttccaccggatcctgcagtacgccctgccgagacaggagtcccagcggccattcttttggattttcatggacaacttgctgctgaccgaggatgaccaggaaactaccactcggttcctgcagaccgaagccgtgaccctgcaggacgtgagaggccgggactaccagaacgccatgcgggtgtggtccaacatccctggactgaaaagcaagcacgcacctctgacccctaaagaagaggagtacctgcaggcccaggtgcggagcagaagcaagctggacgcccctaaggtggatctgctggtgaagaattgcctcctgcccctgagagagtacttcaagtatttcagccagaatagtctgcccctgggcggcccaagcagcggcgcccctcctcccagcggcggcagcccagccggctccccaacctctaccgaggagggcacctctgagtccgccacccccgagagcggccctggcacctccaccgagcccagcgagggcagcgcacccggcagccctgccggcagccccacctccacagaggagggaaccagcaccgagcccagcgaaggcagcgccccaggcaccagcaccgagcctagtgagggcggctctggcggcggcagcgcccaggagattaaacggatcaacaagatcagaagaagacttgtgaaagacagcaacaccaagaaggccggcaagacaggccccatgaaaaccctgctggttagagtgatgacacccgatctgagagagcggctggaaaacctgagaaagaagcctgaaaatatcccccagcccatcagcaatacatctagagccaacctgaataagctgctgaccgattacaccgaaatgaagaaggcgatcctgcatgtgtactgggaagagttccagaaggaccctgtgggcctgatgagccgggtggcccagcctgccagcaagaagatcgatcagaacaagctgaaacctgagatggacgagaagggcaacctgaccaccgccggctttgcctgctctcagtgtggccagcccctgttcgtgtacaagctggagcaggtgtctgagaagggcaaggcttacaccaactacttcggacggtgcaatgtggccgagcacgaaaagctgatcctgctggcccagctgaagcccgagaaggatagcgacgaagccgtgacatatagcctgggaaagtttgggcagagggccctggatttctacagcattcatgtgaccaaggagtccacccaccccgtgaagcccctggcccagatcgccggaaacagatacgcctccggacctgtgggaaaggccctgagcgacgcatgtatgggcacaatcgcctccttcctgtctaagtaccaggacatcatcatcgaacaccagaaggtggtgaagggcaaccagaagagactggagagcctgcgggagctggccggcaaggaaaacctggaataccctagcgtgaccctgccacctcagcctcacaccaaggagggcgttgatgcctacaacgaagtgatcgcccgggtgcgaatgtgggtgaacctgaacctgtggcagaagctgaagctaagcagagatgatgccaagcctctgctgagactgaagggattcccttcctttcctctggtcgagagacaggccaacgaagtggactggtgggacatggtgtgtaacgtgaagaagctgatcaacgagaaaaaggaggatggcaaggtgttttggcagaatctggctggctacaagagacaggaagccctgagaccatacctgagcagcgaggaagatcggaagaagggaaagaaattcgctcggtaccagctgggcgacctgctgctgcacctggaaaagaagcacggcgaggactggggaaaggtgtacgacgaggcctgggagcggattgacaagaaagtggaaggcctgagcaagcacatcaagctggaagaggaacggagaagcgaggacgcccagagcaaggccgccctgaccgactggctgcgggctaaggccagcttcgtgatcgagggcctgaaggaggccgacaaggacgagttctgcagatgcgagctgaagctgcagaagtggtacggggacctgcggggaaagcccttcgccatcgaagccgagaacagcatcctggacatcagcggcttcagcaagcagtacaactgtgccttcatctggcagaaggacggcgtgaagaagctgaacctgtacctgatcatcaactacttcaagggcggcaagctgcggttcaagaagatcaaacctgaagccttcgaagccaacagattctacaccgtgatcaacaaaaagagcggcgagatcgtgcccatggaggtgaacttcaacttcgacgaccccaacctgatcatcctgcctctggcctttggcaagagacagggcagagaattcatctggaacgacctgctgtccctggaaaccggcagcctgaagctggccaacggaagagtgatcgagaagacactgtacaacagaagaacccggcaggatgagcctgccctgttcgtggccctgaccttcgagcggcgggaggtcctggactcctccaatatcaaaccaatgaacctgatcggcgtggcaagaggcgaaaacatccccgccgtgatcgccctgaccgaccccgagggctgcccactgagccggtttaaggatagcctgggaaacccaacccacatcctgagaatcggcgagagctataaggagaagcagcggaccatccaggccaagaaggaggtggagcagcggagagccggcggctacagccggaagtacgccagcaaagccaagaatctggcagacgatatggtgagaaacaccgctagagatctgctgtactacgccgtgacccaggatgccatgctgatcttcgccaacctgagccggggcttcggccggcagggcaagcggaccttcatggccgagagacagtacacacggatggaggactggctgaccgccaagctggcctacgagggcctgagcaagacctacctgtccaagacactggcccagtacacctccaagacatgcagcaactgtgggtttaccatcaccagcgccgactacgacagggtgctggagaagctgaagaagacagcaacaggctggatgaccacaattaacggcaaggagctgaaggtggagggccagattacctactacaacagatacaagagacagaacgtagtcaaggacctgtccgtcgagctggatagactgagcgaagaatctgtgaacaacgacatctcctcctggacaaagggcagaagcggagaagctctgagcctcctgaagaaaagattctcccatagacccgtgcaggagaagttcgtgtgcctgaactgcggcttcgagacacacgcagccgagcaagccgccctgaacatcgccagatcctggctgttcctgcggagccaggagtacaagaaataccagacaaacaagacaaccggcaacaccgataagagagccttcgtcgagacctggcagtccttttaccggaagaagcttaaggaggtgtggaaacctgccgtgcggtctggcggatctggcggaggctccacaagcttccaggaggccgtgaccttcaaggacgtggccgtggtgttcagcgaggaggagctgggcctgctggaccccacccagaggaagctgtacagggacgtgatgctggagaacttcaggaacctggtgagcctgggccacagcagcagcaagcccgacgtgatcagccagctggagagggaggagaagctgtgcaccaaggagttccacacccagggcggcggcaggaaccagaaggagatggagaccagccccaagaaaaagagaaaagtctaagctgccttctgcggggcttgccttctggccatgcccttcttctctcccttgcacctgtacctcttggtctttgaataaagcctgagtaggaaggctagcaaaaaaaaaaaaaaaaaaaaaaaaaaaaaaaaaaaaaaaaaaaaaaaaaaaaaaaaaaaaaaaaaaaaaaaaaaaaaaaa

SEQ ID NO: 7104 - RNA, 5797 nt, synthetic construct
  source 1..5797: mol_type = other RNA
aggaaataagagagaaaagaagagtaagaagaaatataagagccaccatggcccctaagaagaagcgtaaagtgagccggatggaacgcctcgtctacgaggtgcggcagaagtgcagaaacatcgaggacatctgcatctcctgcggatctctgaacgtgaccctggagcacccactgttcatcggcggcatgtgccagaactgtaaaaactgttttctggagtgtgcctatcaatacgacgatgacggctaccagagctactgcaccatctgttgcggcggaagagaggtgctgatgtgtggaaataacaactgctgccggtgcttctgcgtggaatgcgtggacctgctggtgggccccggcgccgcccaggccgctattaaggaagatccttggaactgctacatgtgcggccacaagggcacatacggcctgctgagacggagagaggactggcctagcagactgcagatgttcttcgccaataaccacgaccaggagttcgacccccctaaggtgtaccctcccgtccccgccgagaagagaaagcccatccgggtcctgagcctgttcgatggcatcgccaccggtctgctggtgctgaaggacctgggcatccaggtggataggtacattgcctccgaggtgtgcgaggactccatcaccgtgggaatggtgcgtcatcagggcaagatcatgtacgtgggcgacgtgcggagcgtgacacagaagcatatccaggagtggggccctttcgacctggtgatcggcggcagcccttgcaatgacctgagcatcgtgaacccagcccggaagggcctgtacgagggaaccggcagactgttcttcgagttttacagactgctgcacgacgcccggcctaaggaaggcgacgaccggcccttcttttggctgttcgagaatgtggtggccatgggagtcagcgacaagcgggatattagccggttcctggagagcaaccccgtgatgatcgatgccaaggaagtgagcgccgcccaccgggccagatacttctggggcaatctgcctggcatgaacagacccctggccagcaccgtgaacgacaagctggagctgcaggagtgcctggagcacggccggatcgccaagttcagcaaggtgagaaccatcaccacccgaagcaacagcatcaaacaaggcaaggaccagcactttcctgtgttcatgaacgagaaggaggacatcctgtggtgtaccgagatggagagagtgttcgggttcccagtccactacacagatgtcagcaacatgtctagactggccagacagagactgctgggaagaagctggtccgtccctgtgatcagacacctgttcgcccctctgaaggagtacttcgcctgcgtgagcagcggcaacagcaacgccaacagccggggccccagcttctctagcggcctggtgccactgtccctgagagggagccacatgggccccatggagatctacaaaaccgtgagcgcctggaagcggcagcctgtgcgcgtgctgagcctgtttcggaatatcgataaagtcctgaaaagcctgggattcctggagagcggctctggctccggcggtggcaccctgaagtacgtggaggatgtgacaaacgtggtcagacgggatgtggagaagtggggccccttcgatctggtgtacggcagcacccaacccctgggcagctcttgtgaccggtgccctggctggtacatgtttcagttccaccggatcctgcagtacgccctgccgagacaggagtcccagcggccattcttttggattttcatggacaacttgctgctgaccgaggatgaccaggaaactaccactcggttcctgcagaccgaagccgtgaccctgcaggacgtgagaggccgggactaccagaacgccatgcgggtgtggtccaacatccctggactgaaaagcaagcacgcacctctgacccctaaagaagaggagtacctgcaggcccaggtgcggagcagaagcaagctggacgcccctaaggtggatctgctggtgaagaattgcctcctgcccctgagagagtacttcaagtatttcagccagaatagtctgcccctgggcggcccaagcagcggcgcccctcctcccagcggcggcagcccagccggctccccaacctctaccgaggagggcacctctgagtccgccacccccgagagcggccctggcacctccaccgagcccagcgagggcagcgcacccggcagccctgccggcagccccacctccacagaggagggaaccagcaccgagcccagcgaaggcagcgccccaggcaccagcaccgagcctagtgagggcggctctggcggcggcagcgcccaggagattaaacggatcaacaagatcagaagaagacttgtgaaagacagcaacaccaagaaggccggcaagacaggccccatgaaaaccctgctggttagagtgatgacacccgatctgagagagcggctggaaaacctgagaaagaagcctgaaaatatcccccagcccatcagcaatacatctagagccaacctgaataagctgctgaccgattacaccgaaatgaagaaggcgatcctgcatgtgtactgggaagagttccagaaggaccctgtgggcctgatgagccgggtggcccagcctgccagcaagaagatcgatcagaacaagctgaaacctgagatggacgagaagggcaacctgaccaccgccggctttgcctgctctcagtgtggccagcccctgttcgtgtacaagctggagcaggtgtctgagaagggcaaggcttacaccaactacttcggacggtgcaatgtggccgagcacgaaaagctgatcctgctggcccagctgaagcccgagaaggatagcgacgaagccgtgacatatagcctgggaaagtttgggcagagggccctggatttctacagcattcatgtgaccaaggagtccacccaccccgtgaagcccctggcccagatcgccggaaacagatacgcctccggacctgtgggaaaggccctgagcgacgcatgtatgggcacaatcgcctccttcctgtctaagtaccaggacatcatcatcgaacaccagaaggtggtgaagggcaaccagaagagactggagagcctgcgggagctggccggcaaggaaaacctggaataccctagcgtgaccctgccacctcagcctcacaccaaggagggcgttgatgcctacaacgaagtgatcgcccgggtgcgaatgtgggtgaacctgaacctgtggcagaagctgaagctaagcagagatgatgccaagcctctgctgagactgaagggattcccttcctttcctctggtcgagagacaggccaacgaagtggactggtgggacatggtgtgtaacgtgaagaagctgatcaacgagaaaaaggaggatggcaaggtgttttggcagaatctggctggctacaagagacaggaagccctgagaccatacctgagcagcgaggaagatcggaagaagggaaagaaattcgctcggtaccagctgggcgacctgctgctgcacctggaaaagaagcacggcgaggactggggaaaggtgtacgacgaggcctgggagcggattgacaagaaagtggaaggcctgagcaagcacatcaagctggaagaggaacggagaagcgaggacgcccagagcaaggccgccctgaccgactggctgcgggctaaggccagcttcgtgatcgagggcctgaaggaggccgacaaggacgagttctgcagatgcgagctgaagctgcagaagtggtacggggacctgcggggaaagcccttcgccatcgaagccgagaacagcatcctggacatcagcggcttcagcaagcagtacaactgtgccttcatctggcagaaggacggcgtgaagaagctgaacctgtacctgatcatcaactacttcaagggcggcaagctgcggttcaagaagatcaaacctgaagccttcgaagccaacagattctacaccgtgatcaacaaaaagagcggcgagatcgtgcccatggaggtgaacttcaacttcgacgaccccaacctgatcatcctgcctctggcctttggcaagagacagggcagagaattcatctggaacgacctgctgtccctggaaaccggcagcctgaagctggccaacggaagagtgatcgagaagacactgtacaacagaagaacccggcaggatgagcctgccctgttcgtggccctgaccttcgagcggcgggaggtcctggactcctccaatatcaaaccaatgaacctgatcggcgtggcaagaggcgaaaacatccccgccgtgatcgccctgaccgaccccgagggctgcccactgagccggtttaaggatagcctgggaaacccaacccacatcctgagaatcggcgagagctataaggagaagcagcggaccatccaggccaagaaggaggtggagcagcggagagccggcggctacagccggaagtacgccagcaaagccaagaatctggcagacgatatggtgagaaacaccgctagagatctgctgtactacgccgtgacccaggatgccatgctgatcttcgccaacctgagccggggcttcggccggcagggcaagcggaccttcatggccgagagacagtacacacggatggaggactggctgaccgccaagctggcctacgagggcctgagcaagacctacctgtccaagacactggcccagtacacctccaagacatgcagcaactgtgggtttaccatcaccagcgccgactacgacagggtgctggagaagctgaagaagacagcaacaggctggatgaccacaattaacggcaaggagctgaaggtggagggccagattacctactacaacagatacaagagacagaacgtagtcaaggacctgtccgtcgagctggatagactgagcgaagaatctgtgaacaacgacatctcctcctggacaaagggcagaagcggagaagctctgagcctcctgaagaaaagattctcccatagacccgtgcaggagaagttcgtgtgcctgaactgcggcttcgagacacacgcagccgagcaagccgccctgaacatcgccagatcctggctgttcctgcggagccaggagtacaagaaataccagacaaacaagacaaccggcaacaccgataagagagccttcgtcgagacctggcagtccttttaccggaagaagcttaaggaggtgtggaaacctgccgtgcggtctggcggatctggcggaggctccacaagccagctgcaggagaccatgaccttcaaggacgtggaggtgaccttcagccaggacgagtggggcctgctggacagcgcccagaggaacctgtacagggacgtgatgctggagaactacaggaacatggccttcctggtgggccccttcaccaagcccgccctgatcagctggctggaggccagggagccctggggcctgaacgtgcaggtggcccagcccaagaggaaccccggcgccgcccccaccagccccaagaaaaagagaaaagtctaagctgccttctgcggggcttgccttctggccatgcccttcttctctcccttgcacctgtacctcttggtctttgaataaagcctgagtaggaaggctagcaaaaaaaaaaaaaaaaaaaaaaaaaaaaaaaaaaaaaaaaaaaaaaaaaaaaaaaaaaaaaaaaaaaaaaaaaaaaaaaa

SEQ ID NO: 7105 - RNA, 5797 nt, synthetic construct
  source 1..5797: mol_type = other RNA
aggaaataagagagaaaagaagagtaagaagaaatataagagccaccatggcccctaagaagaagcgtaaagtgagccggatggaacgcctcgtctacgaggtgcggcagaagtgcagaaacatcgaggacatctgcatctcctgcggatctctgaacgtgaccctggagcacccactgttcatcggcggcatgtgccagaactgtaaaaactgttttctggagtgtgcctatcaatacgacgatgacggctaccagagctactgcaccatctgttgcggcggaagagaggtgctgatgtgtggaaataacaactgctgccggtgcttctgcgtggaatgcgtggacctgctggtgggccccggcgccgcccaggccgctattaaggaagatccttggaactgctacatgtgcggccacaagggcacatacggcctgctgagacggagagaggactggcctagcagactgcagatgttcttcgccaataaccacgaccaggagttcgacccccctaaggtgtaccctcccgtccccgccgagaagagaaagcccatccgggtcctgagcctgttcgatggcatcgccaccggtctgctggtgctgaaggacctgggcatccaggtggataggtacattgcctccgaggtgtgcgaggactccatcaccgtgggaatggtgcgtcatcagggcaagatcatgtacgtgggcgacgtgcggagcgtgacacagaagcatatccaggagtggggccctttcgacctggtgatcggcggcagcccttgcaatgacctgagcatcgtgaacccagcccggaagggcctgtacgagggaaccggcagactgttcttcgagttttacagactgctgcacgacgcccggcctaaggaaggcgacgaccggcccttcttttggctgttcgagaatgtggtggccatgggagtcagcgacaagcgggatattagccggttcctggagagcaaccccgtgatgatcgatgccaaggaagtgagcgccgcccaccgggccagatacttctggggcaatctgcctggcatgaacagacccctggccagcaccgtgaacgacaagctggagctgcaggagtgcctggagcacggccggatcgccaagttcagcaaggtgagaaccatcaccacccgaagcaacagcatcaaacaaggcaaggaccagcactttcctgtgttcatgaacgagaaggaggacatcctgtggtgtaccgagatggagagagtgttcgggttcccagtccactacacagatgtcagcaacatgtctagactggccagacagagactgctgggaagaagctggtccgtccctgtgatcagacacctgttcgcccctctgaaggagtacttcgcctgcgtgagcagcggcaacagcaacgccaacagccggggccccagcttctctagcggcctggtgccactgtccctgagagggagccacatgggccccatggagatctacaaaaccgtgagcgcctggaagcggcagcctgtgcgcgtgctgagcctgtttcggaatatcgataaagtcctgaaaagcctgggattcctggagagcggctctggctccggcggtggcaccctgaagtacgtggaggatgtgacaaacgtggtcagacgggatgtggagaagtggggccccttcgatctggtgtacggcagcacccaacccctgggcagctcttgtgaccggtgccctggctggtacatgtttcagttccaccggatcctgcagtacgccctgccgagacaggagtcccagcggccattcttttggattttcatggacaacttgctgctgaccgaggatgaccaggaaactaccactcggttcctgcagaccgaagccgtgaccctgcaggacgtgagaggccgggactaccagaacgccatgcgggtgtggtccaacatccctggactgaaaagcaagcacgcacctctgacccctaaagaagaggagtacctgcaggcccaggtgcggagcagaagcaagctggacgcccctaaggtggatctgctggtgaagaattgcctcctgcccctgagagagtacttcaagtatttcagccagaatagtctgcccctgggcggcccaagcagcggcgcccctcctcccagcggcggcagcccagccggctccccaacctctaccgaggagggcacctctgagtccgccacccccgagagcggccctggcacctccaccgagcccagcgagggcagcgcacccggcagccctgccggcagccccacctccacagaggagggaaccagcaccgagcccagcgaaggcagcgccccaggcaccagcaccgagcctagtgagggcggctctggcggcggcagcgcccaggagattaaacggatcaacaagatcagaagaagacttgtgaaagacagcaacaccaagaaggccggcaagacaggccccatgaaaaccctgctggttagagtgatgacacccgatctgagagagcggctggaaaacctgagaaagaagcctgaaaatatcccccagcccatcagcaatacatctagagccaacctgaataagctgctgaccgattacaccgaaatgaagaaggcgatcctgcatgtgtactgggaagagttccagaaggaccctgtgggcctgatgagccgggtggcccagcctgccagcaagaagatcgatcagaacaagctgaaacctgagatggacgagaagggcaacctgaccaccgccggctttgcctgctctcagtgtggccagcccctgttcgtgtacaagctggagcaggtgtctgagaagggcaaggcttacaccaactacttcggacggtgcaatgtggccgagcacgaaaagctgatcctgctggcccagctgaagcccgagaaggatagcgacgaagccgtgacatatagcctgggaaagtttgggcagagggccctggatttctacagcattcatgtgaccaaggagtccacccaccccgtgaagcccctggcccagatcgccggaaacagatacgcctccggacctgtgggaaaggccctgagcgacgcatgtatgggcacaatcgcctccttcctgtctaagtaccaggacatcatcatcgaacaccagaaggtggtgaagggcaaccagaagagactggagagcctgcgggagctggccggcaaggaaaacctggaataccctagcgtgaccctgccacctcagcctcacaccaaggagggcgttgatgcctacaacgaagtgatcgcccgggtgcgaatgtgggtgaacctgaacctgtggcagaagctgaagctaagcagagatgatgccaagcctctgctgagactgaagggattcccttcctttcctctggtcgagagacaggccaacgaagtggactggtgggacatggtgtgtaacgtgaagaagctgatcaacgagaaaaaggaggatggcaaggtgttttggcagaatctggctggctacaagagacaggaagccctgagaccatacctgagcagcgaggaagatcggaagaagggaaagaaattcgctcggtaccagctgggcgacctgctgctgcacctggaaaagaagcacggcgaggactggggaaaggtgtacgacgaggcctgggagcggattgacaagaaagtggaaggcctgagcaagcacatcaagctggaagaggaacggagaagcgaggacgcccagagcaaggccgccctgaccgactggctgcgggctaaggccagcttcgtgatcgagggcctgaaggaggccgacaaggacgagttctgcagatgcgagctgaagctgcagaagtggtacggggacctgcggggaaagcccttcgccatcgaagccgagaacagcatcctggacatcagcggcttcagcaagcagtacaactgtgccttcatctggcagaaggacggcgtgaagaagctgaacctgtacctgatcatcaactacttcaagggcggcaagctgcggttcaagaagatcaaacctgaagccttcgaagccaacagattctacaccgtgatcaacaaaaagagcggcgagatcgtgcccatggaggtgaacttcaacttcgacgaccccaacctgatcatcctgcctctggcctttggcaagagacagggcagagaattcatctggaacgacctgctgtccctggaaaccggcagcctgaagctggccaacggaagagtgatcgagaagacactgtacaacagaagaacccggcaggatgagcctgccctgttcgtggccctgaccttcgagcggcgggaggtcctggactcctccaatatcaaaccaatgaacctgatcggcgtggcaagaggcgaaaacatccccgccgtgatcgccctgaccgaccccgagggctgcccactgagccggtttaaggatagcctgggaaacccaacccacatcctgagaatcggcgagagctataaggagaagcagcggaccatccaggccaagaaggaggtggagcagcggagagccggcggctacagccggaagtacgccagcaaagccaagaatctggcagacgatatggtgagaaacaccgctagagatctgctgtactacgccgtgacccaggatgccatgctgatcttcgccaacctgagccggggcttcggccggcagggcaagcggaccttcatggccgagagacagtacacacggatggaggactggctgaccgccaagctggcctacgagggcctgagcaagacctacctgtccaagacactggcccagtacacctccaagacatgcagcaactgtgggtttaccatcaccagcgccgactacgacagggtgctggagaagctgaagaagacagcaacaggctggatgaccacaattaacggcaaggagctgaaggtggagggccagattacctactacaacagatacaagagacagaacgtagtcaaggacctgtccgtcgagctggatagactgagcgaagaatctgtgaacaacgacatctcctcctggacaaagggcagaagcggagaagctctgagcctcctgaagaaaagattctcccatagacccgtgcaggagaagttcgtgtgcctgaactgcggcttcgagacacacgcagccgagcaagccgccctgaacatcgccagatcctggctgttcctgcggagccaggagtacaagaaataccagacaaacaagacaaccggcaacaccgataagagagccttcgtcgagacctggcagtccttttaccggaagaagcttaaggaggtgtggaaacctgccgtgcggtctggcggatctggcggaggctccacaagccagatcctggagagcctgaccttccaggacgtggccgtggacttcaccagggaggagtgggaccagctgtaccccgcccagaagaacctgtacagggacgtgatgctggagaactacaggaacctggtggccctgggccaccagctgtacaagcccgaggtgatcacccagctggagcaggaggagaggtggatgatgggcagggtgagcccccccgacacccaccccgacggcgagaacaggaccagccccaagaaaaagagaaaagtctaagctgccttctgcggggcttgccttctggccatgcccttcttctctcccttgcacctgtacctcttggtctttgaataaagcctgagtaggaaggctagcaaaaaaaaaaaaaaaaaaaaaaaaaaaaaaaaaaaaaaaaaaaaaaaaaaaaaaaaaaaaaaaaaaaaaaaaaaaaaaaa

SEQ ID NO: 7106 - RNA, 5797 nt, synthetic construct
  source 1..5797: mol_type = other RNA
aggaaataagagagaaaagaagagtaagaagaaatataagagccaccatggcccctaagaagaagcgtaaagtgagccggatggaacgcctcgtctacgaggtgcggcagaagtgcagaaacatcgaggacatctgcatctcctgcggatctctgaacgtgaccctggagcacccactgttcatcggcggcatgtgccagaactgtaaaaactgttttctggagtgtgcctatcaatacgacgatgacggctaccagagctactgcaccatctgttgcggcggaagagaggtgctgatgtgtggaaataacaactgctgccggtgcttctgcgtggaatgcgtggacctgctggtgggccccggcgccgcccaggccgctattaaggaagatccttggaactgctacatgtgcggccacaagggcacatacggcctgctgagacggagagaggactggcctagcagactgcagatgttcttcgccaataaccacgaccaggagttcgacccccctaaggtgtaccctcccgtccccgccgagaagagaaagcccatccgggtcctgagcctgttcgatggcatcgccaccggtctgctggtgctgaaggacctgggcatccaggtggataggtacattgcctccgaggtgtgcgaggactccatcaccgtgggaatggtgcgtcatcagggcaagatcatgtacgtgggcgacgtgcggagcgtgacacagaagcatatccaggagtggggccctttcgacctggtgatcggcggcagcccttgcaatgacctgagcatcgtgaacccagcccggaagggcctgtacgagggaaccggcagactgttcttcgagttttacagactgctgcacgacgcccggcctaaggaaggcgacgaccggcccttcttttggctgttcgagaatgtggtggccatgggagtcagcgacaagcgggatattagccggttcctggagagcaaccccgtgatgatcgatgccaaggaagtgagcgccgcccaccgggccagatacttctggggcaatctgcctggcatgaacagacccctggccagcaccgtgaacgacaagctggagctgcaggagtgcctggagcacggccggatcgccaagttcagcaaggtgagaaccatcaccacccgaagcaacagcatcaaacaaggcaaggaccagcactttcctgtgttcatgaacgagaaggaggacatcctgtggtgtaccgagatggagagagtgttcgggttcccagtccactacacagatgtcagcaacatgtctagactggccagacagagactgctgggaagaagctggtccgtccctgtgatcagacacctgttcgcccctctgaaggagtacttcgcctgcgtgagcagcggcaacagcaacgccaacagccggggccccagcttctctagcggcctggtgccactgtccctgagagggagccacatgggccccatggagatctacaaaaccgtgagcgcctggaagcggcagcctgtgcgcgtgctgagcctgtttcggaatatcgataaagtcctgaaaagcctgggattcctggagagcggctctggctccggcggtggcaccctgaagtacgtggaggatgtgacaaacgtggtcagacgggatgtggagaagtggggccccttcgatctggtgtacggcagcacccaacccctgggcagctcttgtgaccggtgccctggctggtacatgtttcagttccaccggatcctgcagtacgccctgccgagacaggagtcccagcggccattcttttggattttcatggacaacttgctgctgaccgaggatgaccaggaaactaccactcggttcctgcagaccgaagccgtgaccctgcaggacgtgagaggccgggactaccagaacgccatgcgggtgtggtccaacatccctggactgaaaagcaagcacgcacctctgacccctaaagaagaggagtacctgcaggcccaggtgcggagcagaagcaagctggacgcccctaaggtggatctgctggtgaagaattgcctcctgcccctgagagagtacttcaagtatttcagccagaatagtctgcccctgggcggcccaagcagcggcgcccctcctcccagcggcggcagcccagccggctccccaacctctaccgaggagggcacctctgagtccgccacccccgagagcggccctggcacctccaccgagcccagcgagggcagcgcacccggcagccctgccggcagccccacctccacagaggagggaaccagcaccgagcccagcgaaggcagcgccccaggcaccagcaccgagcctagtgagggcggctctggcggcggcagcgcccaggagattaaacggatcaacaagatcagaagaagacttgtgaaagacagcaacaccaagaaggccggcaagacaggccccatgaaaaccctgctggttagagtgatgacacccgatctgagagagcggctggaaaacctgagaaagaagcctgaaaatatcccccagcccatcagcaatacatctagagccaacctgaataagctgctgaccgattacaccgaaatgaagaaggcgatcctgcatgtgtactgggaagagttccagaaggaccctgtgggcctgatgagccgggtggcccagcctgccagcaagaagatcgatcagaacaagctgaaacctgagatggacgagaagggcaacctgaccaccgccggctttgcctgctctcagtgtggccagcccctgttcgtgtacaagctggagcaggtgtctgagaagggcaaggcttacaccaactacttcggacggtgcaatgtggccgagcacgaaaagctgatcctgctggcccagctgaagcccgagaaggatagcgacgaagccgtgacatatagcctgggaaagtttgggcagagggccctggatttctacagcattcatgtgaccaaggagtccacccaccccgtgaagcccctggcccagatcgccggaaacagatacgcctccggacctgtgggaaaggccctgagcgacgcatgtatgggcacaatcgcctccttcctgtctaagtaccaggacatcatcatcgaacaccagaaggtggtgaagggcaaccagaagagactggagagcctgcgggagctggccggcaaggaaaacctggaataccctagcgtgaccctgccacctcagcctcacaccaaggagggcgttgatgcctacaacgaagtgatcgcccgggtgcgaatgtgggtgaacctgaacctgtggcagaagctgaagctaagcagagatgatgccaagcctctgctgagactgaagggattcccttcctttcctctggtcgagagacaggccaacgaagtggactggtgggacatggtgtgtaacgtgaagaagctgatcaacgagaaaaaggaggatggcaaggtgttttggcagaatctggctggctacaagagacaggaagccctgagaccatacctgagcagcgaggaagatcggaagaagggaaagaaattcgctcggtaccagctgggcgacctgctgctgcacctggaaaagaagcacggcgaggactggggaaaggtgtacgacgaggcctgggagcggattgacaagaaagtggaaggcctgagcaagcacatcaagctggaagaggaacggagaagcgaggacgcccagagcaaggccgccctgaccgactggctgcgggctaaggccagcttcgtgatcgagggcctgaaggaggccgacaaggacgagttctgcagatgcgagctgaagctgcagaagtggtacggggacctgcggggaaagcccttcgccatcgaagccgagaacagcatcctggacatcagcggcttcagcaagcagtacaactgtgccttcatctggcagaaggacggcgtgaagaagctgaacctgtacctgatcatcaactacttcaagggcggcaagctgcggttcaagaagatcaaacctgaagccttcgaagccaacagattctacaccgtgatcaacaaaaagagcggcgagatcgtgcccatggaggtgaacttcaacttcgacgaccccaacctgatcatcctgcctctggcctttggcaagagacagggcagagaattcatctggaacgacctgctgtccctggaaaccggcagcctgaagctggccaacggaagagtgatcgagaagacactgtacaacagaagaacccggcaggatgagcctgccctgttcgtggccctgaccttcgagcggcgggaggtcctggactcctccaatatcaaaccaatgaacctgatcggcgtggcaagaggcgaaaacatccccgccgtgatcgccctgaccgaccccgagggctgcccactgagccggtttaaggatagcctgggaaacccaacccacatcctgagaatcggcgagagctataaggagaagcagcggaccatccaggccaagaaggaggtggagcagcggagagccggcggctacagccggaagtacgccagcaaagccaagaatctggcagacgatatggtgagaaacaccgctagagatctgctgtactacgccgtgacccaggatgccatgctgatcttcgccaacctgagccggggcttcggccggcagggcaagcggaccttcatggccgagagacagtacacacggatggaggactggctgaccgccaagctggcctacgagggcctgagcaagacctacctgtccaagacactggcccagtacacctccaagacatgcagcaactgtgggtttaccatcaccagcgccgactacgacagggtgctggagaagctgaagaagacagcaacaggctggatgaccacaattaacggcaaggagctgaaggtggagggccagattacctactacaacagatacaagagacagaacgtagtcaaggacctgtccgtcgagctggatagactgagcgaagaatctgtgaacaacgacatctcctcctggacaaagggcagaagcggagaagctctgagcctcctgaagaaaagattctcccatagacccgtgcaggagaagttcgtgtgcctgaactgcggcttcgagacacacgcagccgagcaagccgccctgaacatcgccagatcctggctgttcctgcggagccaggagtacaagaaataccagacaaacaagacaaccggcaacaccgataagagagccttcgtcgagacctggcagtccttttaccggaagaagcttaaggaggtgtggaaacctgccgtgcggtctggcggatctggcggaggctccacaagcatggccttcatggacgtggccgtggacttcacccaggaggagtggaggctgctgagccccgcccagaggaccctgtacagggaggtgatgctggagaactacagcaacctggtgagcctgggcatccccttcagcaagcccaagctgatcaccctgctggagcaggagaaggtgacctggagggagaagaggaagtgccccctggccacctgccccgccgagcccgagcccgagcccgagctgaccagccccaagaaaaagagaaaagtctaagctgccttctgcggggcttgccttctggccatgcccttcttctctcccttgcacctgtacctcttggtctttgaataaagcctgagtaggaaggctagcaaaaaaaaaaaaaaaaaaaaaaaaaaaaaaaaaaaaaaaaaaaaaaaaaaaaaaaaaaaaaaaaaaaaaaaaaaaaaaaa

SEQ ID NO: 7107 - RNA, 5797 nt, synthetic construct
  source 1..5797: mol_type = other RNA
aggaaataagagagaaaagaagagtaagaagaaatataagagccaccatggcccctaagaagaagcgtaaagtgagccggatggaacgcctcgtctacgaggtgcggcagaagtgcagaaacatcgaggacatctgcatctcctgcggatctctgaacgtgaccctggagcacccactgttcatcggcggcatgtgccagaactgtaaaaactgttttctggagtgtgcctatcaatacgacgatgacggctaccagagctactgcaccatctgttgcggcggaagagaggtgctgatgtgtggaaataacaactgctgccggtgcttctgcgtggaatgcgtggacctgctggtgggccccggcgccgcccaggccgctattaaggaagatccttggaactgctacatgtgcggccacaagggcacatacggcctgctgagacggagagaggactggcctagcagactgcagatgttcttcgccaataaccacgaccaggagttcgacccccctaaggtgtaccctcccgtccccgccgagaagagaaagcccatccgggtcctgagcctgttcgatggcatcgccaccggtctgctggtgctgaaggacctgggcatccaggtggataggtacattgcctccgaggtgtgcgaggactccatcaccgtgggaatggtgcgtcatcagggcaagatcatgtacgtgggcgacgtgcggagcgtgacacagaagcatatccaggagtggggccctttcgacctggtgatcggcggcagcccttgcaatgacctgagcatcgtgaacccagcccggaagggcctgtacgagggaaccggcagactgttcttcgagttttacagactgctgcacgacgcccggcctaaggaaggcgacgaccggcccttcttttggctgttcgagaatgtggtggccatgggagtcagcgacaagcgggatattagccggttcctggagagcaaccccgtgatgatcgatgccaaggaagtgagcgccgcccaccgggccagatacttctggggcaatctgcctggcatgaacagacccctggccagcaccgtgaacgacaagctggagctgcaggagtgcctggagcacggccggatcgccaagttcagcaaggtgagaaccatcaccacccgaagcaacagcatcaaacaaggcaaggaccagcactttcctgtgttcatgaacgagaaggaggacatcctgtggtgtaccgagatggagagagtgttcgggttcccagtccactacacagatgtcagcaacatgtctagactggccagacagagactgctgggaagaagctggtccgtccctgtgatcagacacctgttcgcccctctgaaggagtacttcgcctgcgtgagcagcggcaacagcaacgccaacagccggggccccagcttctctagcggcctggtgccactgtccctgagagggagccacatgggccccatggagatctacaaaaccgtgagcgcctggaagcggcagcctgtgcgcgtgctgagcctgtttcggaatatcgataaagtcctgaaaagcctgggattcctggagagcggctctggctccggcggtggcaccctgaagtacgtggaggatgtgacaaacgtggtcagacgggatgtggagaagtggggccccttcgatctggtgtacggcagcacccaacccctgggcagctcttgtgaccggtgccctggctggtacatgtttcagttccaccggatcctgcagtacgccctgccgagacaggagtcccagcggccattcttttggattttcatggacaacttgctgctgaccgaggatgaccaggaaactaccactcggttcctgcagaccgaagccgtgaccctgcaggacgtgagaggccgggactaccagaacgccatgcgggtgtggtccaacatccctggactgaaaagcaagcacgcacctctgacccctaaagaagaggagtacctgcaggcccaggtgcggagcagaagcaagctggacgcccctaaggtggatctgctggtgaagaattgcctcctgcccctgagagagtacttcaagtatttcagccagaatagtctgcccctgggcggcccaagcagcggcgcccctcctcccagcggcggcagcccagccggctccccaacctctaccgaggagggcacctctgagtccgccacccccgagagcggccctggcacctccaccgagcccagcgagggcagcgcacccggcagccctgccggcagccccacctccacagaggagggaaccagcaccgagcccagcgaaggcagcgccccaggcaccagcaccgagcctagtgagggcggctctggcggcggcagcgcccaggagattaaacggatcaacaagatcagaagaagacttgtgaaagacagcaacaccaagaaggccggcaagacaggccccatgaaaaccctgctggttagagtgatgacacccgatctgagagagcggctggaaaacctgagaaagaagcctgaaaatatcccccagcccatcagcaatacatctagagccaacctgaataagctgctgaccgattacaccgaaatgaagaaggcgatcctgcatgtgtactgggaagagttccagaaggaccctgtgggcctgatgagccgggtggcccagcctgccagcaagaagatcgatcagaacaagctgaaacctgagatggacgagaagggcaacctgaccaccgccggctttgcctgctctcagtgtggccagcccctgttcgtgtacaagctggagcaggtgtctgagaagggcaaggcttacaccaactacttcggacggtgcaatgtggccgagcacgaaaagctgatcctgctggcccagctgaagcccgagaaggatagcgacgaagccgtgacatatagcctgggaaagtttgggcagagggccctggatttctacagcattcatgtgaccaaggagtccacccaccccgtgaagcccctggcccagatcgccggaaacagatacgcctccggacctgtgggaaaggccctgagcgacgcatgtatgggcacaatcgcctccttcctgtctaagtaccaggacatcatcatcgaacaccagaaggtggtgaagggcaaccagaagagactggagagcctgcgggagctggccggcaaggaaaacctggaataccctagcgtgaccctgccacctcagcctcacaccaaggagggcgttgatgcctacaacgaagtgatcgcccgggtgcgaatgtgggtgaacctgaacctgtggcagaagctgaagctaagcagagatgatgccaagcctctgctgagactgaagggattcccttcctttcctctggtcgagagacaggccaacgaagtggactggtgggacatggtgtgtaacgtgaagaagctgatcaacgagaaaaaggaggatggcaaggtgttttggcagaatctggctggctacaagagacaggaagccctgagaccatacctgagcagcgaggaagatcggaagaagggaaagaaattcgctcggtaccagctgggcgacctgctgctgcacctggaaaagaagcacggcgaggactggggaaaggtgtacgacgaggcctgggagcggattgacaagaaagtggaaggcctgagcaagcacatcaagctggaagaggaacggagaagcgaggacgcccagagcaaggccgccctgaccgactggctgcgggctaaggccagcttcgtgatcgagggcctgaaggaggccgacaaggacgagttctgcagatgcgagctgaagctgcagaagtggtacggggacctgcggggaaagcccttcgccatcgaagccgagaacagcatcctggacatcagcggcttcagcaagcagtacaactgtgccttcatctggcagaaggacggcgtgaagaagctgaacctgtacctgatcatcaactacttcaagggcggcaagctgcggttcaagaagatcaaacctgaagccttcgaagccaacagattctacaccgtgatcaacaaaaagagcggcgagatcgtgcccatggaggtgaacttcaacttcgacgaccccaacctgatcatcctgcctctggcctttggcaagagacagggcagagaattcatctggaacgacctgctgtccctggaaaccggcagcctgaagctggccaacggaagagtgatcgagaagacactgtacaacagaagaacccggcaggatgagcctgccctgttcgtggccctgaccttcgagcggcgggaggtcctggactcctccaatatcaaaccaatgaacctgatcggcgtggcaagaggcgaaaacatccccgccgtgatcgccctgaccgaccccgagggctgcccactgagccggtttaaggatagcctgggaaacccaacccacatcctgagaatcggcgagagctataaggagaagcagcggaccatccaggccaagaaggaggtggagcagcggagagccggcggctacagccggaagtacgccagcaaagccaagaatctggcagacgatatggtgagaaacaccgctagagatctgctgtactacgccgtgacccaggatgccatgctgatcttcgccaacctgagccggggcttcggccggcagggcaagcggaccttcatggccgagagacagtacacacggatggaggactggctgaccgccaagctggcctacgagggcctgagcaagacctacctgtccaagacactggcccagtacacctccaagacatgcagcaactgtgggtttaccatcaccagcgccgactacgacagggtgctggagaagctgaagaagacagcaacaggctggatgaccacaattaacggcaaggagctgaaggtggagggccagattacctactacaacagatacaagagacagaacgtagtcaaggacctgtccgtcgagctggatagactgagcgaagaatctgtgaacaacgacatctcctcctggacaaagggcagaagcggagaagctctgagcctcctgaagaaaagattctcccatagacccgtgcaggagaagttcgtgtgcctgaactgcggcttcgagacacacgcagccgagcaagccgccctgaacatcgccagatcctggctgttcctgcggagccaggagtacaagaaataccagacaaacaagacaaccggcaacaccgataagagagccttcgtcgagacctggcagtccttttaccggaagaagcttaaggaggtgtggaaacctgccgtgcggtctggcggatctggcggaggctccacaagcaggcccggcgccgtgagcttcgccgacgtggccgtgtacttcagccccgaggagtgggagtgcctgaggcccgcccagagggccctgtacagggacgtgatgagggagaccttcggccacctgggcgccctgggcttcagcggccccaagcccgccttcatcagctgggtggagggcgaggtggaggcctggagccccgagagccaggaccccgacggcgagagcagcgccgccttcagcaggaccagccccaagaaaaagagaaaagtctaagctgccttctgcggggcttgccttctggccatgcccttcttctctcccttgcacctgtacctcttggtctttgaataaagcctgagtaggaaggctagcaaaaaaaaaaaaaaaaaaaaaaaaaaaaaaaaaaaaaaaaaaaaaaaaaaaaaaaaaaaaaaaaaaaaaaaaaaaaaaaa

SEQ ID NO: 7108 - RNA, 5797 nt, synthetic construct
  source 1..5797: mol_type = other RNA
aggaaataagagagaaaagaagagtaagaagaaatataagagccaccatggcccctaagaagaagcgtaaagtgagccggatggaacgcctcgtctacgaggtgcggcagaagtgcagaaacatcgaggacatctgcatctcctgcggatctctgaacgtgaccctggagcacccactgttcatcggcggcatgtgccagaactgtaaaaactgttttctggagtgtgcctatcaatacgacgatgacggctaccagagctactgcaccatctgttgcggcggaagagaggtgctgatgtgtggaaataacaactgctgccggtgcttctgcgtggaatgcgtggacctgctggtgggccccggcgccgcccaggccgctattaaggaagatccttggaactgctacatgtgcggccacaagggcacatacggcctgctgagacggagagaggactggcctagcagactgcagatgttcttcgccaataaccacgaccaggagttcgacccccctaaggtgtaccctcccgtccccgccgagaagagaaagcccatccgggtcctgagcctgttcgatggcatcgccaccggtctgctggtgctgaaggacctgggcatccaggtggataggtacattgcctccgaggtgtgcgaggactccatcaccgtgggaatggtgcgtcatcagggcaagatcatgtacgtgggcgacgtgcggagcgtgacacagaagcatatccaggagtggggccctttcgacctggtgatcggcggcagcccttgcaatgacctgagcatcgtgaacccagcccggaagggcctgtacgagggaaccggcagactgttcttcgagttttacagactgctgcacgacgcccggcctaaggaaggcgacgaccggcccttcttttggctgttcgagaatgtggtggccatgggagtcagcgacaagcgggatattagccggttcctggagagcaaccccgtgatgatcgatgccaaggaagtgagcgccgcccaccgggccagatacttctggggcaatctgcctggcatgaacagacccctggccagcaccgtgaacgacaagctggagctgcaggagtgcctggagcacggccggatcgccaagttcagcaaggtgagaaccatcaccacccgaagcaacagcatcaaacaaggcaaggaccagcactttcctgtgttcatgaacgagaaggaggacatcctgtggtgtaccgagatggagagagtgttcgggttcccagtccactacacagatgtcagcaacatgtctagactggccagacagagactgctgggaagaagctggtccgtccctgtgatcagacacctgttcgcccctctgaaggagtacttcgcctgcgtgagcagcggcaacagcaacgccaacagccggggccccagcttctctagcggcctggtgccactgtccctgagagggagccacatgggccccatggagatctacaaaaccgtgagcgcctggaagcggcagcctgtgcgcgtgctgagcctgtttcggaatatcgataaagtcctgaaaagcctgggattcctggagagcggctctggctccggcggtggcaccctgaagtacgtggaggatgtgacaaacgtggtcagacgggatgtggagaagtggggccccttcgatctggtgtacggcagcacccaacccctgggcagctcttgtgaccggtgccctggctggtacatgtttcagttccaccggatcctgcagtacgccctgccgagacaggagtcccagcggccattcttttggattttcatggacaacttgctgctgaccgaggatgaccaggaaactaccactcggttcctgcagaccgaagccgtgaccctgcaggacgtgagaggccgggactaccagaacgccatgcgggtgtggtccaacatccctggactgaaaagcaagcacgcacctctgacccctaaagaagaggagtacctgcaggcccaggtgcggagcagaagcaagctggacgcccctaaggtggatctgctggtgaagaattgcctcctgcccctgagagagtacttcaagtatttcagccagaatagtctgcccctgggcggcccaagcagcggcgcccctcctcccagcggcggcagcccagccggctccccaacctctaccgaggagggcacctctgagtccgccacccccgagagcggccctggcacctccaccgagcccagcgagggcagcgcacccggcagccctgccggcagccccacctccacagaggagggaaccagcaccgagcccagcgaaggcagcgccccaggcaccagcaccgagcctagtgagggcggctctggcggcggcagcgcccaggagattaaacggatcaacaagatcagaagaagacttgtgaaagacagcaacaccaagaaggccggcaagacaggccccatgaaaaccctgctggttagagtgatgacacccgatctgagagagcggctggaaaacctgagaaagaagcctgaaaatatcccccagcccatcagcaatacatctagagccaacctgaataagctgctgaccgattacaccgaaatgaagaaggcgatcctgcatgtgtactgggaagagttccagaaggaccctgtgggcctgatgagccgggtggcccagcctgccagcaagaagatcgatcagaacaagctgaaacctgagatggacgagaagggcaacctgaccaccgccggctttgcctgctctcagtgtggccagcccctgttcgtgtacaagctggagcaggtgtctgagaagggcaaggcttacaccaactacttcggacggtgcaatgtggccgagcacgaaaagctgatcctgctggcccagctgaagcccgagaaggatagcgacgaagccgtgacatatagcctgggaaagtttgggcagagggccctggatttctacagcattcatgtgaccaaggagtccacccaccccgtgaagcccctggcccagatcgccggaaacagatacgcctccggacctgtgggaaaggccctgagcgacgcatgtatgggcacaatcgcctccttcctgtctaagtaccaggacatcatcatcgaacaccagaaggtggtgaagggcaaccagaagagactggagagcctgcgggagctggccggcaaggaaaacctggaataccctagcgtgaccctgccacctcagcctcacaccaaggagggcgttgatgcctacaacgaagtgatcgcccgggtgcgaatgtgggtgaacctgaacctgtggcagaagctgaagctaagcagagatgatgccaagcctctgctgagactgaagggattcccttcctttcctctggtcgagagacaggccaacgaagtggactggtgggacatggtgtgtaacgtgaagaagctgatcaacgagaaaaaggaggatggcaaggtgttttggcagaatctggctggctacaagagacaggaagccctgagaccatacctgagcagcgaggaagatcggaagaagggaaagaaattcgctcggtaccagctgggcgacctgctgctgcacctggaaaagaagcacggcgaggactggggaaaggtgtacgacgaggcctgggagcggattgacaagaaagtggaaggcctgagcaagcacatcaagctggaagaggaacggagaagcgaggacgcccagagcaaggccgccctgaccgactggctgcgggctaaggccagcttcgtgatcgagggcctgaaggaggccgacaaggacgagttctgcagatgcgagctgaagctgcagaagtggtacggggacctgcggggaaagcccttcgccatcgaagccgagaacagcatcctggacatcagcggcttcagcaagcagtacaactgtgccttcatctggcagaaggacggcgtgaagaagctgaacctgtacctgatcatcaactacttcaagggcggcaagctgcggttcaagaagatcaaacctgaagccttcgaagccaacagattctacaccgtgatcaacaaaaagagcggcgagatcgtgcccatggaggtgaacttcaacttcgacgaccccaacctgatcatcctgcctctggcctttggcaagagacagggcagagaattcatctggaacgacctgctgtccctggaaaccggcagcctgaagctggccaacggaagagtgatcgagaagacactgtacaacagaagaacccggcaggatgagcctgccctgttcgtggccctgaccttcgagcggcgggaggtcctggactcctccaatatcaaaccaatgaacctgatcggcgtggcaagaggcgaaaacatccccgccgtgatcgccctgaccgaccccgagggctgcccactgagccggtttaaggatagcctgggaaacccaacccacatcctgagaatcggcgagagctataaggagaagcagcggaccatccaggccaagaaggaggtggagcagcggagagccggcggctacagccggaagtacgccagcaaagccaagaatctggcagacgatatggtgagaaacaccgctagagatctgctgtactacgccgtgacccaggatgccatgctgatcttcgccaacctgagccggggcttcggccggcagggcaagcggaccttcatggccgagagacagtacacacggatggaggactggctgaccgccaagctggcctacgagggcctgagcaagacctacctgtccaagacactggcccagtacacctccaagacatgcagcaactgtgggtttaccatcaccagcgccgactacgacagggtgctggagaagctgaagaagacagcaacaggctggatgaccacaattaacggcaaggagctgaaggtggagggccagattacctactacaacagatacaagagacagaacgtagtcaaggacctgtccgtcgagctggatagactgagcgaagaatctgtgaacaacgacatctcctcctggacaaagggcagaagcggagaagctctgagcctcctgaagaaaagattctcccatagacccgtgcaggagaagttcgtgtgcctgaactgcggcttcgagacacacgcagccgagcaagccgccctgaacatcgccagatcctggctgttcctgcggagccaggagtacaagaaataccagacaaacaagacaaccggcaacaccgataagagagccttcgtcgagacctggcagtccttttaccggaagaagcttaaggaggtgtggaaacctgccgtgcggtctggcggatctggcggaggctccacaagcgcccacgccctggtgaccttcagggacgtggccatcgacttcagccagaaggagtgggagtgcctggacaccacccagaggaagctgtacagggacgtgatgctggagaactacagcaacctggtgagcctgggctacagcggcagcaagcccgacgtgatcaccctgctggagcagggcaaggagccctgcgtggccgtgagggacgtgaccggcacccagtaccccggcctgctgagcaggaccagccccaagaaaaagagaaaagtctaagctgccttctgcggggcttgccttctggccatgcccttcttctctcccttgcacctgtacctcttggtctttgaataaagcctgagtaggaaggctagcaaaaaaaaaaaaaaaaaaaaaaaaaaaaaaaaaaaaaaaaaaaaaaaaaaaaaaaaaaaaaaaaaaaaaaaaaaaaaaaa

SEQ ID NO: 7109 - RNA, 5797 nt, synthetic construct
  source 1..5797: mol_type = other RNA
aggaaataagagagaaaagaagagtaagaagaaatataagagccaccatggcccctaagaagaagcgtaaagtgagccggatggaacgcctcgtctacgaggtgcggcagaagtgcagaaacatcgaggacatctgcatctcctgcggatctctgaacgtgaccctggagcacccactgttcatcggcggcatgtgccagaactgtaaaaactgttttctggagtgtgcctatcaatacgacgatgacggctaccagagctactgcaccatctgttgcggcggaagagaggtgctgatgtgtggaaataacaactgctgccggtgcttctgcgtggaatgcgtggacctgctggtgggccccggcgccgcccaggccgctattaaggaagatccttggaactgctacatgtgcggccacaagggcacatacggcctgctgagacggagagaggactggcctagcagactgcagatgttcttcgccaataaccacgaccaggagttcgacccccctaaggtgtaccctcccgtccccgccgagaagagaaagcccatccgggtcctgagcctgttcgatggcatcgccaccggtctgctggtgctgaaggacctgggcatccaggtggataggtacattgcctccgaggtgtgcgaggactccatcaccgtgggaatggtgcgtcatcagggcaagatcatgtacgtgggcgacgtgcggagcgtgacacagaagcatatccaggagtggggccctttcgacctggtgatcggcggcagcccttgcaatgacctgagcatcgtgaacccagcccggaagggcctgtacgagggaaccggcagactgttcttcgagttttacagactgctgcacgacgcccggcctaaggaaggcgacgaccggcccttcttttggctgttcgagaatgtggtggccatgggagtcagcgacaagcgggatattagccggttcctggagagcaaccccgtgatgatcgatgccaaggaagtgagcgccgcccaccgggccagatacttctggggcaatctgcctggcatgaacagacccctggccagcaccgtgaacgacaagctggagctgcaggagtgcctggagcacggccggatcgccaagttcagcaaggtgagaaccatcaccacccgaagcaacagcatcaaacaaggcaaggaccagcactttcctgtgttcatgaacgagaaggaggacatcctgtggtgtaccgagatggagagagtgttcgggttcccagtccactacacagatgtcagcaacatgtctagactggccagacagagactgctgggaagaagctggtccgtccctgtgatcagacacctgttcgcccctctgaaggagtacttcgcctgcgtgagcagcggcaacagcaacgccaacagccggggccccagcttctctagcggcctggtgccactgtccctgagagggagccacatgggccccatggagatctacaaaaccgtgagcgcctggaagcggcagcctgtgcgcgtgctgagcctgtttcggaatatcgataaagtcctgaaaagcctgggattcctggagagcggctctggctccggcggtggcaccctgaagtacgtggaggatgtgacaaacgtggtcagacgggatgtggagaagtggggccccttcgatctggtgtacggcagcacccaacccctgggcagctcttgtgaccggtgccctggctggtacatgtttcagttccaccggatcctgcagtacgccctgccgagacaggagtcccagcggccattcttttggattttcatggacaacttgctgctgaccgaggatgaccaggaaactaccactcggttcctgcagaccgaagccgtgaccctgcaggacgtgagaggccgggactaccagaacgccatgcgggtgtggtccaacatccctggactgaaaagcaagcacgcacctctgacccctaaagaagaggagtacctgcaggcccaggtgcggagcagaagcaagctggacgcccctaaggtggatctgctggtgaagaattgcctcctgcccctgagagagtacttcaagtatttcagccagaatagtctgcccctgggcggcccaagcagcggcgcccctcctcccagcggcggcagcccagccggctccccaacctctaccgaggagggcacctctgagtccgccacccccgagagcggccctggcacctccaccgagcccagcgagggcagcgcacccggcagccctgccggcagccccacctccacagaggagggaaccagcaccgagcccagcgaaggcagcgccccaggcaccagcaccgagcctagtgagggcggctctggcggcggcagcgcccaggagattaaacggatcaacaagatcagaagaagacttgtgaaagacagcaacaccaagaaggccggcaagacaggccccatgaaaaccctgctggttagagtgatgacacccgatctgagagagcggctggaaaacctgagaaagaagcctgaaaatatcccccagcccatcagcaatacatctagagccaacctgaataagctgctgaccgattacaccgaaatgaagaaggcgatcctgcatgtgtactgggaagagttccagaaggaccctgtgggcctgatgagccgggtggcccagcctgccagcaagaagatcgatcagaacaagctgaaacctgagatggacgagaagggcaacctgaccaccgccggctttgcctgctctcagtgtggccagcccctgttcgtgtacaagctggagcaggtgtctgagaagggcaaggcttacaccaactacttcggacggtgcaatgtggccgagcacgaaaagctgatcctgctggcccagctgaagcccgagaaggatagcgacgaagccgtgacatatagcctgggaaagtttgggcagagggccctggatttctacagcattcatgtgaccaaggagtccacccaccccgtgaagcccctggcccagatcgccggaaacagatacgcctccggacctgtgggaaaggccctgagcgacgcatgtatgggcacaatcgcctccttcctgtctaagtaccaggacatcatcatcgaacaccagaaggtggtgaagggcaaccagaagagactggagagcctgcgggagctggccggcaaggaaaacctggaataccctagcgtgaccctgccacctcagcctcacaccaaggagggcgttgatgcctacaacgaagtgatcgcccgggtgcgaatgtgggtgaacctgaacctgtggcagaagctgaagctaagcagagatgatgccaagcctctgctgagactgaagggattcccttcctttcctctggtcgagagacaggccaacgaagtggactggtgggacatggtgtgtaacgtgaagaagctgatcaacgagaaaaaggaggatggcaaggtgttttggcagaatctggctggctacaagagacaggaagccctgagaccatacctgagcagcgaggaagatcggaagaagggaaagaaattcgctcggtaccagctgggcgacctgctgctgcacctggaaaagaagcacggcgaggactggggaaaggtgtacgacgaggcctgggagcggattgacaagaaagtggaaggcctgagcaagcacatcaagctggaagaggaacggagaagcgaggacgcccagagcaaggccgccctgaccgactggctgcgggctaaggccagcttcgtgatcgagggcctgaaggaggccgacaaggacgagttctgcagatgcgagctgaagctgcagaagtggtacggggacctgcggggaaagcccttcgccatcgaagccgagaacagcatcctggacatcagcggcttcagcaagcagtacaactgtgccttcatctggcagaaggacggcgtgaagaagctgaacctgtacctgatcatcaactacttcaagggcggcaagctgcggttcaagaagatcaaacctgaagccttcgaagccaacagattctacaccgtgatcaacaaaaagagcggcgagatcgtgcccatggaggtgaacttcaacttcgacgaccccaacctgatcatcctgcctctggcctttggcaagagacagggcagagaattcatctggaacgacctgctgtccctggaaaccggcagcctgaagctggccaacggaagagtgatcgagaagacactgtacaacagaagaacccggcaggatgagcctgccctgttcgtggccctgaccttcgagcggcgggaggtcctggactcctccaatatcaaaccaatgaacctgatcggcgtggcaagaggcgaaaacatccccgccgtgatcgccctgaccgaccccgagggctgcccactgagccggtttaaggatagcctgggaaacccaacccacatcctgagaatcggcgagagctataaggagaagcagcggaccatccaggccaagaaggaggtggagcagcggagagccggcggctacagccggaagtacgccagcaaagccaagaatctggcagacgatatggtgagaaacaccgctagagatctgctgtactacgccgtgacccaggatgccatgctgatcttcgccaacctgagccggggcttcggccggcagggcaagcggaccttcatggccgagagacagtacacacggatggaggactggctgaccgccaagctggcctacgagggcctgagcaagacctacctgtccaagacactggcccagtacacctccaagacatgcagcaactgtgggtttaccatcaccagcgccgactacgacagggtgctggagaagctgaagaagacagcaacaggctggatgaccacaattaacggcaaggagctgaaggtggagggccagattacctactacaacagatacaagagacagaacgtagtcaaggacctgtccgtcgagctggatagactgagcgaagaatctgtgaacaacgacatctcctcctggacaaagggcagaagcggagaagctctgagcctcctgaagaaaagattctcccatagacccgtgcaggagaagttcgtgtgcctgaactgcggcttcgagacacacgcagccgagcaagccgccctgaacatcgccagatcctggctgttcctgcggagccaggagtacaagaaataccagacaaacaagacaaccggcaacaccgataagagagccttcgtcgagacctggcagtccttttaccggaagaagcttaaggaggtgtggaaacctgccgtgcggtctggcggatctggcggaggctccacaagcttccagggcagcgtgaccttcagggacgtggccatcgacttcagccaggaggagtgggagtggctgcagcccgcccagagggacctgtacaggcacgtgatgctggagaactacggccacctggtgagcctggccggcttcaacatcagcaagccctacgtggtgagcctgctggagcagggcagggagccctggctggtgaagggcgacgtgaggagggaccccttcagcgagagcaacggcaccagccccaagaaaaagagaaaagtctaagctgccttctgcggggcttgccttctggccatgcccttcttctctcccttgcacctgtacctcttggtctttgaataaagcctgagtaggaaggctagcaaaaaaaaaaaaaaaaaaaaaaaaaaaaaaaaaaaaaaaaaaaaaaaaaaaaaaaaaaaaaaaaaaaaaaaaaaaaaaaa

SEQ ID NO: 7110 - RNA, 5797 nt, synthetic construct
  source 1..5797: mol_type = other RNA
aggaaataagagagaaaagaagagtaagaagaaatataagagccaccatggcccctaagaagaagcgtaaagtgagccggatggaacgcctcgtctacgaggtgcggcagaagtgcagaaacatcgaggacatctgcatctcctgcggatctctgaacgtgaccctggagcacccactgttcatcggcggcatgtgccagaactgtaaaaactgttttctggagtgtgcctatcaatacgacgatgacggctaccagagctactgcaccatctgttgcggcggaagagaggtgctgatgtgtggaaataacaactgctgccggtgcttctgcgtggaatgcgtggacctgctggtgggccccggcgccgcccaggccgctattaaggaagatccttggaactgctacatgtgcggccacaagggcacatacggcctgctgagacggagagaggactggcctagcagactgcagatgttcttcgccaataaccacgaccaggagttcgacccccctaaggtgtaccctcccgtccccgccgagaagagaaagcccatccgggtcctgagcctgttcgatggcatcgccaccggtctgctggtgctgaaggacctgggcatccaggtggataggtacattgcctccgaggtgtgcgaggactccatcaccgtgggaatggtgcgtcatcagggcaagatcatgtacgtgggcgacgtgcggagcgtgacacagaagcatatccaggagtggggccctttcgacctggtgatcggcggcagcccttgcaatgacctgagcatcgtgaacccagcccggaagggcctgtacgagggaaccggcagactgttcttcgagttttacagactgctgcacgacgcccggcctaaggaaggcgacgaccggcccttcttttggctgttcgagaatgtggtggccatgggagtcagcgacaagcgggatattagccggttcctggagagcaaccccgtgatgatcgatgccaaggaagtgagcgccgcccaccgggccagatacttctggggcaatctgcctggcatgaacagacccctggccagcaccgtgaacgacaagctggagctgcaggagtgcctggagcacggccggatcgccaagttcagcaaggtgagaaccatcaccacccgaagcaacagcatcaaacaaggcaaggaccagcactttcctgtgttcatgaacgagaaggaggacatcctgtggtgtaccgagatggagagagtgttcgggttcccagtccactacacagatgtcagcaacatgtctagactggccagacagagactgctgggaagaagctggtccgtccctgtgatcagacacctgttcgcccctctgaaggagtacttcgcctgcgtgagcagcggcaacagcaacgccaacagccggggccccagcttctctagcggcctggtgccactgtccctgagagggagccacatgggccccatggagatctacaaaaccgtgagcgcctggaagcggcagcctgtgcgcgtgctgagcctgtttcggaatatcgataaagtcctgaaaagcctgggattcctggagagcggctctggctccggcggtggcaccctgaagtacgtggaggatgtgacaaacgtggtcagacgggatgtggagaagtggggccccttcgatctggtgtacggcagcacccaacccctgggcagctcttgtgaccggtgccctggctggtacatgtttcagttccaccggatcctgcagtacgccctgccgagacaggagtcccagcggccattcttttggattttcatggacaacttgctgctgaccgaggatgaccaggaaactaccactcggttcctgcagaccgaagccgtgaccctgcaggacgtgagaggccgggactaccagaacgccatgcgggtgtggtccaacatccctggactgaaaagcaagcacgcacctctgacccctaaagaagaggagtacctgcaggcccaggtgcggagcagaagcaagctggacgcccctaaggtggatctgctggtgaagaattgcctcctgcccctgagagagtacttcaagtatttcagccagaatagtctgcccctgggcggcccaagcagcggcgcccctcctcccagcggcggcagcccagccggctccccaacctctaccgaggagggcacctctgagtccgccacccccgagagcggccctggcacctccaccgagcccagcgagggcagcgcacccggcagccctgccggcagccccacctccacagaggagggaaccagcaccgagcccagcgaaggcagcgccccaggcaccagcaccgagcctagtgagggcggctctggcggcggcagcgcccaggagattaaacggatcaacaagatcagaagaagacttgtgaaagacagcaacaccaagaaggccggcaagacaggccccatgaaaaccctgctggttagagtgatgacacccgatctgagagagcggctggaaaacctgagaaagaagcctgaaaatatcccccagcccatcagcaatacatctagagccaacctgaataagctgctgaccgattacaccgaaatgaagaaggcgatcctgcatgtgtactgggaagagttccagaaggaccctgtgggcctgatgagccgggtggcccagcctgccagcaagaagatcgatcagaacaagctgaaacctgagatggacgagaagggcaacctgaccaccgccggctttgcctgctctcagtgtggccagcccctgttcgtgtacaagctggagcaggtgtctgagaagggcaaggcttacaccaactacttcggacggtgcaatgtggccgagcacgaaaagctgatcctgctggcccagctgaagcccgagaaggatagcgacgaagccgtgacatatagcctgggaaagtttgggcagagggccctggatttctacagcattcatgtgaccaaggagtccacccaccccgtgaagcccctggcccagatcgccggaaacagatacgcctccggacctgtgggaaaggccctgagcgacgcatgtatgggcacaatcgcctccttcctgtctaagtaccaggacatcatcatcgaacaccagaaggtggtgaagggcaaccagaagagactggagagcctgcgggagctggccggcaaggaaaacctggaataccctagcgtgaccctgccacctcagcctcacaccaaggagggcgttgatgcctacaacgaagtgatcgcccgggtgcgaatgtgggtgaacctgaacctgtggcagaagctgaagctaagcagagatgatgccaagcctctgctgagactgaagggattcccttcctttcctctggtcgagagacaggccaacgaagtggactggtgggacatggtgtgtaacgtgaagaagctgatcaacgagaaaaaggaggatggcaaggtgttttggcagaatctggctggctacaagagacaggaagccctgagaccatacctgagcagcgaggaagatcggaagaagggaaagaaattcgctcggtaccagctgggcgacctgctgctgcacctggaaaagaagcacggcgaggactggggaaaggtgtacgacgaggcctgggagcggattgacaagaaagtggaaggcctgagcaagcacatcaagctggaagaggaacggagaagcgaggacgcccagagcaaggccgccctgaccgactggctgcgggctaaggccagcttcgtgatcgagggcctgaaggaggccgacaaggacgagttctgcagatgcgagctgaagctgcagaagtggtacggggacctgcggggaaagcccttcgccatcgaagccgagaacagcatcctggacatcagcggcttcagcaagcagtacaactgtgccttcatctggcagaaggacggcgtgaagaagctgaacctgtacctgatcatcaactacttcaagggcggcaagctgcggttcaagaagatcaaacctgaagccttcgaagccaacagattctacaccgtgatcaacaaaaagagcggcgagatcgtgcccatggaggtgaacttcaacttcgacgaccccaacctgatcatcctgcctctggcctttggcaagagacagggcagagaattcatctggaacgacctgctgtccctggaaaccggcagcctgaagctggccaacggaagagtgatcgagaagacactgtacaacagaagaacccggcaggatgagcctgccctgttcgtggccctgaccttcgagcggcgggaggtcctggactcctccaatatcaaaccaatgaacctgatcggcgtggcaagaggcgaaaacatccccgccgtgatcgccctgaccgaccccgagggctgcccactgagccggtttaaggatagcctgggaaacccaacccacatcctgagaatcggcgagagctataaggagaagcagcggaccatccaggccaagaaggaggtggagcagcggagagccggcggctacagccggaagtacgccagcaaagccaagaatctggcagacgatatggtgagaaacaccgctagagatctgctgtactacgccgtgacccaggatgccatgctgatcttcgccaacctgagccggggcttcggccggcagggcaagcggaccttcatggccgagagacagtacacacggatggaggactggctgaccgccaagctggcctacgagggcctgagcaagacctacctgtccaagacactggcccagtacacctccaagacatgcagcaactgtgggtttaccatcaccagcgccgactacgacagggtgctggagaagctgaagaagacagcaacaggctggatgaccacaattaacggcaaggagctgaaggtggagggccagattacctactacaacagatacaagagacagaacgtagtcaaggacctgtccgtcgagctggatagactgagcgaagaatctgtgaacaacgacatctcctcctggacaaagggcagaagcggagaagctctgagcctcctgaagaaaagattctcccatagacccgtgcaggagaagttcgtgtgcctgaactgcggcttcgagacacacgcagccgagcaagccgccctgaacatcgccagatcctggctgttcctgcggagccaggagtacaagaaataccagacaaacaagacaaccggcaacaccgataagagagccttcgtcgagacctggcagtccttttaccggaagaagcttaaggaggtgtggaaacctgccgtgcggtctggcggatctggcggaggctccacaagcgtggtggagctgctgaccttcgaggaggtggccgtgtacttcagcaaggaggagtgggccctgctggaccccggccagagggccctgtacagggacgtgatgcaggagaactacgaggccgtgagctggctgggcttccccgtgagcaagaccgacgtgatcagctgggtggagagggaggaggagttctgggtgcccgaccccaggagctgcgaggagggcgtgatcatcagcaacacccacaccagccccaagaaaaagagaaaagtctaagctgccttctgcggggcttgccttctggccatgcccttcttctctcccttgcacctgtacctcttggtctttgaataaagcctgagtaggaaggctagcaaaaaaaaaaaaaaaaaaaaaaaaaaaaaaaaaaaaaaaaaaaaaaaaaaaaaaaaaaaaaaaaaaaaaaaaaaaaaaaa

SEQ ID NO: 7111 - RNA, 5797 nt, synthetic construct
  source 1..5797: mol_type = other RNA
aggaaataagagagaaaagaagagtaagaagaaatataagagccaccatggcccctaagaagaagcgtaaagtgagccggatggaacgcctcgtctacgaggtgcggcagaagtgcagaaacatcgaggacatctgcatctcctgcggatctctgaacgtgaccctggagcacccactgttcatcggcggcatgtgccagaactgtaaaaactgttttctggagtgtgcctatcaatacgacgatgacggctaccagagctactgcaccatctgttgcggcggaagagaggtgctgatgtgtggaaataacaactgctgccggtgcttctgcgtggaatgcgtggacctgctggtgggccccggcgccgcccaggccgctattaaggaagatccttggaactgctacatgtgcggccacaagggcacatacggcctgctgagacggagagaggactggcctagcagactgcagatgttcttcgccaataaccacgaccaggagttcgacccccctaaggtgtaccctcccgtccccgccgagaagagaaagcccatccgggtcctgagcctgttcgatggcatcgccaccggtctgctggtgctgaaggacctgggcatccaggtggataggtacattgcctccgaggtgtgcgaggactccatcaccgtgggaatggtgcgtcatcagggcaagatcatgtacgtgggcgacgtgcggagcgtgacacagaagcatatccaggagtggggccctttcgacctggtgatcggcggcagcccttgcaatgacctgagcatcgtgaacccagcccggaagggcctgtacgagggaaccggcagactgttcttcgagttttacagactgctgcacgacgcccggcctaaggaaggcgacgaccggcccttcttttggctgttcgagaatgtggtggccatgggagtcagcgacaagcgggatattagccggttcctggagagcaaccccgtgatgatcgatgccaaggaagtgagcgccgcccaccgggccagatacttctggggcaatctgcctggcatgaacagacccctggccagcaccgtgaacgacaagctggagctgcaggagtgcctggagcacggccggatcgccaagttcagcaaggtgagaaccatcaccacccgaagcaacagcatcaaacaaggcaaggaccagcactttcctgtgttcatgaacgagaaggaggacatcctgtggtgtaccgagatggagagagtgttcgggttcccagtccactacacagatgtcagcaacatgtctagactggccagacagagactgctgggaagaagctggtccgtccctgtgatcagacacctgttcgcccctctgaaggagtacttcgcctgcgtgagcagcggcaacagcaacgccaacagccggggccccagcttctctagcggcctggtgccactgtccctgagagggagccacatgggccccatggagatctacaaaaccgtgagcgcctggaagcggcagcctgtgcgcgtgctgagcctgtttcggaatatcgataaagtcctgaaaagcctgggattcctggagagcggctctggctccggcggtggcaccctgaagtacgtggaggatgtgacaaacgtggtcagacgggatgtggagaagtggggccccttcgatctggtgtacggcagcacccaacccctgggcagctcttgtgaccggtgccctggctggtacatgtttcagttccaccggatcctgcagtacgccctgccgagacaggagtcccagcggccattcttttggattttcatggacaacttgctgctgaccgaggatgaccaggaaactaccactcggttcctgcagaccgaagccgtgaccctgcaggacgtgagaggccgggactaccagaacgccatgcgggtgtggtccaacatccctggactgaaaagcaagcacgcacctctgacccctaaagaagaggagtacctgcaggcccaggtgcggagcagaagcaagctggacgcccctaaggtggatctgctggtgaagaattgcctcctgcccctgagagagtacttcaagtatttcagccagaatagtctgcccctgggcggcccaagcagcggcgcccctcctcccagcggcggcagcccagccggctccccaacctctaccgaggagggcacctctgagtccgccacccccgagagcggccctggcacctccaccgagcccagcgagggcagcgcacccggcagccctgccggcagccccacctccacagaggagggaaccagcaccgagcccagcgaaggcagcgccccaggcaccagcaccgagcctagtgagggcggctctggcggcggcagcgcccaggagattaaacggatcaacaagatcagaagaagacttgtgaaagacagcaacaccaagaaggccggcaagacaggccccatgaaaaccctgctggttagagtgatgacacccgatctgagagagcggctggaaaacctgagaaagaagcctgaaaatatcccccagcccatcagcaatacatctagagccaacctgaataagctgctgaccgattacaccgaaatgaagaaggcgatcctgcatgtgtactgggaagagttccagaaggaccctgtgggcctgatgagccgggtggcccagcctgccagcaagaagatcgatcagaacaagctgaaacctgagatggacgagaagggcaacctgaccaccgccggctttgcctgctctcagtgtggccagcccctgttcgtgtacaagctggagcaggtgtctgagaagggcaaggcttacaccaactacttcggacggtgcaatgtggccgagcacgaaaagctgatcctgctggcccagctgaagcccgagaaggatagcgacgaagccgtgacatatagcctgggaaagtttgggcagagggccctggatttctacagcattcatgtgaccaaggagtccacccaccccgtgaagcccctggcccagatcgccggaaacagatacgcctccggacctgtgggaaaggccctgagcgacgcatgtatgggcacaatcgcctccttcctgtctaagtaccaggacatcatcatcgaacaccagaaggtggtgaagggcaaccagaagagactggagagcctgcgggagctggccggcaaggaaaacctggaataccctagcgtgaccctgccacctcagcctcacaccaaggagggcgttgatgcctacaacgaagtgatcgcccgggtgcgaatgtgggtgaacctgaacctgtggcagaagctgaagctaagcagagatgatgccaagcctctgctgagactgaagggattcccttcctttcctctggtcgagagacaggccaacgaagtggactggtgggacatggtgtgtaacgtgaagaagctgatcaacgagaaaaaggaggatggcaaggtgttttggcagaatctggctggctacaagagacaggaagccctgagaccatacctgagcagcgaggaagatcggaagaagggaaagaaattcgctcggtaccagctgggcgacctgctgctgcacctggaaaagaagcacggcgaggactggggaaaggtgtacgacgaggcctgggagcggattgacaagaaagtggaaggcctgagcaagcacatcaagctggaagaggaacggagaagcgaggacgcccagagcaaggccgccctgaccgactggctgcgggctaaggccagcttcgtgatcgagggcctgaaggaggccgacaaggacgagttctgcagatgcgagctgaagctgcagaagtggtacggggacctgcggggaaagcccttcgccatcgaagccgagaacagcatcctggacatcagcggcttcagcaagcagtacaactgtgccttcatctggcagaaggacggcgtgaagaagctgaacctgtacctgatcatcaactacttcaagggcggcaagctgcggttcaagaagatcaaacctgaagccttcgaagccaacagattctacaccgtgatcaacaaaaagagcggcgagatcgtgcccatggaggtgaacttcaacttcgacgaccccaacctgatcatcctgcctctggcctttggcaagagacagggcagagaattcatctggaacgacctgctgtccctggaaaccggcagcctgaagctggccaacggaagagtgatcgagaagacactgtacaacagaagaacccggcaggatgagcctgccctgttcgtggccctgaccttcgagcggcgggaggtcctggactcctccaatatcaaaccaatgaacctgatcggcgtggcaagaggcgaaaacatccccgccgtgatcgccctgaccgaccccgagggctgcccactgagccggtttaaggatagcctgggaaacccaacccacatcctgagaatcggcgagagctataaggagaagcagcggaccatccaggccaagaaggaggtggagcagcggagagccggcggctacagccggaagtacgccagcaaagccaagaatctggcagacgatatggtgagaaacaccgctagagatctgctgtactacgccgtgacccaggatgccatgctgatcttcgccaacctgagccggggcttcggccggcagggcaagcggaccttcatggccgagagacagtacacacggatggaggactggctgaccgccaagctggcctacgagggcctgagcaagacctacctgtccaagacactggcccagtacacctccaagacatgcagcaactgtgggtttaccatcaccagcgccgactacgacagggtgctggagaagctgaagaagacagcaacaggctggatgaccacaattaacggcaaggagctgaaggtggagggccagattacctactacaacagatacaagagacagaacgtagtcaaggacctgtccgtcgagctggatagactgagcgaagaatctgtgaacaacgacatctcctcctggacaaagggcagaagcggagaagctctgagcctcctgaagaaaagattctcccatagacccgtgcaggagaagttcgtgtgcctgaactgcggcttcgagacacacgcagccgagcaagccgccctgaacatcgccagatcctggctgttcctgcggagccaggagtacaagaaataccagacaaacaagacaaccggcaacaccgataagagagccttcgtcgagacctggcagtccttttaccggaagaagcttaaggaggtgtggaaacctgccgtgcggtctggcggatctggcggaggctccacaagcagcaaggtgcccgtgaccttcggcgacctggccatctacttcagccaggaggagtgggagtggctgcaccccgcccagagggacctgtacaggcacgtgatgctggagaactacggccacctggtgagcctgggcctgaacatcagcaagccctacgtggtgagcctgctggagcagggcagggacccctggctggacaacagggacgtgaggagggacctgttcagcgagagcaagggcgagaccagccccaagaaaaagagaaaagtctaagctgccttctgcggggcttgccttctggccatgcccttcttctctcccttgcacctgtacctcttggtctttgaataaagcctgagtaggaaggctagcaaaaaaaaaaaaaaaaaaaaaaaaaaaaaaaaaaaaaaaaaaaaaaaaaaaaaaaaaaaaaaaaaaaaaaaaaaaaaaaa

SEQ ID NO: 7112 - RNA, 5797 nt, synthetic construct
  source 1..5797: mol_type = other RNA
aggaaataagagagaaaagaagagtaagaagaaatataagagccaccatggcccctaagaagaagcgtaaagtgagccggatggaacgcctcgtctacgaggtgcggcagaagtgcagaaacatcgaggacatctgcatctcctgcggatctctgaacgtgaccctggagcacccactgttcatcggcggcatgtgccagaactgtaaaaactgttttctggagtgtgcctatcaatacgacgatgacggctaccagagctactgcaccatctgttgcggcggaagagaggtgctgatgtgtggaaataacaactgctgccggtgcttctgcgtggaatgcgtggacctgctggtgggccccggcgccgcccaggccgctattaaggaagatccttggaactgctacatgtgcggccacaagggcacatacggcctgctgagacggagagaggactggcctagcagactgcagatgttcttcgccaataaccacgaccaggagttcgacccccctaaggtgtaccctcccgtccccgccgagaagagaaagcccatccgggtcctgagcctgttcgatggcatcgccaccggtctgctggtgctgaaggacctgggcatccaggtggataggtacattgcctccgaggtgtgcgaggactccatcaccgtgggaatggtgcgtcatcagggcaagatcatgtacgtgggcgacgtgcggagcgtgacacagaagcatatccaggagtggggccctttcgacctggtgatcggcggcagcccttgcaatgacctgagcatcgtgaacccagcccggaagggcctgtacgagggaaccggcagactgttcttcgagttttacagactgctgcacgacgcccggcctaaggaaggcgacgaccggcccttcttttggctgttcgagaatgtggtggccatgggagtcagcgacaagcgggatattagccggttcctggagagcaaccccgtgatgatcgatgccaaggaagtgagcgccgcccaccgggccagatacttctggggcaatctgcctggcatgaacagacccctggccagcaccgtgaacgacaagctggagctgcaggagtgcctggagcacggccggatcgccaagttcagcaaggtgagaaccatcaccacccgaagcaacagcatcaaacaaggcaaggaccagcactttcctgtgttcatgaacgagaaggaggacatcctgtggtgtaccgagatggagagagtgttcgggttcccagtccactacacagatgtcagcaacatgtctagactggccagacagagactgctgggaagaagctggtccgtccctgtgatcagacacctgttcgcccctctgaaggagtacttcgcctgcgtgagcagcggcaacagcaacgccaacagccggggccccagcttctctagcggcctggtgccactgtccctgagagggagccacatgggccccatggagatctacaaaaccgtgagcgcctggaagcggcagcctgtgcgcgtgctgagcctgtttcggaatatcgataaagtcctgaaaagcctgggattcctggagagcggctctggctccggcggtggcaccctgaagtacgtggaggatgtgacaaacgtggtcagacgggatgtggagaagtggggccccttcgatctggtgtacggcagcacccaacccctgggcagctcttgtgaccggtgccctggctggtacatgtttcagttccaccggatcctgcagtacgccctgccgagacaggagtcccagcggccattcttttggattttcatggacaacttgctgctgaccgaggatgaccaggaaactaccactcggttcctgcagaccgaagccgtgaccctgcaggacgtgagaggccgggactaccagaacgccatgcgggtgtggtccaacatccctggactgaaaagcaagcacgcacctctgacccctaaagaagaggagtacctgcaggcccaggtgcggagcagaagcaagctggacgcccctaaggtggatctgctggtgaagaattgcctcctgcccctgagagagtacttcaagtatttcagccagaatagtctgcccctgggcggcccaagcagcggcgcccctcctcccagcggcggcagcccagccggctccccaacctctaccgaggagggcacctctgagtccgccacccccgagagcggccctggcacctccaccgagcccagcgagggcagcgcacccggcagccctgccggcagccccacctccacagaggagggaaccagcaccgagcccagcgaaggcagcgccccaggcaccagcaccgagcctagtgagggcggctctggcggcggcagcgcccaggagattaaacggatcaacaagatcagaagaagacttgtgaaagacagcaacaccaagaaggccggcaagacaggccccatgaaaaccctgctggttagagtgatgacacccgatctgagagagcggctggaaaacctgagaaagaagcctgaaaatatcccccagcccatcagcaatacatctagagccaacctgaataagctgctgaccgattacaccgaaatgaagaaggcgatcctgcatgtgtactgggaagagttccagaaggaccctgtgggcctgatgagccgggtggcccagcctgccagcaagaagatcgatcagaacaagctgaaacctgagatggacgagaagggcaacctgaccaccgccggctttgcctgctctcagtgtggccagcccctgttcgtgtacaagctggagcaggtgtctgagaagggcaaggcttacaccaactacttcggacggtgcaatgtggccgagcacgaaaagctgatcctgctggcccagctgaagcccgagaaggatagcgacgaagccgtgacatatagcctgggaaagtttgggcagagggccctggatttctacagcattcatgtgaccaaggagtccacccaccccgtgaagcccctggcccagatcgccggaaacagatacgcctccggacctgtgggaaaggccctgagcgacgcatgtatgggcacaatcgcctccttcctgtctaagtaccaggacatcatcatcgaacaccagaaggtggtgaagggcaaccagaagagactggagagcctgcgggagctggccggcaaggaaaacctggaataccctagcgtgaccctgccacctcagcctcacaccaaggagggcgttgatgcctacaacgaagtgatcgcccgggtgcgaatgtgggtgaacctgaacctgtggcagaagctgaagctaagcagagatgatgccaagcctctgctgagactgaagggattcccttcctttcctctggtcgagagacaggccaacgaagtggactggtgggacatggtgtgtaacgtgaagaagctgatcaacgagaaaaaggaggatggcaaggtgttttggcagaatctggctggctacaagagacaggaagccctgagaccatacctgagcagcgaggaagatcggaagaagggaaagaaattcgctcggtaccagctgggcgacctgctgctgcacctggaaaagaagcacggcgaggactggggaaaggtgtacgacgaggcctgggagcggattgacaagaaagtggaaggcctgagcaagcacatcaagctggaagaggaacggagaagcgaggacgcccagagcaaggccgccctgaccgactggctgcgggctaaggccagcttcgtgatcgagggcctgaaggaggccgacaaggacgagttctgcagatgcgagctgaagctgcagaagtggtacggggacctgcggggaaagcccttcgccatcgaagccgagaacagcatcctggacatcagcggcttcagcaagcagtacaactgtgccttcatctggcagaaggacggcgtgaagaagctgaacctgtacctgatcatcaactacttcaagggcggcaagctgcggttcaagaagatcaaacctgaagccttcgaagccaacagattctacaccgtgatcaacaaaaagagcggcgagatcgtgcccatggaggtgaacttcaacttcgacgaccccaacctgatcatcctgcctctggcctttggcaagagacagggcagagaattcatctggaacgacctgctgtccctggaaaccggcagcctgaagctggccaacggaagagtgatcgagaagacactgtacaacagaagaacccggcaggatgagcctgccctgttcgtggccctgaccttcgagcggcgggaggtcctggactcctccaatatcaaaccaatgaacctgatcggcgtggcaagaggcgaaaacatccccgccgtgatcgccctgaccgaccccgagggctgcccactgagccggtttaaggatagcctgggaaacccaacccacatcctgagaatcggcgagagctataaggagaagcagcggaccatccaggccaagaaggaggtggagcagcggagagccggcggctacagccggaagtacgccagcaaagccaagaatctggcagacgatatggtgagaaacaccgctagagatctgctgtactacgccgtgacccaggatgccatgctgatcttcgccaacctgagccggggcttcggccggcagggcaagcggaccttcatggccgagagacagtacacacggatggaggactggctgaccgccaagctggcctacgagggcctgagcaagacctacctgtccaagacactggcccagtacacctccaagacatgcagcaactgtgggtttaccatcaccagcgccgactacgacagggtgctggagaagctgaagaagacagcaacaggctggatgaccacaattaacggcaaggagctgaaggtggagggccagattacctactacaacagatacaagagacagaacgtagtcaaggacctgtccgtcgagctggatagactgagcgaagaatctgtgaacaacgacatctcctcctggacaaagggcagaagcggagaagctctgagcctcctgaagaaaagattctcccatagacccgtgcaggagaagttcgtgtgcctgaactgcggcttcgagacacacgcagccgagcaagccgccctgaacatcgccagatcctggctgttcctgcggagccaggagtacaagaaataccagacaaacaagacaaccggcaacaccgataagagagccttcgtcgagacctggcagtccttttaccggaagaagcttaaggaggtgtggaaacctgccgtgcggtctggcggatctggcggaggctccacaagcttccaggagctggtgaccttcagggacgtggccatcgacttcagcaggcaggagtgggagtacctggaccccaaccagagggacctgtacagggacgtgatgctggagaactacagcaacctggtgagcctgggccacagcatcagcaagcccgacgtggtggacctgctggagcagggcaaggagccctggatgctgctgggcgaggagacccagtacagcggcagcaaccccgagcccgtgaccagccccaagaaaaagagaaaagtctaagctgccttctgcggggcttgccttctggccatgcccttcttctctcccttgcacctgtacctcttggtctttgaataaagcctgagtaggaaggctagcaaaaaaaaaaaaaaaaaaaaaaaaaaaaaaaaaaaaaaaaaaaaaaaaaaaaaaaaaaaaaaaaaaaaaaaaaaaaaaaa

SEQ ID NO: 7113 - RNA, 5797 nt, synthetic construct
  source 1..5797: mol_type = other RNA
aggaaataagagagaaaagaagagtaagaagaaatataagagccaccatggcccctaagaagaagcgtaaagtgagccggatggaacgcctcgtctacgaggtgcggcagaagtgcagaaacatcgaggacatctgcatctcctgcggatctctgaacgtgaccctggagcacccactgttcatcggcggcatgtgccagaactgtaaaaactgttttctggagtgtgcctatcaatacgacgatgacggctaccagagctactgcaccatctgttgcggcggaagagaggtgctgatgtgtggaaataacaactgctgccggtgcttctgcgtggaatgcgtggacctgctggtgggccccggcgccgcccaggccgctattaaggaagatccttggaactgctacatgtgcggccacaagggcacatacggcctgctgagacggagagaggactggcctagcagactgcagatgttcttcgccaataaccacgaccaggagttcgacccccctaaggtgtaccctcccgtccccgccgagaagagaaagcccatccgggtcctgagcctgttcgatggcatcgccaccggtctgctggtgctgaaggacctgggcatccaggtggataggtacattgcctccgaggtgtgcgaggactccatcaccgtgggaatggtgcgtcatcagggcaagatcatgtacgtgggcgacgtgcggagcgtgacacagaagcatatccaggagtggggccctttcgacctggtgatcggcggcagcccttgcaatgacctgagcatcgtgaacccagcccggaagggcctgtacgagggaaccggcagactgttcttcgagttttacagactgctgcacgacgcccggcctaaggaaggcgacgaccggcccttcttttggctgttcgagaatgtggtggccatgggagtcagcgacaagcgggatattagccggttcctggagagcaaccccgtgatgatcgatgccaaggaagtgagcgccgcccaccgggccagatacttctggggcaatctgcctggcatgaacagacccctggccagcaccgtgaacgacaagctggagctgcaggagtgcctggagcacggccggatcgccaagttcagcaaggtgagaaccatcaccacccgaagcaacagcatcaaacaaggcaaggaccagcactttcctgtgttcatgaacgagaaggaggacatcctgtggtgtaccgagatggagagagtgttcgggttcccagtccactacacagatgtcagcaacatgtctagactggccagacagagactgctgggaagaagctggtccgtccctgtgatcagacacctgttcgcccctctgaaggagtacttcgcctgcgtgagcagcggcaacagcaacgccaacagccggggccccagcttctctagcggcctggtgccactgtccctgagagggagccacatgggccccatggagatctacaaaaccgtgagcgcctggaagcggcagcctgtgcgcgtgctgagcctgtttcggaatatcgataaagtcctgaaaagcctgggattcctggagagcggctctggctccggcggtggcaccctgaagtacgtggaggatgtgacaaacgtggtcagacgggatgtggagaagtggggccccttcgatctggtgtacggcagcacccaacccctgggcagctcttgtgaccggtgccctggctggtacatgtttcagttccaccggatcctgcagtacgccctgccgagacaggagtcccagcggccattcttttggattttcatggacaacttgctgctgaccgaggatgaccaggaaactaccactcggttcctgcagaccgaagccgtgaccctgcaggacgtgagaggccgggactaccagaacgccatgcgggtgtggtccaacatccctggactgaaaagcaagcacgcacctctgacccctaaagaagaggagtacctgcaggcccaggtgcggagcagaagcaagctggacgcccctaaggtggatctgctggtgaagaattgcctcctgcccctgagagagtacttcaagtatttcagccagaatagtctgcccctgggcggcccaagcagcggcgcccctcctcccagcggcggcagcccagccggctccccaacctctaccgaggagggcacctctgagtccgccacccccgagagcggccctggcacctccaccgagcccagcgagggcagcgcacccggcagccctgccggcagccccacctccacagaggagggaaccagcaccgagcccagcgaaggcagcgccccaggcaccagcaccgagcctagtgagggcggctctggcggcggcagcgcccaggagattaaacggatcaacaagatcagaagaagacttgtgaaagacagcaacaccaagaaggccggcaagacaggccccatgaaaaccctgctggttagagtgatgacacccgatctgagagagcggctggaaaacctgagaaagaagcctgaaaatatcccccagcccatcagcaatacatctagagccaacctgaataagctgctgaccgattacaccgaaatgaagaaggcgatcctgcatgtgtactgggaagagttccagaaggaccctgtgggcctgatgagccgggtggcccagcctgccagcaagaagatcgatcagaacaagctgaaacctgagatggacgagaagggcaacctgaccaccgccggctttgcctgctctcagtgtggccagcccctgttcgtgtacaagctggagcaggtgtctgagaagggcaaggcttacaccaactacttcggacggtgcaatgtggccgagcacgaaaagctgatcctgctggcccagctgaagcccgagaaggatagcgacgaagccgtgacatatagcctgggaaagtttgggcagagggccctggatttctacagcattcatgtgaccaaggagtccacccaccccgtgaagcccctggcccagatcgccggaaacagatacgcctccggacctgtgggaaaggccctgagcgacgcatgtatgggcacaatcgcctccttcctgtctaagtaccaggacatcatcatcgaacaccagaaggtggtgaagggcaaccagaagagactggagagcctgcgggagctggccggcaaggaaaacctggaataccctagcgtgaccctgccacctcagcctcacaccaaggagggcgttgatgcctacaacgaagtgatcgcccgggtgcgaatgtgggtgaacctgaacctgtggcagaagctgaagctaagcagagatgatgccaagcctctgctgagactgaagggattcccttcctttcctctggtcgagagacaggccaacgaagtggactggtgggacatggtgtgtaacgtgaagaagctgatcaacgagaaaaaggaggatggcaaggtgttttggcagaatctggctggctacaagagacaggaagccctgagaccatacctgagcagcgaggaagatcggaagaagggaaagaaattcgctcggtaccagctgggcgacctgctgctgcacctggaaaagaagcacggcgaggactggggaaaggtgtacgacgaggcctgggagcggattgacaagaaagtggaaggcctgagcaagcacatcaagctggaagaggaacggagaagcgaggacgcccagagcaaggccgccctgaccgactggctgcgggctaaggccagcttcgtgatcgagggcctgaaggaggccgacaaggacgagttctgcagatgcgagctgaagctgcagaagtggtacggggacctgcggggaaagcccttcgccatcgaagccgagaacagcatcctggacatcagcggcttcagcaagcagtacaactgtgccttcatctggcagaaggacggcgtgaagaagctgaacctgtacctgatcatcaactacttcaagggcggcaagctgcggttcaagaagatcaaacctgaagccttcgaagccaacagattctacaccgtgatcaacaaaaagagcggcgagatcgtgcccatggaggtgaacttcaacttcgacgaccccaacctgatcatcctgcctctggcctttggcaagagacagggcagagaattcatctggaacgacctgctgtccctggaaaccggcagcctgaagctggccaacggaagagtgatcgagaagacactgtacaacagaagaacccggcaggatgagcctgccctgttcgtggccctgaccttcgagcggcgggaggtcctggactcctccaatatcaaaccaatgaacctgatcggcgtggcaagaggcgaaaacatccccgccgtgatcgccctgaccgaccccgagggctgcccactgagccggtttaaggatagcctgggaaacccaacccacatcctgagaatcggcgagagctataaggagaagcagcggaccatccaggccaagaaggaggtggagcagcggagagccggcggctacagccggaagtacgccagcaaagccaagaatctggcagacgatatggtgagaaacaccgctagagatctgctgtactacgccgtgacccaggatgccatgctgatcttcgccaacctgagccggggcttcggccggcagggcaagcggaccttcatggccgagagacagtacacacggatggaggactggctgaccgccaagctggcctacgagggcctgagcaagacctacctgtccaagacactggcccagtacacctccaagacatgcagcaactgtgggtttaccatcaccagcgccgactacgacagggtgctggagaagctgaagaagacagcaacaggctggatgaccacaattaacggcaaggagctgaaggtggagggccagattacctactacaacagatacaagagacagaacgtagtcaaggacctgtccgtcgagctggatagactgagcgaagaatctgtgaacaacgacatctcctcctggacaaagggcagaagcggagaagctctgagcctcctgaagaaaagattctcccatagacccgtgcaggagaagttcgtgtgcctgaactgcggcttcgagacacacgcagccgagcaagccgccctgaacatcgccagatcctggctgttcctgcggagccaggagtacaagaaataccagacaaacaagacaaccggcaacaccgataagagagccttcgtcgagacctggcagtccttttaccggaagaagcttaaggaggtgtggaaacctgccgtgcggtctggcggatctggcggaggctccacaagcgccaggggccccgtgagcttcgccgacgtggccgtgtacttcagccccgaggagtggggcaggctgaggcccgcccagagggccctgtacagggacgtgatgagggagacctacggccacctgggcgccctgggcttccccggccccaagcccgccctgatgtgctggatggacgaggagaccgaggtgtggggccccgacgccagggaccccgaggaggccggcgagaagggcaccgagaacaccagccccaagaaaaagagaaaagtctaagctgccttctgcggggcttgccttctggccatgcccttcttctctcccttgcacctgtacctcttggtctttgaataaagcctgagtaggaaggctagcaaaaaaaaaaaaaaaaaaaaaaaaaaaaaaaaaaaaaaaaaaaaaaaaaaaaaaaaaaaaaaaaaaaaaaaaaaaaaaaa

SEQ ID NO: 7114 - RNA, 5797 nt, synthetic construct
  source 1..5797: mol_type = other RNA
aggaaataagagagaaaagaagagtaagaagaaatataagagccaccatggcccctaagaagaagcgtaaagtgagccggatggaacgcctcgtctacgaggtgcggcagaagtgcagaaacatcgaggacatctgcatctcctgcggatctctgaacgtgaccctggagcacccactgttcatcggcggcatgtgccagaactgtaaaaactgttttctggagtgtgcctatcaatacgacgatgacggctaccagagctactgcaccatctgttgcggcggaagagaggtgctgatgtgtggaaataacaactgctgccggtgcttctgcgtggaatgcgtggacctgctggtgggccccggcgccgcccaggccgctattaaggaagatccttggaactgctacatgtgcggccacaagggcacatacggcctgctgagacggagagaggactggcctagcagactgcagatgttcttcgccaataaccacgaccaggagttcgacccccctaaggtgtaccctcccgtccccgccgagaagagaaagcccatccgggtcctgagcctgttcgatggcatcgccaccggtctgctggtgctgaaggacctgggcatccaggtggataggtacattgcctccgaggtgtgcgaggactccatcaccgtgggaatggtgcgtcatcagggcaagatcatgtacgtgggcgacgtgcggagcgtgacacagaagcatatccaggagtggggccctttcgacctggtgatcggcggcagcccttgcaatgacctgagcatcgtgaacccagcccggaagggcctgtacgagggaaccggcagactgttcttcgagttttacagactgctgcacgacgcccggcctaaggaaggcgacgaccggcccttcttttggctgttcgagaatgtggtggccatgggagtcagcgacaagcgggatattagccggttcctggagagcaaccccgtgatgatcgatgccaaggaagtgagcgccgcccaccgggccagatacttctggggcaatctgcctggcatgaacagacccctggccagcaccgtgaacgacaagctggagctgcaggagtgcctggagcacggccggatcgccaagttcagcaaggtgagaaccatcaccacccgaagcaacagcatcaaacaaggcaaggaccagcactttcctgtgttcatgaacgagaaggaggacatcctgtggtgtaccgagatggagagagtgttcgggttcccagtccactacacagatgtcagcaacatgtctagactggccagacagagactgctgggaagaagctggtccgtccctgtgatcagacacctgttcgcccctctgaaggagtacttcgcctgcgtgagcagcggcaacagcaacgccaacagccggggccccagcttctctagcggcctggtgccactgtccctgagagggagccacatgggccccatggagatctacaaaaccgtgagcgcctggaagcggcagcctgtgcgcgtgctgagcctgtttcggaatatcgataaagtcctgaaaagcctgggattcctggagagcggctctggctccggcggtggcaccctgaagtacgtggaggatgtgacaaacgtggtcagacgggatgtggagaagtggggccccttcgatctggtgtacggcagcacccaacccctgggcagctcttgtgaccggtgccctggctggtacatgtttcagttccaccggatcctgcagtacgccctgccgagacaggagtcccagcggccattcttttggattttcatggacaacttgctgctgaccgaggatgaccaggaaactaccactcggttcctgcagaccgaagccgtgaccctgcaggacgtgagaggccgggactaccagaacgccatgcgggtgtggtccaacatccctggactgaaaagcaagcacgcacctctgacccctaaagaagaggagtacctgcaggcccaggtgcggagcagaagcaagctggacgcccctaaggtggatctgctggtgaagaattgcctcctgcccctgagagagtacttcaagtatttcagccagaatagtctgcccctgggcggcccaagcagcggcgcccctcctcccagcggcggcagcccagccggctccccaacctctaccgaggagggcacctctgagtccgccacccccgagagcggccctggcacctccaccgagcccagcgagggcagcgcacccggcagccctgccggcagccccacctccacagaggagggaaccagcaccgagcccagcgaaggcagcgccccaggcaccagcaccgagcctagtgagggcggctctggcggcggcagcgcccaggagattaaacggatcaacaagatcagaagaagacttgtgaaagacagcaacaccaagaaggccggcaagacaggccccatgaaaaccctgctggttagagtgatgacacccgatctgagagagcggctggaaaacctgagaaagaagcctgaaaatatcccccagcccatcagcaatacatctagagccaacctgaataagctgctgaccgattacaccgaaatgaagaaggcgatcctgcatgtgtactgggaagagttccagaaggaccctgtgggcctgatgagccgggtggcccagcctgccagcaagaagatcgatcagaacaagctgaaacctgagatggacgagaagggcaacctgaccaccgccggctttgcctgctctcagtgtggccagcccctgttcgtgtacaagctggagcaggtgtctgagaagggcaaggcttacaccaactacttcggacggtgcaatgtggccgagcacgaaaagctgatcctgctggcccagctgaagcccgagaaggatagcgacgaagccgtgacatatagcctgggaaagtttgggcagagggccctggatttctacagcattcatgtgaccaaggagtccacccaccccgtgaagcccctggcccagatcgccggaaacagatacgcctccggacctgtgggaaaggccctgagcgacgcatgtatgggcacaatcgcctccttcctgtctaagtaccaggacatcatcatcgaacaccagaaggtggtgaagggcaaccagaagagactggagagcctgcgggagctggccggcaaggaaaacctggaataccctagcgtgaccctgccacctcagcctcacaccaaggagggcgttgatgcctacaacgaagtgatcgcccgggtgcgaatgtgggtgaacctgaacctgtggcagaagctgaagctaagcagagatgatgccaagcctctgctgagactgaagggattcccttcctttcctctggtcgagagacaggccaacgaagtggactggtgggacatggtgtgtaacgtgaagaagctgatcaacgagaaaaaggaggatggcaaggtgttttggcagaatctggctggctacaagagacaggaagccctgagaccatacctgagcagcgaggaagatcggaagaagggaaagaaattcgctcggtaccagctgggcgacctgctgctgcacctggaaaagaagcacggcgaggactggggaaaggtgtacgacgaggcctgggagcggattgacaagaaagtggaaggcctgagcaagcacatcaagctggaagaggaacggagaagcgaggacgcccagagcaaggccgccctgaccgactggctgcgggctaaggccagcttcgtgatcgagggcctgaaggaggccgacaaggacgagttctgcagatgcgagctgaagctgcagaagtggtacggggacctgcggggaaagcccttcgccatcgaagccgagaacagcatcctggacatcagcggcttcagcaagcagtacaactgtgccttcatctggcagaaggacggcgtgaagaagctgaacctgtacctgatcatcaactacttcaagggcggcaagctgcggttcaagaagatcaaacctgaagccttcgaagccaacagattctacaccgtgatcaacaaaaagagcggcgagatcgtgcccatggaggtgaacttcaacttcgacgaccccaacctgatcatcctgcctctggcctttggcaagagacagggcagagaattcatctggaacgacctgctgtccctggaaaccggcagcctgaagctggccaacggaagagtgatcgagaagacactgtacaacagaagaacccggcaggatgagcctgccctgttcgtggccctgaccttcgagcggcgggaggtcctggactcctccaatatcaaaccaatgaacctgatcggcgtggcaagaggcgaaaacatccccgccgtgatcgccctgaccgaccccgagggctgcccactgagccggtttaaggatagcctgggaaacccaacccacatcctgagaatcggcgagagctataaggagaagcagcggaccatccaggccaagaaggaggtggagcagcggagagccggcggctacagccggaagtacgccagcaaagccaagaatctggcagacgatatggtgagaaacaccgctagagatctgctgtactacgccgtgacccaggatgccatgctgatcttcgccaacctgagccggggcttcggccggcagggcaagcggaccttcatggccgagagacagtacacacggatggaggactggctgaccgccaagctggcctacgagggcctgagcaagacctacctgtccaagacactggcccagtacacctccaagacatgcagcaactgtgggtttaccatcaccagcgccgactacgacagggtgctggagaagctgaagaagacagcaacaggctggatgaccacaattaacggcaaggagctgaaggtggagggccagattacctactacaacagatacaagagacagaacgtagtcaaggacctgtccgtcgagctggatagactgagcgaagaatctgtgaacaacgacatctcctcctggacaaagggcagaagcggagaagctctgagcctcctgaagaaaagattctcccatagacccgtgcaggagaagttcgtgtgcctgaactgcggcttcgagacacacgcagccgagcaagccgccctgaacatcgccagatcctggctgttcctgcggagccaggagtacaagaaataccagacaaacaagacaaccggcaacaccgataagagagccttcgtcgagacctggcagtccttttaccggaagaagcttaaggaggtgtggaaacctgccgtgcggtctggcggatctggcggaggctccacaagccagatgctggtgaccttcgaggacatcgccgtgagcttcagcaaggaggagtgggagtacctggacgagggccagaaggagctgtacagggaggtgatgaaggagaactaccagaccctgatcagcctgggcaccggcttccccaccgtgatccccgagatcatcagccacatcgagcagggcgacgagcccggcagcgaggagagggagaacggcaagagcagctgcagcggcgagagcggcaccagccccaagaaaaagagaaaagtctaagctgccttctgcggggcttgccttctggccatgcccttcttctctcccttgcacctgtacctcttggtctttgaataaagcctgagtaggaaggctagcaaaaaaaaaaaaaaaaaaaaaaaaaaaaaaaaaaaaaaaaaaaaaaaaaaaaaaaaaaaaaaaaaaaaaaaaaaaaaaaa

SEQ ID NO: 7115 - RNA, 5797 nt, synthetic construct
  source 1..5797: mol_type = other RNA
aggaaataagagagaaaagaagagtaagaagaaatataagagccaccatggcccctaagaagaagcgtaaagtgagccggatggaacgcctcgtctacgaggtgcggcagaagtgcagaaacatcgaggacatctgcatctcctgcggatctctgaacgtgaccctggagcacccactgttcatcggcggcatgtgccagaactgtaaaaactgttttctggagtgtgcctatcaatacgacgatgacggctaccagagctactgcaccatctgttgcggcggaagagaggtgctgatgtgtggaaataacaactgctgccggtgcttctgcgtggaatgcgtggacctgctggtgggccccggcgccgcccaggccgctattaaggaagatccttggaactgctacatgtgcggccacaagggcacatacggcctgctgagacggagagaggactggcctagcagactgcagatgttcttcgccaataaccacgaccaggagttcgacccccctaaggtgtaccctcccgtccccgccgagaagagaaagcccatccgggtcctgagcctgttcgatggcatcgccaccggtctgctggtgctgaaggacctgggcatccaggtggataggtacattgcctccgaggtgtgcgaggactccatcaccgtgggaatggtgcgtcatcagggcaagatcatgtacgtgggcgacgtgcggagcgtgacacagaagcatatccaggagtggggccctttcgacctggtgatcggcggcagcccttgcaatgacctgagcatcgtgaacccagcccggaagggcctgtacgagggaaccggcagactgttcttcgagttttacagactgctgcacgacgcccggcctaaggaaggcgacgaccggcccttcttttggctgttcgagaatgtggtggccatgggagtcagcgacaagcgggatattagccggttcctggagagcaaccccgtgatgatcgatgccaaggaagtgagcgccgcccaccgggccagatacttctggggcaatctgcctggcatgaacagacccctggccagcaccgtgaacgacaagctggagctgcaggagtgcctggagcacggccggatcgccaagttcagcaaggtgagaaccatcaccacccgaagcaacagcatcaaacaaggcaaggaccagcactttcctgtgttcatgaacgagaaggaggacatcctgtggtgtaccgagatggagagagtgttcgggttcccagtccactacacagatgtcagcaacatgtctagactggccagacagagactgctgggaagaagctggtccgtccctgtgatcagacacctgttcgcccctctgaaggagtacttcgcctgcgtgagcagcggcaacagcaacgccaacagccggggccccagcttctctagcggcctggtgccactgtccctgagagggagccacatgggccccatggagatctacaaaaccgtgagcgcctggaagcggcagcctgtgcgcgtgctgagcctgtttcggaatatcgataaagtcctgaaaagcctgggattcctggagagcggctctggctccggcggtggcaccctgaagtacgtggaggatgtgacaaacgtggtcagacgggatgtggagaagtggggccccttcgatctggtgtacggcagcacccaacccctgggcagctcttgtgaccggtgccctggctggtacatgtttcagttccaccggatcctgcagtacgccctgccgagacaggagtcccagcggccattcttttggattttcatggacaacttgctgctgaccgaggatgaccaggaaactaccactcggttcctgcagaccgaagccgtgaccctgcaggacgtgagaggccgggactaccagaacgccatgcgggtgtggtccaacatccctggactgaaaagcaagcacgcacctctgacccctaaagaagaggagtacctgcaggcccaggtgcggagcagaagcaagctggacgcccctaaggtggatctgctggtgaagaattgcctcctgcccctgagagagtacttcaagtatttcagccagaatagtctgcccctgggcggcccaagcagcggcgcccctcctcccagcggcggcagcccagccggctccccaacctctaccgaggagggcacctctgagtccgccacccccgagagcggccctggcacctccaccgagcccagcgagggcagcgcacccggcagccctgccggcagccccacctccacagaggagggaaccagcaccgagcccagcgaaggcagcgccccaggcaccagcaccgagcctagtgagggcggctctggcggcggcagcgcccaggagattaaacggatcaacaagatcagaagaagacttgtgaaagacagcaacaccaagaaggccggcaagacaggccccatgaaaaccctgctggttagagtgatgacacccgatctgagagagcggctggaaaacctgagaaagaagcctgaaaatatcccccagcccatcagcaatacatctagagccaacctgaataagctgctgaccgattacaccgaaatgaagaaggcgatcctgcatgtgtactgggaagagttccagaaggaccctgtgggcctgatgagccgggtggcccagcctgccagcaagaagatcgatcagaacaagctgaaacctgagatggacgagaagggcaacctgaccaccgccggctttgcctgctctcagtgtggccagcccctgttcgtgtacaagctggagcaggtgtctgagaagggcaaggcttacaccaactacttcggacggtgcaatgtggccgagcacgaaaagctgatcctgctggcccagctgaagcccgagaaggatagcgacgaagccgtgacatatagcctgggaaagtttgggcagagggccctggatttctacagcattcatgtgaccaaggagtccacccaccccgtgaagcccctggcccagatcgccggaaacagatacgcctccggacctgtgggaaaggccctgagcgacgcatgtatgggcacaatcgcctccttcctgtctaagtaccaggacatcatcatcgaacaccagaaggtggtgaagggcaaccagaagagactggagagcctgcgggagctggccggcaaggaaaacctggaataccctagcgtgaccctgccacctcagcctcacaccaaggagggcgttgatgcctacaacgaagtgatcgcccgggtgcgaatgtgggtgaacctgaacctgtggcagaagctgaagctaagcagagatgatgccaagcctctgctgagactgaagggattcccttcctttcctctggtcgagagacaggccaacgaagtggactggtgggacatggtgtgtaacgtgaagaagctgatcaacgagaaaaaggaggatggcaaggtgttttggcagaatctggctggctacaagagacaggaagccctgagaccatacctgagcagcgaggaagatcggaagaagggaaagaaattcgctcggtaccagctgggcgacctgctgctgcacctggaaaagaagcacggcgaggactggggaaaggtgtacgacgaggcctgggagcggattgacaagaaagtggaaggcctgagcaagcacatcaagctggaagaggaacggagaagcgaggacgcccagagcaaggccgccctgaccgactggctgcgggctaaggccagcttcgtgatcgagggcctgaaggaggccgacaaggacgagttctgcagatgcgagctgaagctgcagaagtggtacggggacctgcggggaaagcccttcgccatcgaagccgagaacagcatcctggacatcagcggcttcagcaagcagtacaactgtgccttcatctggcagaaggacggcgtgaagaagctgaacctgtacctgatcatcaactacttcaagggcggcaagctgcggttcaagaagatcaaacctgaagccttcgaagccaacagattctacaccgtgatcaacaaaaagagcggcgagatcgtgcccatggaggtgaacttcaacttcgacgaccccaacctgatcatcctgcctctggcctttggcaagagacagggcagagaattcatctggaacgacctgctgtccctggaaaccggcagcctgaagctggccaacggaagagtgatcgagaagacactgtacaacagaagaacccggcaggatgagcctgccctgttcgtggccctgaccttcgagcggcgggaggtcctggactcctccaatatcaaaccaatgaacctgatcggcgtggcaagaggcgaaaacatccccgccgtgatcgccctgaccgaccccgagggctgcccactgagccggtttaaggatagcctgggaaacccaacccacatcctgagaatcggcgagagctataaggagaagcagcggaccatccaggccaagaaggaggtggagcagcggagagccggcggctacagccggaagtacgccagcaaagccaagaatctggcagacgatatggtgagaaacaccgctagagatctgctgtactacgccgtgacccaggatgccatgctgatcttcgccaacctgagccggggcttcggccggcagggcaagcggaccttcatggccgagagacagtacacacggatggaggactggctgaccgccaagctggcctacgagggcctgagcaagacctacctgtccaagacactggcccagtacacctccaagacatgcagcaactgtgggtttaccatcaccagcgccgactacgacagggtgctggagaagctgaagaagacagcaacaggctggatgaccacaattaacggcaaggagctgaaggtggagggccagattacctactacaacagatacaagagacagaacgtagtcaaggacctgtccgtcgagctggatagactgagcgaagaatctgtgaacaacgacatctcctcctggacaaagggcagaagcggagaagctctgagcctcctgaagaaaagattctcccatagacccgtgcaggagaagttcgtgtgcctgaactgcggcttcgagacacacgcagccgagcaagccgccctgaacatcgccagatcctggctgttcctgcggagccaggagtacaagaaataccagacaaacaagacaaccggcaacaccgataagagagccttcgtcgagacctggcagtccttttaccggaagaagcttaaggaggtgtggaaacctgccgtgcggtctggcggatctggcggaggctccacaagcgagcccggcgccgtgagcttcgccgacgtggccgtgtacttcagcctggaggagtggggctgcctgaggcccagccagagggccctgtacagggacgtgatgagggagacctacctgcacctgagcgccctgggcggcggcggcaccaagcccgccctgatcagctgggtggaggaggaggccgagctgtggcaccccgacgcccaggaccccgaggtggccaagtgccccaccgaggccgacaccagccccaagaaaaagagaaaagtctaagctgccttctgcggggcttgccttctggccatgcccttcttctctcccttgcacctgtacctcttggtctttgaataaagcctgagtaggaaggctagcaaaaaaaaaaaaaaaaaaaaaaaaaaaaaaaaaaaaaaaaaaaaaaaaaaaaaaaaaaaaaaaaaaaaaaaaaaaaaaaa

SEQ ID NO: 7116 - RNA, 5797 nt, synthetic construct
  source 1..5797: mol_type = other RNA
aggaaataagagagaaaagaagagtaagaagaaatataagagccaccatggcccctaagaagaagcgtaaagtgagccggatggaacgcctcgtctacgaggtgcggcagaagtgcagaaacatcgaggacatctgcatctcctgcggatctctgaacgtgaccctggagcacccactgttcatcggcggcatgtgccagaactgtaaaaactgttttctggagtgtgcctatcaatacgacgatgacggctaccagagctactgcaccatctgttgcggcggaagagaggtgctgatgtgtggaaataacaactgctgccggtgcttctgcgtggaatgcgtggacctgctggtgggccccggcgccgcccaggccgctattaaggaagatccttggaactgctacatgtgcggccacaagggcacatacggcctgctgagacggagagaggactggcctagcagactgcagatgttcttcgccaataaccacgaccaggagttcgacccccctaaggtgtaccctcccgtccccgccgagaagagaaagcccatccgggtcctgagcctgttcgatggcatcgccaccggtctgctggtgctgaaggacctgggcatccaggtggataggtacattgcctccgaggtgtgcgaggactccatcaccgtgggaatggtgcgtcatcagggcaagatcatgtacgtgggcgacgtgcggagcgtgacacagaagcatatccaggagtggggccctttcgacctggtgatcggcggcagcccttgcaatgacctgagcatcgtgaacccagcccggaagggcctgtacgagggaaccggcagactgttcttcgagttttacagactgctgcacgacgcccggcctaaggaaggcgacgaccggcccttcttttggctgttcgagaatgtggtggccatgggagtcagcgacaagcgggatattagccggttcctggagagcaaccccgtgatgatcgatgccaaggaagtgagcgccgcccaccgggccagatacttctggggcaatctgcctggcatgaacagacccctggccagcaccgtgaacgacaagctggagctgcaggagtgcctggagcacggccggatcgccaagttcagcaaggtgagaaccatcaccacccgaagcaacagcatcaaacaaggcaaggaccagcactttcctgtgttcatgaacgagaaggaggacatcctgtggtgtaccgagatggagagagtgttcgggttcccagtccactacacagatgtcagcaacatgtctagactggccagacagagactgctgggaagaagctggtccgtccctgtgatcagacacctgttcgcccctctgaaggagtacttcgcctgcgtgagcagcggcaacagcaacgccaacagccggggccccagcttctctagcggcctggtgccactgtccctgagagggagccacatgggccccatggagatctacaaaaccgtgagcgcctggaagcggcagcctgtgcgcgtgctgagcctgtttcggaatatcgataaagtcctgaaaagcctgggattcctggagagcggctctggctccggcggtggcaccctgaagtacgtggaggatgtgacaaacgtggtcagacgggatgtggagaagtggggccccttcgatctggtgtacggcagcacccaacccctgggcagctcttgtgaccggtgccctggctggtacatgtttcagttccaccggatcctgcagtacgccctgccgagacaggagtcccagcggccattcttttggattttcatggacaacttgctgctgaccgaggatgaccaggaaactaccactcggttcctgcagaccgaagccgtgaccctgcaggacgtgagaggccgggactaccagaacgccatgcgggtgtggtccaacatccctggactgaaaagcaagcacgcacctctgacccctaaagaagaggagtacctgcaggcccaggtgcggagcagaagcaagctggacgcccctaaggtggatctgctggtgaagaattgcctcctgcccctgagagagtacttcaagtatttcagccagaatagtctgcccctgggcggcccaagcagcggcgcccctcctcccagcggcggcagcccagccggctccccaacctctaccgaggagggcacctctgagtccgccacccccgagagcggccctggcacctccaccgagcccagcgagggcagcgcacccggcagccctgccggcagccccacctccacagaggagggaaccagcaccgagcccagcgaaggcagcgccccaggcaccagcaccgagcctagtgagggcggctctggcggcggcagcgcccaggagattaaacggatcaacaagatcagaagaagacttgtgaaagacagcaacaccaagaaggccggcaagacaggccccatgaaaaccctgctggttagagtgatgacacccgatctgagagagcggctggaaaacctgagaaagaagcctgaaaatatcccccagcccatcagcaatacatctagagccaacctgaataagctgctgaccgattacaccgaaatgaagaaggcgatcctgcatgtgtactgggaagagttccagaaggaccctgtgggcctgatgagccgggtggcccagcctgccagcaagaagatcgatcagaacaagctgaaacctgagatggacgagaagggcaacctgaccaccgccggctttgcctgctctcagtgtggccagcccctgttcgtgtacaagctggagcaggtgtctgagaagggcaaggcttacaccaactacttcggacggtgcaatgtggccgagcacgaaaagctgatcctgctggcccagctgaagcccgagaaggatagcgacgaagccgtgacatatagcctgggaaagtttgggcagagggccctggatttctacagcattcatgtgaccaaggagtccacccaccccgtgaagcccctggcccagatcgccggaaacagatacgcctccggacctgtgggaaaggccctgagcgacgcatgtatgggcacaatcgcctccttcctgtctaagtaccaggacatcatcatcgaacaccagaaggtggtgaagggcaaccagaagagactggagagcctgcgggagctggccggcaaggaaaacctggaataccctagcgtgaccctgccacctcagcctcacaccaaggagggcgttgatgcctacaacgaagtgatcgcccgggtgcgaatgtgggtgaacctgaacctgtggcagaagctgaagctaagcagagatgatgccaagcctctgctgagactgaagggattcccttcctttcctctggtcgagagacaggccaacgaagtggactggtgggacatggtgtgtaacgtgaagaagctgatcaacgagaaaaaggaggatggcaaggtgttttggcagaatctggctggctacaagagacaggaagccctgagaccatacctgagcagcgaggaagatcggaagaagggaaagaaattcgctcggtaccagctgggcgacctgctgctgcacctggaaaagaagcacggcgaggactggggaaaggtgtacgacgaggcctgggagcggattgacaagaaagtggaaggcctgagcaagcacatcaagctggaagaggaacggagaagcgaggacgcccagagcaaggccgccctgaccgactggctgcgggctaaggccagcttcgtgatcgagggcctgaaggaggccgacaaggacgagttctgcagatgcgagctgaagctgcagaagtggtacggggacctgcggggaaagcccttcgccatcgaagccgagaacagcatcctggacatcagcggcttcagcaagcagtacaactgtgccttcatctggcagaaggacggcgtgaagaagctgaacctgtacctgatcatcaactacttcaagggcggcaagctgcggttcaagaagatcaaacctgaagccttcgaagccaacagattctacaccgtgatcaacaaaaagagcggcgagatcgtgcccatggaggtgaacttcaacttcgacgaccccaacctgatcatcctgcctctggcctttggcaagagacagggcagagaattcatctggaacgacctgctgtccctggaaaccggcagcctgaagctggccaacggaagagtgatcgagaagacactgtacaacagaagaacccggcaggatgagcctgccctgttcgtggccctgaccttcgagcggcgggaggtcctggactcctccaatatcaaaccaatgaacctgatcggcgtggcaagaggcgaaaacatccccgccgtgatcgccctgaccgaccccgagggctgcccactgagccggtttaaggatagcctgggaaacccaacccacatcctgagaatcggcgagagctataaggagaagcagcggaccatccaggccaagaaggaggtggagcagcggagagccggcggctacagccggaagtacgccagcaaagccaagaatctggcagacgatatggtgagaaacaccgctagagatctgctgtactacgccgtgacccaggatgccatgctgatcttcgccaacctgagccggggcttcggccggcagggcaagcggaccttcatggccgagagacagtacacacggatggaggactggctgaccgccaagctggcctacgagggcctgagcaagacctacctgtccaagacactggcccagtacacctccaagacatgcagcaactgtgggtttaccatcaccagcgccgactacgacagggtgctggagaagctgaagaagacagcaacaggctggatgaccacaattaacggcaaggagctgaaggtggagggccagattacctactacaacagatacaagagacagaacgtagtcaaggacctgtccgtcgagctggatagactgagcgaagaatctgtgaacaacgacatctcctcctggacaaagggcagaagcggagaagctctgagcctcctgaagaaaagattctcccatagacccgtgcaggagaagttcgtgtgcctgaactgcggcttcgagacacacgcagccgagcaagccgccctgaacatcgccagatcctggctgttcctgcggagccaggagtacaagaaataccagacaaacaagacaaccggcaacaccgataagagagccttcgtcgagacctggcagtccttttaccggaagaagcttaaggaggtgtggaaacctgccgtgcggtctggcggatctggcggaggctccacaagcccccagaagctggtgaccttcgaggacgtggccgtgtacttcacccaggccgagtgggacggcctgagccccgcccagaggatcctgtacagggacgtgatgctggagaactacggcaacgtggccagcctgggcttccccctgctgaagcccgccgtgatcagccagctggagggcggcggcgagctgggcgcccccagccccctggccgccggcaccggcctgcacggcctgaggaccgtgaccagccccaagaaaaagagaaaagtctaagctgccttctgcggggcttgccttctggccatgcccttcttctctcccttgcacctgtacctcttggtctttgaataaagcctgagtaggaaggctagcaaaaaaaaaaaaaaaaaaaaaaaaaaaaaaaaaaaaaaaaaaaaaaaaaaaaaaaaaaaaaaaaaaaaaaaaaaaaaaaa

SEQ ID NO: 7117 - RNA, 5797 nt, synthetic construct
  source 1..5797: mol_type = other RNA
aggaaataagagagaaaagaagagtaagaagaaatataagagccaccatggcccctaagaagaagcgtaaagtgagccggatggaacgcctcgtctacgaggtgcggcagaagtgcagaaacatcgaggacatctgcatctcctgcggatctctgaacgtgaccctggagcacccactgttcatcggcggcatgtgccagaactgtaaaaactgttttctggagtgtgcctatcaatacgacgatgacggctaccagagctactgcaccatctgttgcggcggaagagaggtgctgatgtgtggaaataacaactgctgccggtgcttctgcgtggaatgcgtggacctgctggtgggccccggcgccgcccaggccgctattaaggaagatccttggaactgctacatgtgcggccacaagggcacatacggcctgctgagacggagagaggactggcctagcagactgcagatgttcttcgccaataaccacgaccaggagttcgacccccctaaggtgtaccctcccgtccccgccgagaagagaaagcccatccgggtcctgagcctgttcgatggcatcgccaccggtctgctggtgctgaaggacctgggcatccaggtggataggtacattgcctccgaggtgtgcgaggactccatcaccgtgggaatggtgcgtcatcagggcaagatcatgtacgtgggcgacgtgcggagcgtgacacagaagcatatccaggagtggggccctttcgacctggtgatcggcggcagcccttgcaatgacctgagcatcgtgaacccagcccggaagggcctgtacgagggaaccggcagactgttcttcgagttttacagactgctgcacgacgcccggcctaaggaaggcgacgaccggcccttcttttggctgttcgagaatgtggtggccatgggagtcagcgacaagcgggatattagccggttcctggagagcaaccccgtgatgatcgatgccaaggaagtgagcgccgcccaccgggccagatacttctggggcaatctgcctggcatgaacagacccctggccagcaccgtgaacgacaagctggagctgcaggagtgcctggagcacggccggatcgccaagttcagcaaggtgagaaccatcaccacccgaagcaacagcatcaaacaaggcaaggaccagcactttcctgtgttcatgaacgagaaggaggacatcctgtggtgtaccgagatggagagagtgttcgggttcccagtccactacacagatgtcagcaacatgtctagactggccagacagagactgctgggaagaagctggtccgtccctgtgatcagacacctgttcgcccctctgaaggagtacttcgcctgcgtgagcagcggcaacagcaacgccaacagccggggccccagcttctctagcggcctggtgccactgtccctgagagggagccacatgggccccatggagatctacaaaaccgtgagcgcctggaagcggcagcctgtgcgcgtgctgagcctgtttcggaatatcgataaagtcctgaaaagcctgggattcctggagagcggctctggctccggcggtggcaccctgaagtacgtggaggatgtgacaaacgtggtcagacgggatgtggagaagtggggccccttcgatctggtgtacggcagcacccaacccctgggcagctcttgtgaccggtgccctggctggtacatgtttcagttccaccggatcctgcagtacgccctgccgagacaggagtcccagcggccattcttttggattttcatggacaacttgctgctgaccgaggatgaccaggaaactaccactcggttcctgcagaccgaagccgtgaccctgcaggacgtgagaggccgggactaccagaacgccatgcgggtgtggtccaacatccctggactgaaaagcaagcacgcacctctgacccctaaagaagaggagtacctgcaggcccaggtgcggagcagaagcaagctggacgcccctaaggtggatctgctggtgaagaattgcctcctgcccctgagagagtacttcaagtatttcagccagaatagtctgcccctgggcggcccaagcagcggcgcccctcctcccagcggcggcagcccagccggctccccaacctctaccgaggagggcacctctgagtccgccacccccgagagcggccctggcacctccaccgagcccagcgagggcagcgcacccggcagccctgccggcagccccacctccacagaggagggaaccagcaccgagcccagcgaaggcagcgccccaggcaccagcaccgagcctagtgagggcggctctggcggcggcagcgcccaggagattaaacggatcaacaagatcagaagaagacttgtgaaagacagcaacaccaagaaggccggcaagacaggccccatgaaaaccctgctggttagagtgatgacacccgatctgagagagcggctggaaaacctgagaaagaagcctgaaaatatcccccagcccatcagcaatacatctagagccaacctgaataagctgctgaccgattacaccgaaatgaagaaggcgatcctgcatgtgtactgggaagagttccagaaggaccctgtgggcctgatgagccgggtggcccagcctgccagcaagaagatcgatcagaacaagctgaaacctgagatggacgagaagggcaacctgaccaccgccggctttgcctgctctcagtgtggccagcccctgttcgtgtacaagctggagcaggtgtctgagaagggcaaggcttacaccaactacttcggacggtgcaatgtggccgagcacgaaaagctgatcctgctggcccagctgaagcccgagaaggatagcgacgaagccgtgacatatagcctgggaaagtttgggcagagggccctggatttctacagcattcatgtgaccaaggagtccacccaccccgtgaagcccctggcccagatcgccggaaacagatacgcctccggacctgtgggaaaggccctgagcgacgcatgtatgggcacaatcgcctccttcctgtctaagtaccaggacatcatcatcgaacaccagaaggtggtgaagggcaaccagaagagactggagagcctgcgggagctggccggcaaggaaaacctggaataccctagcgtgaccctgccacctcagcctcacaccaaggagggcgttgatgcctacaacgaagtgatcgcccgggtgcgaatgtgggtgaacctgaacctgtggcagaagctgaagctaagcagagatgatgccaagcctctgctgagactgaagggattcccttcctttcctctggtcgagagacaggccaacgaagtggactggtgggacatggtgtgtaacgtgaagaagctgatcaacgagaaaaaggaggatggcaaggtgttttggcagaatctggctggctacaagagacaggaagccctgagaccatacctgagcagcgaggaagatcggaagaagggaaagaaattcgctcggtaccagctgggcgacctgctgctgcacctggaaaagaagcacggcgaggactggggaaaggtgtacgacgaggcctgggagcggattgacaagaaagtggaaggcctgagcaagcacatcaagctggaagaggaacggagaagcgaggacgcccagagcaaggccgccctgaccgactggctgcgggctaaggccagcttcgtgatcgagggcctgaaggaggccgacaaggacgagttctgcagatgcgagctgaagctgcagaagtggtacggggacctgcggggaaagcccttcgccatcgaagccgagaacagcatcctggacatcagcggcttcagcaagcagtacaactgtgccttcatctggcagaaggacggcgtgaagaagctgaacctgtacctgatcatcaactacttcaagggcggcaagctgcggttcaagaagatcaaacctgaagccttcgaagccaacagattctacaccgtgatcaacaaaaagagcggcgagatcgtgcccatggaggtgaacttcaacttcgacgaccccaacctgatcatcctgcctctggcctttggcaagagacagggcagagaattcatctggaacgacctgctgtccctggaaaccggcagcctgaagctggccaacggaagagtgatcgagaagacactgtacaacagaagaacccggcaggatgagcctgccctgttcgtggccctgaccttcgagcggcgggaggtcctggactcctccaatatcaaaccaatgaacctgatcggcgtggcaagaggcgaaaacatccccgccgtgatcgccctgaccgaccccgagggctgcccactgagccggtttaaggatagcctgggaaacccaacccacatcctgagaatcggcgagagctataaggagaagcagcggaccatccaggccaagaaggaggtggagcagcggagagccggcggctacagccggaagtacgccagcaaagccaagaatctggcagacgatatggtgagaaacaccgctagagatctgctgtactacgccgtgacccaggatgccatgctgatcttcgccaacctgagccggggcttcggccggcagggcaagcggaccttcatggccgagagacagtacacacggatggaggactggctgaccgccaagctggcctacgagggcctgagcaagacctacctgtccaagacactggcccagtacacctccaagacatgcagcaactgtgggtttaccatcaccagcgccgactacgacagggtgctggagaagctgaagaagacagcaacaggctggatgaccacaattaacggcaaggagctgaaggtggagggccagattacctactacaacagatacaagagacagaacgtagtcaaggacctgtccgtcgagctggatagactgagcgaagaatctgtgaacaacgacatctcctcctggacaaagggcagaagcggagaagctctgagcctcctgaagaaaagattctcccatagacccgtgcaggagaagttcgtgtgcctgaactgcggcttcgagacacacgcagccgagcaagccgccctgaacatcgccagatcctggctgttcctgcggagccaggagtacaagaaataccagacaaacaagacaaccggcaacaccgataagagagccttcgtcgagacctggcagtccttttaccggaagaagcttaaggaggtgtggaaacctgccgtgcggtctggcggatctggcggaggctccacaagcagctacgagggcagcgtgagcttcagggacgtggccatcaacttcagcagggaggagtggcagcacctggacctgagccagaggaacctgtacagggacgtgatgctggagacctgcagccacctgctgagcgtgggctaccaggtgcccaagcccgaggtggtgatgctggagcagggcaaggagccctgggccctgcagggcgagaggcccaggcagagctgccccggcgagaagctgtggaccagccccaagaaaaagagaaaagtctaagctgccttctgcggggcttgccttctggccatgcccttcttctctcccttgcacctgtacctcttggtctttgaataaagcctgagtaggaaggctagcaaaaaaaaaaaaaaaaaaaaaaaaaaaaaaaaaaaaaaaaaaaaaaaaaaaaaaaaaaaaaaaaaaaaaaaaaaaaaaaa

SEQ ID NO: 7118 - RNA, 5797 nt, synthetic construct
  source 1..5797: mol_type = other RNA
aggaaataagagagaaaagaagagtaagaagaaatataagagccaccatggcccctaagaagaagcgtaaagtgagccggatggaacgcctcgtctacgaggtgcggcagaagtgcagaaacatcgaggacatctgcatctcctgcggatctctgaacgtgaccctggagcacccactgttcatcggcggcatgtgccagaactgtaaaaactgttttctggagtgtgcctatcaatacgacgatgacggctaccagagctactgcaccatctgttgcggcggaagagaggtgctgatgtgtggaaataacaactgctgccggtgcttctgcgtggaatgcgtggacctgctggtgggccccggcgccgcccaggccgctattaaggaagatccttggaactgctacatgtgcggccacaagggcacatacggcctgctgagacggagagaggactggcctagcagactgcagatgttcttcgccaataaccacgaccaggagttcgacccccctaaggtgtaccctcccgtccccgccgagaagagaaagcccatccgggtcctgagcctgttcgatggcatcgccaccggtctgctggtgctgaaggacctgggcatccaggtggataggtacattgcctccgaggtgtgcgaggactccatcaccgtgggaatggtgcgtcatcagggcaagatcatgtacgtgggcgacgtgcggagcgtgacacagaagcatatccaggagtggggccctttcgacctggtgatcggcggcagcccttgcaatgacctgagcatcgtgaacccagcccggaagggcctgtacgagggaaccggcagactgttcttcgagttttacagactgctgcacgacgcccggcctaaggaaggcgacgaccggcccttcttttggctgttcgagaatgtggtggccatgggagtcagcgacaagcgggatattagccggttcctggagagcaaccccgtgatgatcgatgccaaggaagtgagcgccgcccaccgggccagatacttctggggcaatctgcctggcatgaacagacccctggccagcaccgtgaacgacaagctggagctgcaggagtgcctggagcacggccggatcgccaagttcagcaaggtgagaaccatcaccacccgaagcaacagcatcaaacaaggcaaggaccagcactttcctgtgttcatgaacgagaaggaggacatcctgtggtgtaccgagatggagagagtgttcgggttcccagtccactacacagatgtcagcaacatgtctagactggccagacagagactgctgggaagaagctggtccgtccctgtgatcagacacctgttcgcccctctgaaggagtacttcgcctgcgtgagcagcggcaacagcaacgccaacagccggggccccagcttctctagcggcctggtgccactgtccctgagagggagccacatgggccccatggagatctacaaaaccgtgagcgcctggaagcggcagcctgtgcgcgtgctgagcctgtttcggaatatcgataaagtcctgaaaagcctgggattcctggagagcggctctggctccggcggtggcaccctgaagtacgtggaggatgtgacaaacgtggtcagacgggatgtggagaagtggggccccttcgatctggtgtacggcagcacccaacccctgggcagctcttgtgaccggtgccctggctggtacatgtttcagttccaccggatcctgcagtacgccctgccgagacaggagtcccagcggccattcttttggattttcatggacaacttgctgctgaccgaggatgaccaggaaactaccactcggttcctgcagaccgaagccgtgaccctgcaggacgtgagaggccgggactaccagaacgccatgcgggtgtggtccaacatccctggactgaaaagcaagcacgcacctctgacccctaaagaagaggagtacctgcaggcccaggtgcggagcagaagcaagctggacgcccctaaggtggatctgctggtgaagaattgcctcctgcccctgagagagtacttcaagtatttcagccagaatagtctgcccctgggcggcccaagcagcggcgcccctcctcccagcggcggcagcccagccggctccccaacctctaccgaggagggcacctctgagtccgccacccccgagagcggccctggcacctccaccgagcccagcgagggcagcgcacccggcagccctgccggcagccccacctccacagaggagggaaccagcaccgagcccagcgaaggcagcgccccaggcaccagcaccgagcctagtgagggcggctctggcggcggcagcgcccaggagattaaacggatcaacaagatcagaagaagacttgtgaaagacagcaacaccaagaaggccggcaagacaggccccatgaaaaccctgctggttagagtgatgacacccgatctgagagagcggctggaaaacctgagaaagaagcctgaaaatatcccccagcccatcagcaatacatctagagccaacctgaataagctgctgaccgattacaccgaaatgaagaaggcgatcctgcatgtgtactgggaagagttccagaaggaccctgtgggcctgatgagccgggtggcccagcctgccagcaagaagatcgatcagaacaagctgaaacctgagatggacgagaagggcaacctgaccaccgccggctttgcctgctctcagtgtggccagcccctgttcgtgtacaagctggagcaggtgtctgagaagggcaaggcttacaccaactacttcggacggtgcaatgtggccgagcacgaaaagctgatcctgctggcccagctgaagcccgagaaggatagcgacgaagccgtgacatatagcctgggaaagtttgggcagagggccctggatttctacagcattcatgtgaccaaggagtccacccaccccgtgaagcccctggcccagatcgccggaaacagatacgcctccggacctgtgggaaaggccctgagcgacgcatgtatgggcacaatcgcctccttcctgtctaagtaccaggacatcatcatcgaacaccagaaggtggtgaagggcaaccagaagagactggagagcctgcgggagctggccggcaaggaaaacctggaataccctagcgtgaccctgccacctcagcctcacaccaaggagggcgttgatgcctacaacgaagtgatcgcccgggtgcgaatgtgggtgaacctgaacctgtggcagaagctgaagctaagcagagatgatgccaagcctctgctgagactgaagggattcccttcctttcctctggtcgagagacaggccaacgaagtggactggtgggacatggtgtgtaacgtgaagaagctgatcaacgagaaaaaggaggatggcaaggtgttttggcagaatctggctggctacaagagacaggaagccctgagaccatacctgagcagcgaggaagatcggaagaagggaaagaaattcgctcggtaccagctgggcgacctgctgctgcacctggaaaagaagcacggcgaggactggggaaaggtgtacgacgaggcctgggagcggattgacaagaaagtggaaggcctgagcaagcacatcaagctggaagaggaacggagaagcgaggacgcccagagcaaggccgccctgaccgactggctgcgggctaaggccagcttcgtgatcgagggcctgaaggaggccgacaaggacgagttctgcagatgcgagctgaagctgcagaagtggtacggggacctgcggggaaagcccttcgccatcgaagccgagaacagcatcctggacatcagcggcttcagcaagcagtacaactgtgccttcatctggcagaaggacggcgtgaagaagctgaacctgtacctgatcatcaactacttcaagggcggcaagctgcggttcaagaagatcaaacctgaagccttcgaagccaacagattctacaccgtgatcaacaaaaagagcggcgagatcgtgcccatggaggtgaacttcaacttcgacgaccccaacctgatcatcctgcctctggcctttggcaagagacagggcagagaattcatctggaacgacctgctgtccctggaaaccggcagcctgaagctggccaacggaagagtgatcgagaagacactgtacaacagaagaacccggcaggatgagcctgccctgttcgtggccctgaccttcgagcggcgggaggtcctggactcctccaatatcaaaccaatgaacctgatcggcgtggcaagaggcgaaaacatccccgccgtgatcgccctgaccgaccccgagggctgcccactgagccggtttaaggatagcctgggaaacccaacccacatcctgagaatcggcgagagctataaggagaagcagcggaccatccaggccaagaaggaggtggagcagcggagagccggcggctacagccggaagtacgccagcaaagccaagaatctggcagacgatatggtgagaaacaccgctagagatctgctgtactacgccgtgacccaggatgccatgctgatcttcgccaacctgagccggggcttcggccggcagggcaagcggaccttcatggccgagagacagtacacacggatggaggactggctgaccgccaagctggcctacgagggcctgagcaagacctacctgtccaagacactggcccagtacacctccaagacatgcagcaactgtgggtttaccatcaccagcgccgactacgacagggtgctggagaagctgaagaagacagcaacaggctggatgaccacaattaacggcaaggagctgaaggtggagggccagattacctactacaacagatacaagagacagaacgtagtcaaggacctgtccgtcgagctggatagactgagcgaagaatctgtgaacaacgacatctcctcctggacaaagggcagaagcggagaagctctgagcctcctgaagaaaagattctcccatagacccgtgcaggagaagttcgtgtgcctgaactgcggcttcgagacacacgcagccgagcaagccgccctgaacatcgccagatcctggctgttcctgcggagccaggagtacaagaaataccagacaaacaagacaaccggcaacaccgataagagagccttcgtcgagacctggcagtccttttaccggaagaagcttaaggaggtgtggaaacctgccgtgcggtctggcggatctggcggaggctccacaagcttccaggacagcgtgaccttccaggacgtggccgtgaccttcacccccgaggagtggggcaggctggccgccccccagaaggagctgtacagggaggtgatgctggagaacttcggccacctggcctgcctgggcctggccctgagcaagcccgacgtgatctgccagctggagaggggcgaggccccctggatgcccaggggcgacgtgccccagaggcccagcgccgcccccagcggcgacaccagccccaagaaaaagagaaaagtctaagctgccttctgcggggcttgccttctggccatgcccttcttctctcccttgcacctgtacctcttggtctttgaataaagcctgagtaggaaggctagcaaaaaaaaaaaaaaaaaaaaaaaaaaaaaaaaaaaaaaaaaaaaaaaaaaaaaaaaaaaaaaaaaaaaaaaaaaaaaaaa

SEQ ID NO: 7119 - RNA, 5797 nt, synthetic construct
  source 1..5797: mol_type = other RNA
aggaaataagagagaaaagaagagtaagaagaaatataagagccaccatggcccctaagaagaagcgtaaagtgagccggatggaacgcctcgtctacgaggtgcggcagaagtgcagaaacatcgaggacatctgcatctcctgcggatctctgaacgtgaccctggagcacccactgttcatcggcggcatgtgccagaactgtaaaaactgttttctggagtgtgcctatcaatacgacgatgacggctaccagagctactgcaccatctgttgcggcggaagagaggtgctgatgtgtggaaataacaactgctgccggtgcttctgcgtggaatgcgtggacctgctggtgggccccggcgccgcccaggccgctattaaggaagatccttggaactgctacatgtgcggccacaagggcacatacggcctgctgagacggagagaggactggcctagcagactgcagatgttcttcgccaataaccacgaccaggagttcgacccccctaaggtgtaccctcccgtccccgccgagaagagaaagcccatccgggtcctgagcctgttcgatggcatcgccaccggtctgctggtgctgaaggacctgggcatccaggtggataggtacattgcctccgaggtgtgcgaggactccatcaccgtgggaatggtgcgtcatcagggcaagatcatgtacgtgggcgacgtgcggagcgtgacacagaagcatatccaggagtggggccctttcgacctggtgatcggcggcagcccttgcaatgacctgagcatcgtgaacccagcccggaagggcctgtacgagggaaccggcagactgttcttcgagttttacagactgctgcacgacgcccggcctaaggaaggcgacgaccggcccttcttttggctgttcgagaatgtggtggccatgggagtcagcgacaagcgggatattagccggttcctggagagcaaccccgtgatgatcgatgccaaggaagtgagcgccgcccaccgggccagatacttctggggcaatctgcctggcatgaacagacccctggccagcaccgtgaacgacaagctggagctgcaggagtgcctggagcacggccggatcgccaagttcagcaaggtgagaaccatcaccacccgaagcaacagcatcaaacaaggcaaggaccagcactttcctgtgttcatgaacgagaaggaggacatcctgtggtgtaccgagatggagagagtgttcgggttcccagtccactacacagatgtcagcaacatgtctagactggccagacagagactgctgggaagaagctggtccgtccctgtgatcagacacctgttcgcccctctgaaggagtacttcgcctgcgtgagcagcggcaacagcaacgccaacagccggggccccagcttctctagcggcctggtgccactgtccctgagagggagccacatgggccccatggagatctacaaaaccgtgagcgcctggaagcggcagcctgtgcgcgtgctgagcctgtttcggaatatcgataaagtcctgaaaagcctgggattcctggagagcggctctggctccggcggtggcaccctgaagtacgtggaggatgtgacaaacgtggtcagacgggatgtggagaagtggggccccttcgatctggtgtacggcagcacccaacccctgggcagctcttgtgaccggtgccctggctggtacatgtttcagttccaccggatcctgcagtacgccctgccgagacaggagtcccagcggccattcttttggattttcatggacaacttgctgctgaccgaggatgaccaggaaactaccactcggttcctgcagaccgaagccgtgaccctgcaggacgtgagaggccgggactaccagaacgccatgcgggtgtggtccaacatccctggactgaaaagcaagcacgcacctctgacccctaaagaagaggagtacctgcaggcccaggtgcggagcagaagcaagctggacgcccctaaggtggatctgctggtgaagaattgcctcctgcccctgagagagtacttcaagtatttcagccagaatagtctgcccctgggcggcccaagcagcggcgcccctcctcccagcggcggcagcccagccggctccccaacctctaccgaggagggcacctctgagtccgccacccccgagagcggccctggcacctccaccgagcccagcgagggcagcgcacccggcagccctgccggcagccccacctccacagaggagggaaccagcaccgagcccagcgaaggcagcgccccaggcaccagcaccgagcctagtgagggcggctctggcggcggcagcgcccaggagattaaacggatcaacaagatcagaagaagacttgtgaaagacagcaacaccaagaaggccggcaagacaggccccatgaaaaccctgctggttagagtgatgacacccgatctgagagagcggctggaaaacctgagaaagaagcctgaaaatatcccccagcccatcagcaatacatctagagccaacctgaataagctgctgaccgattacaccgaaatgaagaaggcgatcctgcatgtgtactgggaagagttccagaaggaccctgtgggcctgatgagccgggtggcccagcctgccagcaagaagatcgatcagaacaagctgaaacctgagatggacgagaagggcaacctgaccaccgccggctttgcctgctctcagtgtggccagcccctgttcgtgtacaagctggagcaggtgtctgagaagggcaaggcttacaccaactacttcggacggtgcaatgtggccgagcacgaaaagctgatcctgctggcccagctgaagcccgagaaggatagcgacgaagccgtgacatatagcctgggaaagtttgggcagagggccctggatttctacagcattcatgtgaccaaggagtccacccaccccgtgaagcccctggcccagatcgccggaaacagatacgcctccggacctgtgggaaaggccctgagcgacgcatgtatgggcacaatcgcctccttcctgtctaagtaccaggacatcatcatcgaacaccagaaggtggtgaagggcaaccagaagagactggagagcctgcgggagctggccggcaaggaaaacctggaataccctagcgtgaccctgccacctcagcctcacaccaaggagggcgttgatgcctacaacgaagtgatcgcccgggtgcgaatgtgggtgaacctgaacctgtggcagaagctgaagctaagcagagatgatgccaagcctctgctgagactgaagggattcccttcctttcctctggtcgagagacaggccaacgaagtggactggtgggacatggtgtgtaacgtgaagaagctgatcaacgagaaaaaggaggatggcaaggtgttttggcagaatctggctggctacaagagacaggaagccctgagaccatacctgagcagcgaggaagatcggaagaagggaaagaaattcgctcggtaccagctgggcgacctgctgctgcacctggaaaagaagcacggcgaggactggggaaaggtgtacgacgaggcctgggagcggattgacaagaaagtggaaggcctgagcaagcacatcaagctggaagaggaacggagaagcgaggacgcccagagcaaggccgccctgaccgactggctgcgggctaaggccagcttcgtgatcgagggcctgaaggaggccgacaaggacgagttctgcagatgcgagctgaagctgcagaagtggtacggggacctgcggggaaagcccttcgccatcgaagccgagaacagcatcctggacatcagcggcttcagcaagcagtacaactgtgccttcatctggcagaaggacggcgtgaagaagctgaacctgtacctgatcatcaactacttcaagggcggcaagctgcggttcaagaagatcaaacctgaagccttcgaagccaacagattctacaccgtgatcaacaaaaagagcggcgagatcgtgcccatggaggtgaacttcaacttcgacgaccccaacctgatcatcctgcctctggcctttggcaagagacagggcagagaattcatctggaacgacctgctgtccctggaaaccggcagcctgaagctggccaacggaagagtgatcgagaagacactgtacaacagaagaacccggcaggatgagcctgccctgttcgtggccctgaccttcgagcggcgggaggtcctggactcctccaatatcaaaccaatgaacctgatcggcgtggcaagaggcgaaaacatccccgccgtgatcgccctgaccgaccccgagggctgcccactgagccggtttaaggatagcctgggaaacccaacccacatcctgagaatcggcgagagctataaggagaagcagcggaccatccaggccaagaaggaggtggagcagcggagagccggcggctacagccggaagtacgccagcaaagccaagaatctggcagacgatatggtgagaaacaccgctagagatctgctgtactacgccgtgacccaggatgccatgctgatcttcgccaacctgagccggggcttcggccggcagggcaagcggaccttcatggccgagagacagtacacacggatggaggactggctgaccgccaagctggcctacgagggcctgagcaagacctacctgtccaagacactggcccagtacacctccaagacatgcagcaactgtgggtttaccatcaccagcgccgactacgacagggtgctggagaagctgaagaagacagcaacaggctggatgaccacaattaacggcaaggagctgaaggtggagggccagattacctactacaacagatacaagagacagaacgtagtcaaggacctgtccgtcgagctggatagactgagcgaagaatctgtgaacaacgacatctcctcctggacaaagggcagaagcggagaagctctgagcctcctgaagaaaagattctcccatagacccgtgcaggagaagttcgtgtgcctgaactgcggcttcgagacacacgcagccgagcaagccgccctgaacatcgccagatcctggctgttcctgcggagccaggagtacaagaaataccagacaaacaagacaaccggcaacaccgataagagagccttcgtcgagacctggcagtccttttaccggaagaagcttaaggaggtgtggaaacctgccgtgcggtctggcggatctggcggaggctccacaagcagcctgggcagcgagctgttcagggacgtggccatcgtgttcagccaggaggagtggcagtggctggcccccgcccagagggacctgtacagggacgtgatgctggagacctacagcaacctggtgagcctgggcctggccatcagcaagcccgacgtgatcagcttcctggagcagggcaaggagccctggatggtggagagggtggtgagcaggggcctgtgccccgtgctggagagcaggaccagccccaagaaaaagagaaaagtctaagctgccttctgcggggcttgccttctggccatgcccttcttctctcccttgcacctgtacctcttggtctttgaataaagcctgagtaggaaggctagcaaaaaaaaaaaaaaaaaaaaaaaaaaaaaaaaaaaaaaaaaaaaaaaaaaaaaaaaaaaaaaaaaaaaaaaaaaaaaaaa

SEQ ID NO: 7120 - RNA, 5797 nt, synthetic construct
  source 1..5797: mol_type = other RNA
aggaaataagagagaaaagaagagtaagaagaaatataagagccaccatggcccctaagaagaagcgtaaagtgagccggatggaacgcctcgtctacgaggtgcggcagaagtgcagaaacatcgaggacatctgcatctcctgcggatctctgaacgtgaccctggagcacccactgttcatcggcggcatgtgccagaactgtaaaaactgttttctggagtgtgcctatcaatacgacgatgacggctaccagagctactgcaccatctgttgcggcggaagagaggtgctgatgtgtggaaataacaactgctgccggtgcttctgcgtggaatgcgtggacctgctggtgggccccggcgccgcccaggccgctattaaggaagatccttggaactgctacatgtgcggccacaagggcacatacggcctgctgagacggagagaggactggcctagcagactgcagatgttcttcgccaataaccacgaccaggagttcgacccccctaaggtgtaccctcccgtccccgccgagaagagaaagcccatccgggtcctgagcctgttcgatggcatcgccaccggtctgctggtgctgaaggacctgggcatccaggtggataggtacattgcctccgaggtgtgcgaggactccatcaccgtgggaatggtgcgtcatcagggcaagatcatgtacgtgggcgacgtgcggagcgtgacacagaagcatatccaggagtggggccctttcgacctggtgatcggcggcagcccttgcaatgacctgagcatcgtgaacccagcccggaagggcctgtacgagggaaccggcagactgttcttcgagttttacagactgctgcacgacgcccggcctaaggaaggcgacgaccggcccttcttttggctgttcgagaatgtggtggccatgggagtcagcgacaagcgggatattagccggttcctggagagcaaccccgtgatgatcgatgccaaggaagtgagcgccgcccaccgggccagatacttctggggcaatctgcctggcatgaacagacccctggccagcaccgtgaacgacaagctggagctgcaggagtgcctggagcacggccggatcgccaagttcagcaaggtgagaaccatcaccacccgaagcaacagcatcaaacaaggcaaggaccagcactttcctgtgttcatgaacgagaaggaggacatcctgtggtgtaccgagatggagagagtgttcgggttcccagtccactacacagatgtcagcaacatgtctagactggccagacagagactgctgggaagaagctggtccgtccctgtgatcagacacctgttcgcccctctgaaggagtacttcgcctgcgtgagcagcggcaacagcaacgccaacagccggggccccagcttctctagcggcctggtgccactgtccctgagagggagccacatgggccccatggagatctacaaaaccgtgagcgcctggaagcggcagcctgtgcgcgtgctgagcctgtttcggaatatcgataaagtcctgaaaagcctgggattcctggagagcggctctggctccggcggtggcaccctgaagtacgtggaggatgtgacaaacgtggtcagacgggatgtggagaagtggggccccttcgatctggtgtacggcagcacccaacccctgggcagctcttgtgaccggtgccctggctggtacatgtttcagttccaccggatcctgcagtacgccctgccgagacaggagtcccagcggccattcttttggattttcatggacaacttgctgctgaccgaggatgaccaggaaactaccactcggttcctgcagaccgaagccgtgaccctgcaggacgtgagaggccgggactaccagaacgccatgcgggtgtggtccaacatccctggactgaaaagcaagcacgcacctctgacccctaaagaagaggagtacctgcaggcccaggtgcggagcagaagcaagctggacgcccctaaggtggatctgctggtgaagaattgcctcctgcccctgagagagtacttcaagtatttcagccagaatagtctgcccctgggcggcccaagcagcggcgcccctcctcccagcggcggcagcccagccggctccccaacctctaccgaggagggcacctctgagtccgccacccccgagagcggccctggcacctccaccgagcccagcgagggcagcgcacccggcagccctgccggcagccccacctccacagaggagggaaccagcaccgagcccagcgaaggcagcgccccaggcaccagcaccgagcctagtgagggcggctctggcggcggcagcgcccaggagattaaacggatcaacaagatcagaagaagacttgtgaaagacagcaacaccaagaaggccggcaagacaggccccatgaaaaccctgctggttagagtgatgacacccgatctgagagagcggctggaaaacctgagaaagaagcctgaaaatatcccccagcccatcagcaatacatctagagccaacctgaataagctgctgaccgattacaccgaaatgaagaaggcgatcctgcatgtgtactgggaagagttccagaaggaccctgtgggcctgatgagccgggtggcccagcctgccagcaagaagatcgatcagaacaagctgaaacctgagatggacgagaagggcaacctgaccaccgccggctttgcctgctctcagtgtggccagcccctgttcgtgtacaagctggagcaggtgtctgagaagggcaaggcttacaccaactacttcggacggtgcaatgtggccgagcacgaaaagctgatcctgctggcccagctgaagcccgagaaggatagcgacgaagccgtgacatatagcctgggaaagtttgggcagagggccctggatttctacagcattcatgtgaccaaggagtccacccaccccgtgaagcccctggcccagatcgccggaaacagatacgcctccggacctgtgggaaaggccctgagcgacgcatgtatgggcacaatcgcctccttcctgtctaagtaccaggacatcatcatcgaacaccagaaggtggtgaagggcaaccagaagagactggagagcctgcgggagctggccggcaaggaaaacctggaataccctagcgtgaccctgccacctcagcctcacaccaaggagggcgttgatgcctacaacgaagtgatcgcccgggtgcgaatgtgggtgaacctgaacctgtggcagaagctgaagctaagcagagatgatgccaagcctctgctgagactgaagggattcccttcctttcctctggtcgagagacaggccaacgaagtggactggtgggacatggtgtgtaacgtgaagaagctgatcaacgagaaaaaggaggatggcaaggtgttttggcagaatctggctggctacaagagacaggaagccctgagaccatacctgagcagcgaggaagatcggaagaagggaaagaaattcgctcggtaccagctgggcgacctgctgctgcacctggaaaagaagcacggcgaggactggggaaaggtgtacgacgaggcctgggagcggattgacaagaaagtggaaggcctgagcaagcacatcaagctggaagaggaacggagaagcgaggacgcccagagcaaggccgccctgaccgactggctgcgggctaaggccagcttcgtgatcgagggcctgaaggaggccgacaaggacgagttctgcagatgcgagctgaagctgcagaagtggtacggggacctgcggggaaagcccttcgccatcgaagccgagaacagcatcctggacatcagcggcttcagcaagcagtacaactgtgccttcatctggcagaaggacggcgtgaagaagctgaacctgtacctgatcatcaactacttcaagggcggcaagctgcggttcaagaagatcaaacctgaagccttcgaagccaacagattctacaccgtgatcaacaaaaagagcggcgagatcgtgcccatggaggtgaacttcaacttcgacgaccccaacctgatcatcctgcctctggcctttggcaagagacagggcagagaattcatctggaacgacctgctgtccctggaaaccggcagcctgaagctggccaacggaagagtgatcgagaagacactgtacaacagaagaacccggcaggatgagcctgccctgttcgtggccctgaccttcgagcggcgggaggtcctggactcctccaatatcaaaccaatgaacctgatcggcgtggcaagaggcgaaaacatccccgccgtgatcgccctgaccgaccccgagggctgcccactgagccggtttaaggatagcctgggaaacccaacccacatcctgagaatcggcgagagctataaggagaagcagcggaccatccaggccaagaaggaggtggagcagcggagagccggcggctacagccggaagtacgccagcaaagccaagaatctggcagacgatatggtgagaaacaccgctagagatctgctgtactacgccgtgacccaggatgccatgctgatcttcgccaacctgagccggggcttcggccggcagggcaagcggaccttcatggccgagagacagtacacacggatggaggactggctgaccgccaagctggcctacgagggcctgagcaagacctacctgtccaagacactggcccagtacacctccaagacatgcagcaactgtgggtttaccatcaccagcgccgactacgacagggtgctggagaagctgaagaagacagcaacaggctggatgaccacaattaacggcaaggagctgaaggtggagggccagattacctactacaacagatacaagagacagaacgtagtcaaggacctgtccgtcgagctggatagactgagcgaagaatctgtgaacaacgacatctcctcctggacaaagggcagaagcggagaagctctgagcctcctgaagaaaagattctcccatagacccgtgcaggagaagttcgtgtgcctgaactgcggcttcgagacacacgcagccgagcaagccgccctgaacatcgccagatcctggctgttcctgcggagccaggagtacaagaaataccagacaaacaagacaaccggcaacaccgataagagagccttcgtcgagacctggcagtccttttaccggaagaagcttaaggaggtgtggaaacctgccgtgcggtctggcggatctggcggaggctccacaagcggcgaggaggccgtgaccttcagggacgtggccctggacttcacctgggaggagtggggctgcctgagcgccgcccagagggagctgtacaaggacgtgatgctggagaactacaggaacctggtgagcctggccggcctgcccggccccaagcccggcctgatcagctggctggagggcgaggaggagccccacccctgggacagcctggtgcacgccgccaggagcaccagcctgagcaagaccagccccaagaaaaagagaaaagtctaagctgccttctgcggggcttgccttctggccatgcccttcttctctcccttgcacctgtacctcttggtctttgaataaagcctgagtaggaaggctagcaaaaaaaaaaaaaaaaaaaaaaaaaaaaaaaaaaaaaaaaaaaaaaaaaaaaaaaaaaaaaaaaaaaaaaaaaaaaaaaa

SEQ ID NO: 7121 - RNA, 5797 nt, synthetic construct
  source 1..5797: mol_type = other RNA
aggaaataagagagaaaagaagagtaagaagaaatataagagccaccatggcccctaagaagaagcgtaaagtgagccggatggaacgcctcgtctacgaggtgcggcagaagtgcagaaacatcgaggacatctgcatctcctgcggatctctgaacgtgaccctggagcacccactgttcatcggcggcatgtgccagaactgtaaaaactgttttctggagtgtgcctatcaatacgacgatgacggctaccagagctactgcaccatctgttgcggcggaagagaggtgctgatgtgtggaaataacaactgctgccggtgcttctgcgtggaatgcgtggacctgctggtgggccccggcgccgcccaggccgctattaaggaagatccttggaactgctacatgtgcggccacaagggcacatacggcctgctgagacggagagaggactggcctagcagactgcagatgttcttcgccaataaccacgaccaggagttcgacccccctaaggtgtaccctcccgtccccgccgagaagagaaagcccatccgggtcctgagcctgttcgatggcatcgccaccggtctgctggtgctgaaggacctgggcatccaggtggataggtacattgcctccgaggtgtgcgaggactccatcaccgtgggaatggtgcgtcatcagggcaagatcatgtacgtgggcgacgtgcggagcgtgacacagaagcatatccaggagtggggccctttcgacctggtgatcggcggcagcccttgcaatgacctgagcatcgtgaacccagcccggaagggcctgtacgagggaaccggcagactgttcttcgagttttacagactgctgcacgacgcccggcctaaggaaggcgacgaccggcccttcttttggctgttcgagaatgtggtggccatgggagtcagcgacaagcgggatattagccggttcctggagagcaaccccgtgatgatcgatgccaaggaagtgagcgccgcccaccgggccagatacttctggggcaatctgcctggcatgaacagacccctggccagcaccgtgaacgacaagctggagctgcaggagtgcctggagcacggccggatcgccaagttcagcaaggtgagaaccatcaccacccgaagcaacagcatcaaacaaggcaaggaccagcactttcctgtgttcatgaacgagaaggaggacatcctgtggtgtaccgagatggagagagtgttcgggttcccagtccactacacagatgtcagcaacatgtctagactggccagacagagactgctgggaagaagctggtccgtccctgtgatcagacacctgttcgcccctctgaaggagtacttcgcctgcgtgagcagcggcaacagcaacgccaacagccggggccccagcttctctagcggcctggtgccactgtccctgagagggagccacatgggccccatggagatctacaaaaccgtgagcgcctggaagcggcagcctgtgcgcgtgctgagcctgtttcggaatatcgataaagtcctgaaaagcctgggattcctggagagcggctctggctccggcggtggcaccctgaagtacgtggaggatgtgacaaacgtggtcagacgggatgtggagaagtggggccccttcgatctggtgtacggcagcacccaacccctgggcagctcttgtgaccggtgccctggctggtacatgtttcagttccaccggatcctgcagtacgccctgccgagacaggagtcccagcggccattcttttggattttcatggacaacttgctgctgaccgaggatgaccaggaaactaccactcggttcctgcagaccgaagccgtgaccctgcaggacgtgagaggccgggactaccagaacgccatgcgggtgtggtccaacatccctggactgaaaagcaagcacgcacctctgacccctaaagaagaggagtacctgcaggcccaggtgcggagcagaagcaagctggacgcccctaaggtggatctgctggtgaagaattgcctcctgcccctgagagagtacttcaagtatttcagccagaatagtctgcccctgggcggcccaagcagcggcgcccctcctcccagcggcggcagcccagccggctccccaacctctaccgaggagggcacctctgagtccgccacccccgagagcggccctggcacctccaccgagcccagcgagggcagcgcacccggcagccctgccggcagccccacctccacagaggagggaaccagcaccgagcccagcgaaggcagcgccccaggcaccagcaccgagcctagtgagggcggctctggcggcggcagcgcccaggagattaaacggatcaacaagatcagaagaagacttgtgaaagacagcaacaccaagaaggccggcaagacaggccccatgaaaaccctgctggttagagtgatgacacccgatctgagagagcggctggaaaacctgagaaagaagcctgaaaatatcccccagcccatcagcaatacatctagagccaacctgaataagctgctgaccgattacaccgaaatgaagaaggcgatcctgcatgtgtactgggaagagttccagaaggaccctgtgggcctgatgagccgggtggcccagcctgccagcaagaagatcgatcagaacaagctgaaacctgagatggacgagaagggcaacctgaccaccgccggctttgcctgctctcagtgtggccagcccctgttcgtgtacaagctggagcaggtgtctgagaagggcaaggcttacaccaactacttcggacggtgcaatgtggccgagcacgaaaagctgatcctgctggcccagctgaagcccgagaaggatagcgacgaagccgtgacatatagcctgggaaagtttgggcagagggccctggatttctacagcattcatgtgaccaaggagtccacccaccccgtgaagcccctggcccagatcgccggaaacagatacgcctccggacctgtgggaaaggccctgagcgacgcatgtatgggcacaatcgcctccttcctgtctaagtaccaggacatcatcatcgaacaccagaaggtggtgaagggcaaccagaagagactggagagcctgcgggagctggccggcaaggaaaacctggaataccctagcgtgaccctgccacctcagcctcacaccaaggagggcgttgatgcctacaacgaagtgatcgcccgggtgcgaatgtgggtgaacctgaacctgtggcagaagctgaagctaagcagagatgatgccaagcctctgctgagactgaagggattcccttcctttcctctggtcgagagacaggccaacgaagtggactggtgggacatggtgtgtaacgtgaagaagctgatcaacgagaaaaaggaggatggcaaggtgttttggcagaatctggctggctacaagagacaggaagccctgagaccatacctgagcagcgaggaagatcggaagaagggaaagaaattcgctcggtaccagctgggcgacctgctgctgcacctggaaaagaagcacggcgaggactggggaaaggtgtacgacgaggcctgggagcggattgacaagaaagtggaaggcctgagcaagcacatcaagctggaagaggaacggagaagcgaggacgcccagagcaaggccgccctgaccgactggctgcgggctaaggccagcttcgtgatcgagggcctgaaggaggccgacaaggacgagttctgcagatgcgagctgaagctgcagaagtggtacggggacctgcggggaaagcccttcgccatcgaagccgagaacagcatcctggacatcagcggcttcagcaagcagtacaactgtgccttcatctggcagaaggacggcgtgaagaagctgaacctgtacctgatcatcaactacttcaagggcggcaagctgcggttcaagaagatcaaacctgaagccttcgaagccaacagattctacaccgtgatcaacaaaaagagcggcgagatcgtgcccatggaggtgaacttcaacttcgacgaccccaacctgatcatcctgcctctggcctttggcaagagacagggcagagaattcatctggaacgacctgctgtccctggaaaccggcagcctgaagctggccaacggaagagtgatcgagaagacactgtacaacagaagaacccggcaggatgagcctgccctgttcgtggccctgaccttcgagcggcgggaggtcctggactcctccaatatcaaaccaatgaacctgatcggcgtggcaagaggcgaaaacatccccgccgtgatcgccctgaccgaccccgagggctgcccactgagccggtttaaggatagcctgggaaacccaacccacatcctgagaatcggcgagagctataaggagaagcagcggaccatccaggccaagaaggaggtggagcagcggagagccggcggctacagccggaagtacgccagcaaagccaagaatctggcagacgatatggtgagaaacaccgctagagatctgctgtactacgccgtgacccaggatgccatgctgatcttcgccaacctgagccggggcttcggccggcagggcaagcggaccttcatggccgagagacagtacacacggatggaggactggctgaccgccaagctggcctacgagggcctgagcaagacctacctgtccaagacactggcccagtacacctccaagacatgcagcaactgtgggtttaccatcaccagcgccgactacgacagggtgctggagaagctgaagaagacagcaacaggctggatgaccacaattaacggcaaggagctgaaggtggagggccagattacctactacaacagatacaagagacagaacgtagtcaaggacctgtccgtcgagctggatagactgagcgaagaatctgtgaacaacgacatctcctcctggacaaagggcagaagcggagaagctctgagcctcctgaagaaaagattctcccatagacccgtgcaggagaagttcgtgtgcctgaactgcggcttcgagacacacgcagccgagcaagccgccctgaacatcgccagatcctggctgttcctgcggagccaggagtacaagaaataccagacaaacaagacaaccggcaacaccgataagagagccttcgtcgagacctggcagtccttttaccggaagaagcttaaggaggtgtggaaacctgccgtgcggtctggcggatctggcggaggctccacaagcctgcagaggctgctgaccttcagggacgtggccatcgagttcagccaggaggagtggacctgcctgaaccacacccagaggaagctgtacagggacgtgatgctggagaactacggccacctgctgttcctgggcctgatcgtgagcaagcccgacctggtgagcttcctggagcagaagaaggagccctggagcgtgaagaggaagaagagggtgaccatccaccccggcaaggtggcccagaccagccccaagaaaaagagaaaagtctaagctgccttctgcggggcttgccttctggccatgcccttcttctctcccttgcacctgtacctcttggtctttgaataaagcctgagtaggaaggctagcaaaaaaaaaaaaaaaaaaaaaaaaaaaaaaaaaaaaaaaaaaaaaaaaaaaaaaaaaaaaaaaaaaaaaaaaaaaaaaaa

SEQ ID NO: 7122 - RNA, 5797 nt, synthetic construct
  source 1..5797: mol_type = other RNA
aggaaataagagagaaaagaagagtaagaagaaatataagagccaccatggcccctaagaagaagcgtaaagtgagccggatggaacgcctcgtctacgaggtgcggcagaagtgcagaaacatcgaggacatctgcatctcctgcggatctctgaacgtgaccctggagcacccactgttcatcggcggcatgtgccagaactgtaaaaactgttttctggagtgtgcctatcaatacgacgatgacggctaccagagctactgcaccatctgttgcggcggaagagaggtgctgatgtgtggaaataacaactgctgccggtgcttctgcgtggaatgcgtggacctgctggtgggccccggcgccgcccaggccgctattaaggaagatccttggaactgctacatgtgcggccacaagggcacatacggcctgctgagacggagagaggactggcctagcagactgcagatgttcttcgccaataaccacgaccaggagttcgacccccctaaggtgtaccctcccgtccccgccgagaagagaaagcccatccgggtcctgagcctgttcgatggcatcgccaccggtctgctggtgctgaaggacctgggcatccaggtggataggtacattgcctccgaggtgtgcgaggactccatcaccgtgggaatggtgcgtcatcagggcaagatcatgtacgtgggcgacgtgcggagcgtgacacagaagcatatccaggagtggggccctttcgacctggtgatcggcggcagcccttgcaatgacctgagcatcgtgaacccagcccggaagggcctgtacgagggaaccggcagactgttcttcgagttttacagactgctgcacgacgcccggcctaaggaaggcgacgaccggcccttcttttggctgttcgagaatgtggtggccatgggagtcagcgacaagcgggatattagccggttcctggagagcaaccccgtgatgatcgatgccaaggaagtgagcgccgcccaccgggccagatacttctggggcaatctgcctggcatgaacagacccctggccagcaccgtgaacgacaagctggagctgcaggagtgcctggagcacggccggatcgccaagttcagcaaggtgagaaccatcaccacccgaagcaacagcatcaaacaaggcaaggaccagcactttcctgtgttcatgaacgagaaggaggacatcctgtggtgtaccgagatggagagagtgttcgggttcccagtccactacacagatgtcagcaacatgtctagactggccagacagagactgctgggaagaagctggtccgtccctgtgatcagacacctgttcgcccctctgaaggagtacttcgcctgcgtgagcagcggcaacagcaacgccaacagccggggccccagcttctctagcggcctggtgccactgtccctgagagggagccacatgggccccatggagatctacaaaaccgtgagcgcctggaagcggcagcctgtgcgcgtgctgagcctgtttcggaatatcgataaagtcctgaaaagcctgggattcctggagagcggctctggctccggcggtggcaccctgaagtacgtggaggatgtgacaaacgtggtcagacgggatgtggagaagtggggccccttcgatctggtgtacggcagcacccaacccctgggcagctcttgtgaccggtgccctggctggtacatgtttcagttccaccggatcctgcagtacgccctgccgagacaggagtcccagcggccattcttttggattttcatggacaacttgctgctgaccgaggatgaccaggaaactaccactcggttcctgcagaccgaagccgtgaccctgcaggacgtgagaggccgggactaccagaacgccatgcgggtgtggtccaacatccctggactgaaaagcaagcacgcacctctgacccctaaagaagaggagtacctgcaggcccaggtgcggagcagaagcaagctggacgcccctaaggtggatctgctggtgaagaattgcctcctgcccctgagagagtacttcaagtatttcagccagaatagtctgcccctgggcggcccaagcagcggcgcccctcctcccagcggcggcagcccagccggctccccaacctctaccgaggagggcacctctgagtccgccacccccgagagcggccctggcacctccaccgagcccagcgagggcagcgcacccggcagccctgccggcagccccacctccacagaggagggaaccagcaccgagcccagcgaaggcagcgccccaggcaccagcaccgagcctagtgagggcggctctggcggcggcagcgcccaggagattaaacggatcaacaagatcagaagaagacttgtgaaagacagcaacaccaagaaggccggcaagacaggccccatgaaaaccctgctggttagagtgatgacacccgatctgagagagcggctggaaaacctgagaaagaagcctgaaaatatcccccagcccatcagcaatacatctagagccaacctgaataagctgctgaccgattacaccgaaatgaagaaggcgatcctgcatgtgtactgggaagagttccagaaggaccctgtgggcctgatgagccgggtggcccagcctgccagcaagaagatcgatcagaacaagctgaaacctgagatggacgagaagggcaacctgaccaccgccggctttgcctgctctcagtgtggccagcccctgttcgtgtacaagctggagcaggtgtctgagaagggcaaggcttacaccaactacttcggacggtgcaatgtggccgagcacgaaaagctgatcctgctggcccagctgaagcccgagaaggatagcgacgaagccgtgacatatagcctgggaaagtttgggcagagggccctggatttctacagcattcatgtgaccaaggagtccacccaccccgtgaagcccctggcccagatcgccggaaacagatacgcctccggacctgtgggaaaggccctgagcgacgcatgtatgggcacaatcgcctccttcctgtctaagtaccaggacatcatcatcgaacaccagaaggtggtgaagggcaaccagaagagactggagagcctgcgggagctggccggcaaggaaaacctggaataccctagcgtgaccctgccacctcagcctcacaccaaggagggcgttgatgcctacaacgaagtgatcgcccgggtgcgaatgtgggtgaacctgaacctgtggcagaagctgaagctaagcagagatgatgccaagcctctgctgagactgaagggattcccttcctttcctctggtcgagagacaggccaacgaagtggactggtgggacatggtgtgtaacgtgaagaagctgatcaacgagaaaaaggaggatggcaaggtgttttggcagaatctggctggctacaagagacaggaagccctgagaccatacctgagcagcgaggaagatcggaagaagggaaagaaattcgctcggtaccagctgggcgacctgctgctgcacctggaaaagaagcacggcgaggactggggaaaggtgtacgacgaggcctgggagcggattgacaagaaagtggaaggcctgagcaagcacatcaagctggaagaggaacggagaagcgaggacgcccagagcaaggccgccctgaccgactggctgcgggctaaggccagcttcgtgatcgagggcctgaaggaggccgacaaggacgagttctgcagatgcgagctgaagctgcagaagtggtacggggacctgcggggaaagcccttcgccatcgaagccgagaacagcatcctggacatcagcggcttcagcaagcagtacaactgtgccttcatctggcagaaggacggcgtgaagaagctgaacctgtacctgatcatcaactacttcaagggcggcaagctgcggttcaagaagatcaaacctgaagccttcgaagccaacagattctacaccgtgatcaacaaaaagagcggcgagatcgtgcccatggaggtgaacttcaacttcgacgaccccaacctgatcatcctgcctctggcctttggcaagagacagggcagagaattcatctggaacgacctgctgtccctggaaaccggcagcctgaagctggccaacggaagagtgatcgagaagacactgtacaacagaagaacccggcaggatgagcctgccctgttcgtggccctgaccttcgagcggcgggaggtcctggactcctccaatatcaaaccaatgaacctgatcggcgtggcaagaggcgaaaacatccccgccgtgatcgccctgaccgaccccgagggctgcccactgagccggtttaaggatagcctgggaaacccaacccacatcctgagaatcggcgagagctataaggagaagcagcggaccatccaggccaagaaggaggtggagcagcggagagccggcggctacagccggaagtacgccagcaaagccaagaatctggcagacgatatggtgagaaacaccgctagagatctgctgtactacgccgtgacccaggatgccatgctgatcttcgccaacctgagccggggcttcggccggcagggcaagcggaccttcatggccgagagacagtacacacggatggaggactggctgaccgccaagctggcctacgagggcctgagcaagacctacctgtccaagacactggcccagtacacctccaagacatgcagcaactgtgggtttaccatcaccagcgccgactacgacagggtgctggagaagctgaagaagacagcaacaggctggatgaccacaattaacggcaaggagctgaaggtggagggccagattacctactacaacagatacaagagacagaacgtagtcaaggacctgtccgtcgagctggatagactgagcgaagaatctgtgaacaacgacatctcctcctggacaaagggcagaagcggagaagctctgagcctcctgaagaaaagattctcccatagacccgtgcaggagaagttcgtgtgcctgaactgcggcttcgagacacacgcagccgagcaagccgccctgaacatcgccagatcctggctgttcctgcggagccaggagtacaagaaataccagacaaacaagacaaccggcaacaccgataagagagccttcgtcgagacctggcagtccttttaccggaagaagcttaaggaggtgtggaaacctgccgtgcggtctggcggatctggcggaggctccacaagcggcaagcccggcgccctgagcttcgccgacgtggccgtgtacttcagcagcgaggagtggggctgcctgaggcccgcccagagggccctgtacagggacgtgatgagggagacctacggccacctgggcgccctgggcgaggccaggccccccgccctgatcagctggatggagaggaagaaggaggcctggagccccgaggccgaggaccccgaggacagggccaggcaccccggctacggcaccagccccaagaaaaagagaaaagtctaagctgccttctgcggggcttgccttctggccatgcccttcttctctcccttgcacctgtacctcttggtctttgaataaagcctgagtaggaaggctagcaaaaaaaaaaaaaaaaaaaaaaaaaaaaaaaaaaaaaaaaaaaaaaaaaaaaaaaaaaaaaaaaaaaaaaaaaaaaaaaa

SEQ ID NO: 7123 - RNA, 5797 nt, synthetic construct
  source 1..5797: mol_type = other RNA
aggaaataagagagaaaagaagagtaagaagaaatataagagccaccatggcccctaagaagaagcgtaaagtgagccggatggaacgcctcgtctacgaggtgcggcagaagtgcagaaacatcgaggacatctgcatctcctgcggatctctgaacgtgaccctggagcacccactgttcatcggcggcatgtgccagaactgtaaaaactgttttctggagtgtgcctatcaatacgacgatgacggctaccagagctactgcaccatctgttgcggcggaagagaggtgctgatgtgtggaaataacaactgctgccggtgcttctgcgtggaatgcgtggacctgctggtgggccccggcgccgcccaggccgctattaaggaagatccttggaactgctacatgtgcggccacaagggcacatacggcctgctgagacggagagaggactggcctagcagactgcagatgttcttcgccaataaccacgaccaggagttcgacccccctaaggtgtaccctcccgtccccgccgagaagagaaagcccatccgggtcctgagcctgttcgatggcatcgccaccggtctgctggtgctgaaggacctgggcatccaggtggataggtacattgcctccgaggtgtgcgaggactccatcaccgtgggaatggtgcgtcatcagggcaagatcatgtacgtgggcgacgtgcggagcgtgacacagaagcatatccaggagtggggccctttcgacctggtgatcggcggcagcccttgcaatgacctgagcatcgtgaacccagcccggaagggcctgtacgagggaaccggcagactgttcttcgagttttacagactgctgcacgacgcccggcctaaggaaggcgacgaccggcccttcttttggctgttcgagaatgtggtggccatgggagtcagcgacaagcgggatattagccggttcctggagagcaaccccgtgatgatcgatgccaaggaagtgagcgccgcccaccgggccagatacttctggggcaatctgcctggcatgaacagacccctggccagcaccgtgaacgacaagctggagctgcaggagtgcctggagcacggccggatcgccaagttcagcaaggtgagaaccatcaccacccgaagcaacagcatcaaacaaggcaaggaccagcactttcctgtgttcatgaacgagaaggaggacatcctgtggtgtaccgagatggagagagtgttcgggttcccagtccactacacagatgtcagcaacatgtctagactggccagacagagactgctgggaagaagctggtccgtccctgtgatcagacacctgttcgcccctctgaaggagtacttcgcctgcgtgagcagcggcaacagcaacgccaacagccggggccccagcttctctagcggcctggtgccactgtccctgagagggagccacatgggccccatggagatctacaaaaccgtgagcgcctggaagcggcagcctgtgcgcgtgctgagcctgtttcggaatatcgataaagtcctgaaaagcctgggattcctggagagcggctctggctccggcggtggcaccctgaagtacgtggaggatgtgacaaacgtggtcagacgggatgtggagaagtggggccccttcgatctggtgtacggcagcacccaacccctgggcagctcttgtgaccggtgccctggctggtacatgtttcagttccaccggatcctgcagtacgccctgccgagacaggagtcccagcggccattcttttggattttcatggacaacttgctgctgaccgaggatgaccaggaaactaccactcggttcctgcagaccgaagccgtgaccctgcaggacgtgagaggccgggactaccagaacgccatgcgggtgtggtccaacatccctggactgaaaagcaagcacgcacctctgacccctaaagaagaggagtacctgcaggcccaggtgcggagcagaagcaagctggacgcccctaaggtggatctgctggtgaagaattgcctcctgcccctgagagagtacttcaagtatttcagccagaatagtctgcccctgggcggcccaagcagcggcgcccctcctcccagcggcggcagcccagccggctccccaacctctaccgaggagggcacctctgagtccgccacccccgagagcggccctggcacctccaccgagcccagcgagggcagcgcacccggcagccctgccggcagccccacctccacagaggagggaaccagcaccgagcccagcgaaggcagcgccccaggcaccagcaccgagcctagtgagggcggctctggcggcggcagcgcccaggagattaaacggatcaacaagatcagaagaagacttgtgaaagacagcaacaccaagaaggccggcaagacaggccccatgaaaaccctgctggttagagtgatgacacccgatctgagagagcggctggaaaacctgagaaagaagcctgaaaatatcccccagcccatcagcaatacatctagagccaacctgaataagctgctgaccgattacaccgaaatgaagaaggcgatcctgcatgtgtactgggaagagttccagaaggaccctgtgggcctgatgagccgggtggcccagcctgccagcaagaagatcgatcagaacaagctgaaacctgagatggacgagaagggcaacctgaccaccgccggctttgcctgctctcagtgtggccagcccctgttcgtgtacaagctggagcaggtgtctgagaagggcaaggcttacaccaactacttcggacggtgcaatgtggccgagcacgaaaagctgatcctgctggcccagctgaagcccgagaaggatagcgacgaagccgtgacatatagcctgggaaagtttgggcagagggccctggatttctacagcattcatgtgaccaaggagtccacccaccccgtgaagcccctggcccagatcgccggaaacagatacgcctccggacctgtgggaaaggccctgagcgacgcatgtatgggcacaatcgcctccttcctgtctaagtaccaggacatcatcatcgaacaccagaaggtggtgaagggcaaccagaagagactggagagcctgcgggagctggccggcaaggaaaacctggaataccctagcgtgaccctgccacctcagcctcacaccaaggagggcgttgatgcctacaacgaagtgatcgcccgggtgcgaatgtgggtgaacctgaacctgtggcagaagctgaagctaagcagagatgatgccaagcctctgctgagactgaagggattcccttcctttcctctggtcgagagacaggccaacgaagtggactggtgggacatggtgtgtaacgtgaagaagctgatcaacgagaaaaaggaggatggcaaggtgttttggcagaatctggctggctacaagagacaggaagccctgagaccatacctgagcagcgaggaagatcggaagaagggaaagaaattcgctcggtaccagctgggcgacctgctgctgcacctggaaaagaagcacggcgaggactggggaaaggtgtacgacgaggcctgggagcggattgacaagaaagtggaaggcctgagcaagcacatcaagctggaagaggaacggagaagcgaggacgcccagagcaaggccgccctgaccgactggctgcgggctaaggccagcttcgtgatcgagggcctgaaggaggccgacaaggacgagttctgcagatgcgagctgaagctgcagaagtggtacggggacctgcggggaaagcccttcgccatcgaagccgagaacagcatcctggacatcagcggcttcagcaagcagtacaactgtgccttcatctggcagaaggacggcgtgaagaagctgaacctgtacctgatcatcaactacttcaagggcggcaagctgcggttcaagaagatcaaacctgaagccttcgaagccaacagattctacaccgtgatcaacaaaaagagcggcgagatcgtgcccatggaggtgaacttcaacttcgacgaccccaacctgatcatcctgcctctggcctttggcaagagacagggcagagaattcatctggaacgacctgctgtccctggaaaccggcagcctgaagctggccaacggaagagtgatcgagaagacactgtacaacagaagaacccggcaggatgagcctgccctgttcgtggccctgaccttcgagcggcgggaggtcctggactcctccaatatcaaaccaatgaacctgatcggcgtggcaagaggcgaaaacatccccgccgtgatcgccctgaccgaccccgagggctgcccactgagccggtttaaggatagcctgggaaacccaacccacatcctgagaatcggcgagagctataaggagaagcagcggaccatccaggccaagaaggaggtggagcagcggagagccggcggctacagccggaagtacgccagcaaagccaagaatctggcagacgatatggtgagaaacaccgctagagatctgctgtactacgccgtgacccaggatgccatgctgatcttcgccaacctgagccggggcttcggccggcagggcaagcggaccttcatggccgagagacagtacacacggatggaggactggctgaccgccaagctggcctacgagggcctgagcaagacctacctgtccaagacactggcccagtacacctccaagacatgcagcaactgtgggtttaccatcaccagcgccgactacgacagggtgctggagaagctgaagaagacagcaacaggctggatgaccacaattaacggcaaggagctgaaggtggagggccagattacctactacaacagatacaagagacagaacgtagtcaaggacctgtccgtcgagctggatagactgagcgaagaatctgtgaacaacgacatctcctcctggacaaagggcagaagcggagaagctctgagcctcctgaagaaaagattctcccatagacccgtgcaggagaagttcgtgtgcctgaactgcggcttcgagacacacgcagccgagcaagccgccctgaacatcgccagatcctggctgttcctgcggagccaggagtacaagaaataccagacaaacaagacaaccggcaacaccgataagagagccttcgtcgagacctggcagtccttttaccggaagaagcttaaggaggtgtggaaacctgccgtgcggtctggcggatctggcggaggctccacaagccaccaggacctggtgaccttcaaggacgtggccgtggacttcacccccgaggagtggggccagctggtgcccagccagaaggagctgtacagggacgtgatgctggagaactaccagaacctggtgtggctgggcctggccgtgagcaagcccgacgtgatctaccagctggagcaggtgggcggcacctgggtgcccgagggcgagaccctgaccgtgagctgcagcgacttcgtgaccaggaccagccccaagaaaaagagaaaagtctaagctgccttctgcggggcttgccttctggccatgcccttcttctctcccttgcacctgtacctcttggtctttgaataaagcctgagtaggaaggctagcaaaaaaaaaaaaaaaaaaaaaaaaaaaaaaaaaaaaaaaaaaaaaaaaaaaaaaaaaaaaaaaaaaaaaaaaaaaaaaaa

SEQ ID NO: 7124 - RNA, 5815 nt, synthetic construct
  source 1..5815: mol_type = other RNA
aggaaataagagagaaaagaagagtaagaagaaatataagagccaccatggcccctaagaagaagcgtaaagtgagccggatggaacgcctcgtctacgaggtgcggcagaagtgcagaaacatcgaggacatctgcatctcctgcggatctctgaacgtgaccctggagcacccactgttcatcggcggcatgtgccagaactgtaaaaactgttttctggagtgtgcctatcaatacgacgatgacggctaccagagctactgcaccatctgttgcggcggaagagaggtgctgatgtgtggaaataacaactgctgccggtgcttctgcgtggaatgcgtggacctgctggtgggccccggcgccgcccaggccgctattaaggaagatccttggaactgctacatgtgcggccacaagggcacatacggcctgctgagacggagagaggactggcctagcagactgcagatgttcttcgccaataaccacgaccaggagttcgacccccctaaggtgtaccctcccgtccccgccgagaagagaaagcccatccgggtcctgagcctgttcgatggcatcgccaccggtctgctggtgctgaaggacctgggcatccaggtggataggtacattgcctccgaggtgtgcgaggactccatcaccgtgggaatggtgcgtcatcagggcaagatcatgtacgtgggcgacgtgcggagcgtgacacagaagcatatccaggagtggggccctttcgacctggtgatcggcggcagcccttgcaatgacctgagcatcgtgaacccagcccggaagggcctgtacgagggaaccggcagactgttcttcgagttttacagactgctgcacgacgcccggcctaaggaaggcgacgaccggcccttcttttggctgttcgagaatgtggtggccatgggagtcagcgacaagcgggatattagccggttcctggagagcaaccccgtgatgatcgatgccaaggaagtgagcgccgcccaccgggccagatacttctggggcaatctgcctggcatgaacagacccctggccagcaccgtgaacgacaagctggagctgcaggagtgcctggagcacggccggatcgccaagttcagcaaggtgagaaccatcaccacccgaagcaacagcatcaaacaaggcaaggaccagcactttcctgtgttcatgaacgagaaggaggacatcctgtggtgtaccgagatggagagagtgttcgggttcccagtccactacacagatgtcagcaacatgtctagactggccagacagagactgctgggaagaagctggtccgtccctgtgatcagacacctgttcgcccctctgaaggagtacttcgcctgcgtgagcagcggcaacagcaacgccaacagccggggccccagcttctctagcggcctggtgccactgtccctgagagggagccacatgggccccatggagatctacaaaaccgtgagcgcctggaagcggcagcctgtgcgcgtgctgagcctgtttcggaatatcgataaagtcctgaaaagcctgggattcctggagagcggctctggctccggcggtggcaccctgaagtacgtggaggatgtgacaaacgtggtcagacgggatgtggagaagtggggccccttcgatctggtgtacggcagcacccaacccctgggcagctcttgtgaccggtgccctggctggtacatgtttcagttccaccggatcctgcagtacgccctgccgagacaggagtcccagcggccattcttttggattttcatggacaacttgctgctgaccgaggatgaccaggaaactaccactcggttcctgcagaccgaagccgtgaccctgcaggacgtgagaggccgggactaccagaacgccatgcgggtgtggtccaacatccctggactgaaaagcaagcacgcacctctgacccctaaagaagaggagtacctgcaggcccaggtgcggagcagaagcaagctggacgcccctaaggtggatctgctggtgaagaattgcctcctgcccctgagagagtacttcaagtatttcagccagaatagtctgcccctgggcggcccaagcagcggcgcccctcctcccagcggcggcagcccagccggctccccaacctctaccgaggagggcacctctgagtccgccacccccgagagcggccctggcacctccaccgagcccagcgagggcagcgcacccggcagccctgccggcagccccacctccacagaggagggaaccagcaccgagcccagcgaaggcagcgccccaggcaccagcaccgagcctagtgagggcggctctggcggcggcagcgcccaggagattaaacggatcaacaagatcagaagaagacttgtgaaagacagcaacaccaagaaggccggcaagacaggccccatgaaaaccctgctggttagagtgatgacacccgatctgagagagcggctggaaaacctgagaaagaagcctgaaaatatcccccagcccatcagcaatacatctagagccaacctgaataagctgctgaccgattacaccgaaatgaagaaggcgatcctgcatgtgtactgggaagagttccagaaggaccctgtgggcctgatgagccgggtggcccagcctgccagcaagaagatcgatcagaacaagctgaaacctgagatggacgagaagggcaacctgaccaccgccggctttgcctgctctcagtgtggccagcccctgttcgtgtacaagctggagcaggtgtctgagaagggcaaggcttacaccaactacttcggacggtgcaatgtggccgagcacgaaaagctgatcctgctggcccagctgaagcccgagaaggatagcgacgaagccgtgacatatagcctgggaaagtttgggcagagggccctggatttctacagcattcatgtgaccaaggagtccacccaccccgtgaagcccctggcccagatcgccggaaacagatacgcctccggacctgtgggaaaggccctgagcgacgcatgtatgggcacaatcgcctccttcctgtctaagtaccaggacatcatcatcgaacaccagaaggtggtgaagggcaaccagaagagactggagagcctgcgggagctggccggcaaggaaaacctggaataccctagcgtgaccctgccacctcagcctcacaccaaggagggcgttgatgcctacaacgaagtgatcgcccgggtgcgaatgtgggtgaacctgaacctgtggcagaagctgaagctaagcagagatgatgccaagcctctgctgagactgaagggattcccttcctttcctctggtcgagagacaggccaacgaagtggactggtgggacatggtgtgtaacgtgaagaagctgatcaacgagaaaaaggaggatggcaaggtgttttggcagaatctggctggctacaagagacaggaagccctgagaccatacctgagcagcgaggaagatcggaagaagggaaagaaattcgctcggtaccagctgggcgacctgctgctgcacctggaaaagaagcacggcgaggactggggaaaggtgtacgacgaggcctgggagcggattgacaagaaagtggaaggcctgagcaagcacatcaagctggaagaggaacggagaagcgaggacgcccagagcaaggccgccctgaccgactggctgcgggctaaggccagcttcgtgatcgagggcctgaaggaggccgacaaggacgagttctgcagatgcgagctgaagctgcagaagtggtacggggacctgcggggaaagcccttcgccatcgaagccgagaacagcatcctggacatcagcggcttcagcaagcagtacaactgtgccttcatctggcagaaggacggcgtgaagaagctgaacctgtacctgatcatcaactacttcaagggcggcaagctgcggttcaagaagatcaaacctgaagccttcgaagccaacagattctacaccgtgatcaacaaaaagagcggcgagatcgtgcccatggaggtgaacttcaacttcgacgaccccaacctgatcatcctgcctctggcctttggcaagagacagggcagagaattcatctggaacgacctgctgtccctggaaaccggcagcctgaagctggccaacggaagagtgatcgagaagacactgtacaacagaagaacccggcaggatgagcctgccctgttcgtggccctgaccttcgagcggcgggaggtcctggactcctccaatatcaaaccaatgaacctgatcggcgtggcaagaggcgaaaacatccccgccgtgatcgccctgaccgaccccgagggctgcccactgagccggtttaaggatagcctgggaaacccaacccacatcctgagaatcggcgagagctataaggagaagcagcggaccatccaggccaagaaggaggtggagcagcggagagccggcggctacagccggaagtacgccagcaaagccaagaatctggcagacgatatggtgagaaacaccgctagagatctgctgtactacgccgtgacccaggatgccatgctgatcttcgccaacctgagccggggcttcggccggcagggcaagcggaccttcatggccgagagacagtacacacggatggaggactggctgaccgccaagctggcctacgagggcctgagcaagacctacctgtccaagacactggcccagtacacctccaagacatgcagcaactgtgggtttaccatcaccagcgccgactacgacagggtgctggagaagctgaagaagacagcaacaggctggatgaccacaattaacggcaaggagctgaaggtggagggccagattacctactacaacagatacaagagacagaacgtagtcaaggacctgtccgtcgagctggatagactgagcgaagaatctgtgaacaacgacatctcctcctggacaaagggcagaagcggagaagctctgagcctcctgaagaaaagattctcccatagacccgtgcaggagaagttcgtgtgcctgaactgcggcttcgagacacacgcagccgagcaagccgccctgaacatcgccagatcctggctgttcctgcggagccaggagtacaagaaataccagacaaacaagacaaccggcaacaccgataagagagccttcgtcgagacctggcagtccttttaccggaagaagcttaaggaggtgtggaaacctgccgtgcggtctggcggatctggcggaggctccacaagcgtgaccttcgaggacgtggccgtgaacttcagcctggaggagtgggccctgctggacctgagccagaagaagctgtacagggacgtgatgcaggagaccttcaggaacctggccagcgtgggcgagaagtgggacaaccacaacatcgaggactggaacaagacccagggcaggaagctgaggagccacatggtggagaagctgagcgagagcaaggagggcggccagcacggcgagaccgccagccagatccccaacctgaccagccccaagaaaaagagaaaagtctaagctgccttctgcggggcttgccttctggccatgcccttcttctctcccttgcacctgtacctcttggtctttgaataaagcctgagtaggaaggctagcaaaaaaaaaaaaaaaaaaaaaaaaaaaaaaaaaaaaaaaaaaaaaaaaaaaaaaaaaaaaaaaaaaaaaaaaaaaaaaaa

SEQ ID NO: 7125 - RNA, 5797 nt, synthetic construct
  source 1..5797: mol_type = other RNA
aggaaataagagagaaaagaagagtaagaagaaatataagagccaccatggcccctaagaagaagcgtaaagtgagccggatggaacgcctcgtctacgaggtgcggcagaagtgcagaaacatcgaggacatctgcatctcctgcggatctctgaacgtgaccctggagcacccactgttcatcggcggcatgtgccagaactgtaaaaactgttttctggagtgtgcctatcaatacgacgatgacggctaccagagctactgcaccatctgttgcggcggaagagaggtgctgatgtgtggaaataacaactgctgccggtgcttctgcgtggaatgcgtggacctgctggtgggccccggcgccgcccaggccgctattaaggaagatccttggaactgctacatgtgcggccacaagggcacatacggcctgctgagacggagagaggactggcctagcagactgcagatgttcttcgccaataaccacgaccaggagttcgacccccctaaggtgtaccctcccgtccccgccgagaagagaaagcccatccgggtcctgagcctgttcgatggcatcgccaccggtctgctggtgctgaaggacctgggcatccaggtggataggtacattgcctccgaggtgtgcgaggactccatcaccgtgggaatggtgcgtcatcagggcaagatcatgtacgtgggcgacgtgcggagcgtgacacagaagcatatccaggagtggggccctttcgacctggtgatcggcggcagcccttgcaatgacctgagcatcgtgaacccagcccggaagggcctgtacgagggaaccggcagactgttcttcgagttttacagactgctgcacgacgcccggcctaaggaaggcgacgaccggcccttcttttggctgttcgagaatgtggtggccatgggagtcagcgacaagcgggatattagccggttcctggagagcaaccccgtgatgatcgatgccaaggaagtgagcgccgcccaccgggccagatacttctggggcaatctgcctggcatgaacagacccctggccagcaccgtgaacgacaagctggagctgcaggagtgcctggagcacggccggatcgccaagttcagcaaggtgagaaccatcaccacccgaagcaacagcatcaaacaaggcaaggaccagcactttcctgtgttcatgaacgagaaggaggacatcctgtggtgtaccgagatggagagagtgttcgggttcccagtccactacacagatgtcagcaacatgtctagactggccagacagagactgctgggaagaagctggtccgtccctgtgatcagacacctgttcgcccctctgaaggagtacttcgcctgcgtgagcagcggcaacagcaacgccaacagccggggccccagcttctctagcggcctggtgccactgtccctgagagggagccacatgggccccatggagatctacaaaaccgtgagcgcctggaagcggcagcctgtgcgcgtgctgagcctgtttcggaatatcgataaagtcctgaaaagcctgggattcctggagagcggctctggctccggcggtggcaccctgaagtacgtggaggatgtgacaaacgtggtcagacgggatgtggagaagtggggccccttcgatctggtgtacggcagcacccaacccctgggcagctcttgtgaccggtgccctggctggtacatgtttcagttccaccggatcctgcagtacgccctgccgagacaggagtcccagcggccattcttttggattttcatggacaacttgctgctgaccgaggatgaccaggaaactaccactcggttcctgcagaccgaagccgtgaccctgcaggacgtgagaggccgggactaccagaacgccatgcgggtgtggtccaacatccctggactgaaaagcaagcacgcacctctgacccctaaagaagaggagtacctgcaggcccaggtgcggagcagaagcaagctggacgcccctaaggtggatctgctggtgaagaattgcctcctgcccctgagagagtacttcaagtatttcagccagaatagtctgcccctgggcggcccaagcagcggcgcccctcctcccagcggcggcagcccagccggctccccaacctctaccgaggagggcacctctgagtccgccacccccgagagcggccctggcacctccaccgagcccagcgagggcagcgcacccggcagccctgccggcagccccacctccacagaggagggaaccagcaccgagcccagcgaaggcagcgccccaggcaccagcaccgagcctagtgagggcggctctggcggcggcagcgcccaggagattaaacggatcaacaagatcagaagaagacttgtgaaagacagcaacaccaagaaggccggcaagacaggccccatgaaaaccctgctggttagagtgatgacacccgatctgagagagcggctggaaaacctgagaaagaagcctgaaaatatcccccagcccatcagcaatacatctagagccaacctgaataagctgctgaccgattacaccgaaatgaagaaggcgatcctgcatgtgtactgggaagagttccagaaggaccctgtgggcctgatgagccgggtggcccagcctgccagcaagaagatcgatcagaacaagctgaaacctgagatggacgagaagggcaacctgaccaccgccggctttgcctgctctcagtgtggccagcccctgttcgtgtacaagctggagcaggtgtctgagaagggcaaggcttacaccaactacttcggacggtgcaatgtggccgagcacgaaaagctgatcctgctggcccagctgaagcccgagaaggatagcgacgaagccgtgacatatagcctgggaaagtttgggcagagggccctggatttctacagcattcatgtgaccaaggagtccacccaccccgtgaagcccctggcccagatcgccggaaacagatacgcctccggacctgtgggaaaggccctgagcgacgcatgtatgggcacaatcgcctccttcctgtctaagtaccaggacatcatcatcgaacaccagaaggtggtgaagggcaaccagaagagactggagagcctgcgggagctggccggcaaggaaaacctggaataccctagcgtgaccctgccacctcagcctcacaccaaggagggcgttgatgcctacaacgaagtgatcgcccgggtgcgaatgtgggtgaacctgaacctgtggcagaagctgaagctaagcagagatgatgccaagcctctgctgagactgaagggattcccttcctttcctctggtcgagagacaggccaacgaagtggactggtgggacatggtgtgtaacgtgaagaagctgatcaacgagaaaaaggaggatggcaaggtgttttggcagaatctggctggctacaagagacaggaagccctgagaccatacctgagcagcgaggaagatcggaagaagggaaagaaattcgctcggtaccagctgggcgacctgctgctgcacctggaaaagaagcacggcgaggactggggaaaggtgtacgacgaggcctgggagcggattgacaagaaagtggaaggcctgagcaagcacatcaagctggaagaggaacggagaagcgaggacgcccagagcaaggccgccctgaccgactggctgcgggctaaggccagcttcgtgatcgagggcctgaaggaggccgacaaggacgagttctgcagatgcgagctgaagctgcagaagtggtacggggacctgcggggaaagcccttcgccatcgaagccgagaacagcatcctggacatcagcggcttcagcaagcagtacaactgtgccttcatctggcagaaggacggcgtgaagaagctgaacctgtacctgatcatcaactacttcaagggcggcaagctgcggttcaagaagatcaaacctgaagccttcgaagccaacagattctacaccgtgatcaacaaaaagagcggcgagatcgtgcccatggaggtgaacttcaacttcgacgaccccaacctgatcatcctgcctctggcctttggcaagagacagggcagagaattcatctggaacgacctgctgtccctggaaaccggcagcctgaagctggccaacggaagagtgatcgagaagacactgtacaacagaagaacccggcaggatgagcctgccctgttcgtggccctgaccttcgagcggcgggaggtcctggactcctccaatatcaaaccaatgaacctgatcggcgtggcaagaggcgaaaacatccccgccgtgatcgccctgaccgaccccgagggctgcccactgagccggtttaaggatagcctgggaaacccaacccacatcctgagaatcggcgagagctataaggagaagcagcggaccatccaggccaagaaggaggtggagcagcggagagccggcggctacagccggaagtacgccagcaaagccaagaatctggcagacgatatggtgagaaacaccgctagagatctgctgtactacgccgtgacccaggatgccatgctgatcttcgccaacctgagccggggcttcggccggcagggcaagcggaccttcatggccgagagacagtacacacggatggaggactggctgaccgccaagctggcctacgagggcctgagcaagacctacctgtccaagacactggcccagtacacctccaagacatgcagcaactgtgggtttaccatcaccagcgccgactacgacagggtgctggagaagctgaagaagacagcaacaggctggatgaccacaattaacggcaaggagctgaaggtggagggccagattacctactacaacagatacaagagacagaacgtagtcaaggacctgtccgtcgagctggatagactgagcgaagaatctgtgaacaacgacatctcctcctggacaaagggcagaagcggagaagctctgagcctcctgaagaaaagattctcccatagacccgtgcaggagaagttcgtgtgcctgaactgcggcttcgagacacacgcagccgagcaagccgccctgaacatcgccagatcctggctgttcctgcggagccaggagtacaagaaataccagacaaacaagacaaccggcaacaccgataagagagccttcgtcgagacctggcagtccttttaccggaagaagcttaaggaggtgtggaaacctgccgtgcggtctggcggatctggcggaggctccacaagcagccaggtgagcctgaccttcgaggacgtggccgtgctgttcaccagggacgagtggaagaagctggtgcccagccagaggagcctgtacagggaggtgatgctggagaactacagcaacctggccagcctggccggcttccccttcaccaagcccaaggtgatcagcctgctgcagcagggcgaggacccctggaaggtggaggaggagggccccggcggcttcagcctgggcctgaagtgcaccagccccaagaaaaagagaaaagtctaagctgccttctgcggggcttgccttctggccatgcccttcttctctcccttgcacctgtacctcttggtctttgaataaagcctgagtaggaaggctagcaaaaaaaaaaaaaaaaaaaaaaaaaaaaaaaaaaaaaaaaaaaaaaaaaaaaaaaaaaaaaaaaaaaaaaaaaaaaaaaa

SEQ ID NO: 7126 - RNA, 5797 nt, synthetic construct
  source 1..5797: mol_type = other RNA
aggaaataagagagaaaagaagagtaagaagaaatataagagccaccatggcccctaagaagaagcgtaaagtgagccggatggaacgcctcgtctacgaggtgcggcagaagtgcagaaacatcgaggacatctgcatctcctgcggatctctgaacgtgaccctggagcacccactgttcatcggcggcatgtgccagaactgtaaaaactgttttctggagtgtgcctatcaatacgacgatgacggctaccagagctactgcaccatctgttgcggcggaagagaggtgctgatgtgtggaaataacaactgctgccggtgcttctgcgtggaatgcgtggacctgctggtgggccccggcgccgcccaggccgctattaaggaagatccttggaactgctacatgtgcggccacaagggcacatacggcctgctgagacggagagaggactggcctagcagactgcagatgttcttcgccaataaccacgaccaggagttcgacccccctaaggtgtaccctcccgtccccgccgagaagagaaagcccatccgggtcctgagcctgttcgatggcatcgccaccggtctgctggtgctgaaggacctgggcatccaggtggataggtacattgcctccgaggtgtgcgaggactccatcaccgtgggaatggtgcgtcatcagggcaagatcatgtacgtgggcgacgtgcggagcgtgacacagaagcatatccaggagtggggccctttcgacctggtgatcggcggcagcccttgcaatgacctgagcatcgtgaacccagcccggaagggcctgtacgagggaaccggcagactgttcttcgagttttacagactgctgcacgacgcccggcctaaggaaggcgacgaccggcccttcttttggctgttcgagaatgtggtggccatgggagtcagcgacaagcgggatattagccggttcctggagagcaaccccgtgatgatcgatgccaaggaagtgagcgccgcccaccgggccagatacttctggggcaatctgcctggcatgaacagacccctggccagcaccgtgaacgacaagctggagctgcaggagtgcctggagcacggccggatcgccaagttcagcaaggtgagaaccatcaccacccgaagcaacagcatcaaacaaggcaaggaccagcactttcctgtgttcatgaacgagaaggaggacatcctgtggtgtaccgagatggagagagtgttcgggttcccagtccactacacagatgtcagcaacatgtctagactggccagacagagactgctgggaagaagctggtccgtccctgtgatcagacacctgttcgcccctctgaaggagtacttcgcctgcgtgagcagcggcaacagcaacgccaacagccggggccccagcttctctagcggcctggtgccactgtccctgagagggagccacatgggccccatggagatctacaaaaccgtgagcgcctggaagcggcagcctgtgcgcgtgctgagcctgtttcggaatatcgataaagtcctgaaaagcctgggattcctggagagcggctctggctccggcggtggcaccctgaagtacgtggaggatgtgacaaacgtggtcagacgggatgtggagaagtggggccccttcgatctggtgtacggcagcacccaacccctgggcagctcttgtgaccggtgccctggctggtacatgtttcagttccaccggatcctgcagtacgccctgccgagacaggagtcccagcggccattcttttggattttcatggacaacttgctgctgaccgaggatgaccaggaaactaccactcggttcctgcagaccgaagccgtgaccctgcaggacgtgagaggccgggactaccagaacgccatgcgggtgtggtccaacatccctggactgaaaagcaagcacgcacctctgacccctaaagaagaggagtacctgcaggcccaggtgcggagcagaagcaagctggacgcccctaaggtggatctgctggtgaagaattgcctcctgcccctgagagagtacttcaagtatttcagccagaatagtctgcccctgggcggcccaagcagcggcgcccctcctcccagcggcggcagcccagccggctccccaacctctaccgaggagggcacctctgagtccgccacccccgagagcggccctggcacctccaccgagcccagcgagggcagcgcacccggcagccctgccggcagccccacctccacagaggagggaaccagcaccgagcccagcgaaggcagcgccccaggcaccagcaccgagcctagtgagggcggctctggcggcggcagcgcccaggagattaaacggatcaacaagatcagaagaagacttgtgaaagacagcaacaccaagaaggccggcaagacaggccccatgaaaaccctgctggttagagtgatgacacccgatctgagagagcggctggaaaacctgagaaagaagcctgaaaatatcccccagcccatcagcaatacatctagagccaacctgaataagctgctgaccgattacaccgaaatgaagaaggcgatcctgcatgtgtactgggaagagttccagaaggaccctgtgggcctgatgagccgggtggcccagcctgccagcaagaagatcgatcagaacaagctgaaacctgagatggacgagaagggcaacctgaccaccgccggctttgcctgctctcagtgtggccagcccctgttcgtgtacaagctggagcaggtgtctgagaagggcaaggcttacaccaactacttcggacggtgcaatgtggccgagcacgaaaagctgatcctgctggcccagctgaagcccgagaaggatagcgacgaagccgtgacatatagcctgggaaagtttgggcagagggccctggatttctacagcattcatgtgaccaaggagtccacccaccccgtgaagcccctggcccagatcgccggaaacagatacgcctccggacctgtgggaaaggccctgagcgacgcatgtatgggcacaatcgcctccttcctgtctaagtaccaggacatcatcatcgaacaccagaaggtggtgaagggcaaccagaagagactggagagcctgcgggagctggccggcaaggaaaacctggaataccctagcgtgaccctgccacctcagcctcacaccaaggagggcgttgatgcctacaacgaagtgatcgcccgggtgcgaatgtgggtgaacctgaacctgtggcagaagctgaagctaagcagagatgatgccaagcctctgctgagactgaagggattcccttcctttcctctggtcgagagacaggccaacgaagtggactggtgggacatggtgtgtaacgtgaagaagctgatcaacgagaaaaaggaggatggcaaggtgttttggcagaatctggctggctacaagagacaggaagccctgagaccatacctgagcagcgaggaagatcggaagaagggaaagaaattcgctcggtaccagctgggcgacctgctgctgcacctggaaaagaagcacggcgaggactggggaaaggtgtacgacgaggcctgggagcggattgacaagaaagtggaaggcctgagcaagcacatcaagctggaagaggaacggagaagcgaggacgcccagagcaaggccgccctgaccgactggctgcgggctaaggccagcttcgtgatcgagggcctgaaggaggccgacaaggacgagttctgcagatgcgagctgaagctgcagaagtggtacggggacctgcggggaaagcccttcgccatcgaagccgagaacagcatcctggacatcagcggcttcagcaagcagtacaactgtgccttcatctggcagaaggacggcgtgaagaagctgaacctgtacctgatcatcaactacttcaagggcggcaagctgcggttcaagaagatcaaacctgaagccttcgaagccaacagattctacaccgtgatcaacaaaaagagcggcgagatcgtgcccatggaggtgaacttcaacttcgacgaccccaacctgatcatcctgcctctggcctttggcaagagacagggcagagaattcatctggaacgacctgctgtccctggaaaccggcagcctgaagctggccaacggaagagtgatcgagaagacactgtacaacagaagaacccggcaggatgagcctgccctgttcgtggccctgaccttcgagcggcgggaggtcctggactcctccaatatcaaaccaatgaacctgatcggcgtggcaagaggcgaaaacatccccgccgtgatcgccctgaccgaccccgagggctgcccactgagccggtttaaggatagcctgggaaacccaacccacatcctgagaatcggcgagagctataaggagaagcagcggaccatccaggccaagaaggaggtggagcagcggagagccggcggctacagccggaagtacgccagcaaagccaagaatctggcagacgatatggtgagaaacaccgctagagatctgctgtactacgccgtgacccaggatgccatgctgatcttcgccaacctgagccggggcttcggccggcagggcaagcggaccttcatggccgagagacagtacacacggatggaggactggctgaccgccaagctggcctacgagggcctgagcaagacctacctgtccaagacactggcccagtacacctccaagacatgcagcaactgtgggtttaccatcaccagcgccgactacgacagggtgctggagaagctgaagaagacagcaacaggctggatgaccacaattaacggcaaggagctgaaggtggagggccagattacctactacaacagatacaagagacagaacgtagtcaaggacctgtccgtcgagctggatagactgagcgaagaatctgtgaacaacgacatctcctcctggacaaagggcagaagcggagaagctctgagcctcctgaagaaaagattctcccatagacccgtgcaggagaagttcgtgtgcctgaactgcggcttcgagacacacgcagccgagcaagccgccctgaacatcgccagatcctggctgttcctgcggagccaggagtacaagaaataccagacaaacaagacaaccggcaacaccgataagagagccttcgtcgagacctggcagtccttttaccggaagaagcttaaggaggtgtggaaacctgccgtgcggtctggcggatctggcggaggctccacaagcccccaggagcccgtgaccttcgccgacgtggccgtgctgttcacccccgaggagtggctgttcctggacagcgcccagaagagcctgtacagggacgtgatgctggagaactacaggaacctggccagcgtgggcgaccagctgtgcaagaccaggatgagcagccacatggagcagagggaggagctgtgcgtgaccgagaggggcgtgttccccggcgcccagctgggcccccacctgcagaccagccccaagaaaaagagaaaagtctaagctgccttctgcggggcttgccttctggccatgcccttcttctctcccttgcacctgtacctcttggtctttgaataaagcctgagtaggaaggctagcaaaaaaaaaaaaaaaaaaaaaaaaaaaaaaaaaaaaaaaaaaaaaaaaaaaaaaaaaaaaaaaaaaaaaaaaaaaaaaaa

SEQ ID NO: 7127 - RNA, 5797 nt, synthetic construct
  source 1..5797: mol_type = other RNA
aggaaataagagagaaaagaagagtaagaagaaatataagagccaccatggcccctaagaagaagcgtaaagtgagccggatggaacgcctcgtctacgaggtgcggcagaagtgcagaaacatcgaggacatctgcatctcctgcggatctctgaacgtgaccctggagcacccactgttcatcggcggcatgtgccagaactgtaaaaactgttttctggagtgtgcctatcaatacgacgatgacggctaccagagctactgcaccatctgttgcggcggaagagaggtgctgatgtgtggaaataacaactgctgccggtgcttctgcgtggaatgcgtggacctgctggtgggccccggcgccgcccaggccgctattaaggaagatccttggaactgctacatgtgcggccacaagggcacatacggcctgctgagacggagagaggactggcctagcagactgcagatgttcttcgccaataaccacgaccaggagttcgacccccctaaggtgtaccctcccgtccccgccgagaagagaaagcccatccgggtcctgagcctgttcgatggcatcgccaccggtctgctggtgctgaaggacctgggcatccaggtggataggtacattgcctccgaggtgtgcgaggactccatcaccgtgggaatggtgcgtcatcagggcaagatcatgtacgtgggcgacgtgcggagcgtgacacagaagcatatccaggagtggggccctttcgacctggtgatcggcggcagcccttgcaatgacctgagcatcgtgaacccagcccggaagggcctgtacgagggaaccggcagactgttcttcgagttttacagactgctgcacgacgcccggcctaaggaaggcgacgaccggcccttcttttggctgttcgagaatgtggtggccatgggagtcagcgacaagcgggatattagccggttcctggagagcaaccccgtgatgatcgatgccaaggaagtgagcgccgcccaccgggccagatacttctggggcaatctgcctggcatgaacagacccctggccagcaccgtgaacgacaagctggagctgcaggagtgcctggagcacggccggatcgccaagttcagcaaggtgagaaccatcaccacccgaagcaacagcatcaaacaaggcaaggaccagcactttcctgtgttcatgaacgagaaggaggacatcctgtggtgtaccgagatggagagagtgttcgggttcccagtccactacacagatgtcagcaacatgtctagactggccagacagagactgctgggaagaagctggtccgtccctgtgatcagacacctgttcgcccctctgaaggagtacttcgcctgcgtgagcagcggcaacagcaacgccaacagccggggccccagcttctctagcggcctggtgccactgtccctgagagggagccacatgggccccatggagatctacaaaaccgtgagcgcctggaagcggcagcctgtgcgcgtgctgagcctgtttcggaatatcgataaagtcctgaaaagcctgggattcctggagagcggctctggctccggcggtggcaccctgaagtacgtggaggatgtgacaaacgtggtcagacgggatgtggagaagtggggccccttcgatctggtgtacggcagcacccaacccctgggcagctcttgtgaccggtgccctggctggtacatgtttcagttccaccggatcctgcagtacgccctgccgagacaggagtcccagcggccattcttttggattttcatggacaacttgctgctgaccgaggatgaccaggaaactaccactcggttcctgcagaccgaagccgtgaccctgcaggacgtgagaggccgggactaccagaacgccatgcgggtgtggtccaacatccctggactgaaaagcaagcacgcacctctgacccctaaagaagaggagtacctgcaggcccaggtgcggagcagaagcaagctggacgcccctaaggtggatctgctggtgaagaattgcctcctgcccctgagagagtacttcaagtatttcagccagaatagtctgcccctgggcggcccaagcagcggcgcccctcctcccagcggcggcagcccagccggctccccaacctctaccgaggagggcacctctgagtccgccacccccgagagcggccctggcacctccaccgagcccagcgagggcagcgcacccggcagccctgccggcagccccacctccacagaggagggaaccagcaccgagcccagcgaaggcagcgccccaggcaccagcaccgagcctagtgagggcggctctggcggcggcagcgcccaggagattaaacggatcaacaagatcagaagaagacttgtgaaagacagcaacaccaagaaggccggcaagacaggccccatgaaaaccctgctggttagagtgatgacacccgatctgagagagcggctggaaaacctgagaaagaagcctgaaaatatcccccagcccatcagcaatacatctagagccaacctgaataagctgctgaccgattacaccgaaatgaagaaggcgatcctgcatgtgtactgggaagagttccagaaggaccctgtgggcctgatgagccgggtggcccagcctgccagcaagaagatcgatcagaacaagctgaaacctgagatggacgagaagggcaacctgaccaccgccggctttgcctgctctcagtgtggccagcccctgttcgtgtacaagctggagcaggtgtctgagaagggcaaggcttacaccaactacttcggacggtgcaatgtggccgagcacgaaaagctgatcctgctggcccagctgaagcccgagaaggatagcgacgaagccgtgacatatagcctgggaaagtttgggcagagggccctggatttctacagcattcatgtgaccaaggagtccacccaccccgtgaagcccctggcccagatcgccggaaacagatacgcctccggacctgtgggaaaggccctgagcgacgcatgtatgggcacaatcgcctccttcctgtctaagtaccaggacatcatcatcgaacaccagaaggtggtgaagggcaaccagaagagactggagagcctgcgggagctggccggcaaggaaaacctggaataccctagcgtgaccctgccacctcagcctcacaccaaggagggcgttgatgcctacaacgaagtgatcgcccgggtgcgaatgtgggtgaacctgaacctgtggcagaagctgaagctaagcagagatgatgccaagcctctgctgagactgaagggattcccttcctttcctctggtcgagagacaggccaacgaagtggactggtgggacatggtgtgtaacgtgaagaagctgatcaacgagaaaaaggaggatggcaaggtgttttggcagaatctggctggctacaagagacaggaagccctgagaccatacctgagcagcgaggaagatcggaagaagggaaagaaattcgctcggtaccagctgggcgacctgctgctgcacctggaaaagaagcacggcgaggactggggaaaggtgtacgacgaggcctgggagcggattgacaagaaagtggaaggcctgagcaagcacatcaagctggaagaggaacggagaagcgaggacgcccagagcaaggccgccctgaccgactggctgcgggctaaggccagcttcgtgatcgagggcctgaaggaggccgacaaggacgagttctgcagatgcgagctgaagctgcagaagtggtacggggacctgcggggaaagcccttcgccatcgaagccgagaacagcatcctggacatcagcggcttcagcaagcagtacaactgtgccttcatctggcagaaggacggcgtgaagaagctgaacctgtacctgatcatcaactacttcaagggcggcaagctgcggttcaagaagatcaaacctgaagccttcgaagccaacagattctacaccgtgatcaacaaaaagagcggcgagatcgtgcccatggaggtgaacttcaacttcgacgaccccaacctgatcatcctgcctctggcctttggcaagagacagggcagagaattcatctggaacgacctgctgtccctggaaaccggcagcctgaagctggccaacggaagagtgatcgagaagacactgtacaacagaagaacccggcaggatgagcctgccctgttcgtggccctgaccttcgagcggcgggaggtcctggactcctccaatatcaaaccaatgaacctgatcggcgtggcaagaggcgaaaacatccccgccgtgatcgccctgaccgaccccgagggctgcccactgagccggtttaaggatagcctgggaaacccaacccacatcctgagaatcggcgagagctataaggagaagcagcggaccatccaggccaagaaggaggtggagcagcggagagccggcggctacagccggaagtacgccagcaaagccaagaatctggcagacgatatggtgagaaacaccgctagagatctgctgtactacgccgtgacccaggatgccatgctgatcttcgccaacctgagccggggcttcggccggcagggcaagcggaccttcatggccgagagacagtacacacggatggaggactggctgaccgccaagctggcctacgagggcctgagcaagacctacctgtccaagacactggcccagtacacctccaagacatgcagcaactgtgggtttaccatcaccagcgccgactacgacagggtgctggagaagctgaagaagacagcaacaggctggatgaccacaattaacggcaaggagctgaaggtggagggccagattacctactacaacagatacaagagacagaacgtagtcaaggacctgtccgtcgagctggatagactgagcgaagaatctgtgaacaacgacatctcctcctggacaaagggcagaagcggagaagctctgagcctcctgaagaaaagattctcccatagacccgtgcaggagaagttcgtgtgcctgaactgcggcttcgagacacacgcagccgagcaagccgccctgaacatcgccagatcctggctgttcctgcggagccaggagtacaagaaataccagacaaacaagacaaccggcaacaccgataagagagccttcgtcgagacctggcagtccttttaccggaagaagcttaaggaggtgtggaaacctgccgtgcggtctggcggatctggcggaggctccacaagccaggaccccagcgccgagaggctgatggaggaggtgcccgtggtgttcgaggagctgcccgtggtgttcgaggacgtggccgtgtacttcaccagggaggagtggggcatgctggacaagaggcagaaggagctgtacagggacgtgatgaggatgaactacgagctgctggccagcctgggccccgccgccgccaagcccgacctgatcagcaagctggagaggagggccgccccctggatcaccagccccaagaaaaagagaaaagtctaagctgccttctgcggggcttgccttctggccatgcccttcttctctcccttgcacctgtacctcttggtctttgaataaagcctgagtaggaaggctagcaaaaaaaaaaaaaaaaaaaaaaaaaaaaaaaaaaaaaaaaaaaaaaaaaaaaaaaaaaaaaaaaaaaaaaaaaaaaaaaa

SEQ ID NO: 7128 - RNA, 5797 nt, synthetic construct
  source 1..5797: mol_type = other RNA
aggaaataagagagaaaagaagagtaagaagaaatataagagccaccatggcccctaagaagaagcgtaaagtgagccggatggaacgcctcgtctacgaggtgcggcagaagtgcagaaacatcgaggacatctgcatctcctgcggatctctgaacgtgaccctggagcacccactgttcatcggcggcatgtgccagaactgtaaaaactgttttctggagtgtgcctatcaatacgacgatgacggctaccagagctactgcaccatctgttgcggcggaagagaggtgctgatgtgtggaaataacaactgctgccggtgcttctgcgtggaatgcgtggacctgctggtgggccccggcgccgcccaggccgctattaaggaagatccttggaactgctacatgtgcggccacaagggcacatacggcctgctgagacggagagaggactggcctagcagactgcagatgttcttcgccaataaccacgaccaggagttcgacccccctaaggtgtaccctcccgtccccgccgagaagagaaagcccatccgggtcctgagcctgttcgatggcatcgccaccggtctgctggtgctgaaggacctgggcatccaggtggataggtacattgcctccgaggtgtgcgaggactccatcaccgtgggaatggtgcgtcatcagggcaagatcatgtacgtgggcgacgtgcggagcgtgacacagaagcatatccaggagtggggccctttcgacctggtgatcggcggcagcccttgcaatgacctgagcatcgtgaacccagcccggaagggcctgtacgagggaaccggcagactgttcttcgagttttacagactgctgcacgacgcccggcctaaggaaggcgacgaccggcccttcttttggctgttcgagaatgtggtggccatgggagtcagcgacaagcgggatattagccggttcctggagagcaaccccgtgatgatcgatgccaaggaagtgagcgccgcccaccgggccagatacttctggggcaatctgcctggcatgaacagacccctggccagcaccgtgaacgacaagctggagctgcaggagtgcctggagcacggccggatcgccaagttcagcaaggtgagaaccatcaccacccgaagcaacagcatcaaacaaggcaaggaccagcactttcctgtgttcatgaacgagaaggaggacatcctgtggtgtaccgagatggagagagtgttcgggttcccagtccactacacagatgtcagcaacatgtctagactggccagacagagactgctgggaagaagctggtccgtccctgtgatcagacacctgttcgcccctctgaaggagtacttcgcctgcgtgagcagcggcaacagcaacgccaacagccggggccccagcttctctagcggcctggtgccactgtccctgagagggagccacatgggccccatggagatctacaaaaccgtgagcgcctggaagcggcagcctgtgcgcgtgctgagcctgtttcggaatatcgataaagtcctgaaaagcctgggattcctggagagcggctctggctccggcggtggcaccctgaagtacgtggaggatgtgacaaacgtggtcagacgggatgtggagaagtggggccccttcgatctggtgtacggcagcacccaacccctgggcagctcttgtgaccggtgccctggctggtacatgtttcagttccaccggatcctgcagtacgccctgccgagacaggagtcccagcggccattcttttggattttcatggacaacttgctgctgaccgaggatgaccaggaaactaccactcggttcctgcagaccgaagccgtgaccctgcaggacgtgagaggccgggactaccagaacgccatgcgggtgtggtccaacatccctggactgaaaagcaagcacgcacctctgacccctaaagaagaggagtacctgcaggcccaggtgcggagcagaagcaagctggacgcccctaaggtggatctgctggtgaagaattgcctcctgcccctgagagagtacttcaagtatttcagccagaatagtctgcccctgggcggcccaagcagcggcgcccctcctcccagcggcggcagcccagccggctccccaacctctaccgaggagggcacctctgagtccgccacccccgagagcggccctggcacctccaccgagcccagcgagggcagcgcacccggcagccctgccggcagccccacctccacagaggagggaaccagcaccgagcccagcgaaggcagcgccccaggcaccagcaccgagcctagtgagggcggctctggcggcggcagcgcccaggagattaaacggatcaacaagatcagaagaagacttgtgaaagacagcaacaccaagaaggccggcaagacaggccccatgaaaaccctgctggttagagtgatgacacccgatctgagagagcggctggaaaacctgagaaagaagcctgaaaatatcccccagcccatcagcaatacatctagagccaacctgaataagctgctgaccgattacaccgaaatgaagaaggcgatcctgcatgtgtactgggaagagttccagaaggaccctgtgggcctgatgagccgggtggcccagcctgccagcaagaagatcgatcagaacaagctgaaacctgagatggacgagaagggcaacctgaccaccgccggctttgcctgctctcagtgtggccagcccctgttcgtgtacaagctggagcaggtgtctgagaagggcaaggcttacaccaactacttcggacggtgcaatgtggccgagcacgaaaagctgatcctgctggcccagctgaagcccgagaaggatagcgacgaagccgtgacatatagcctgggaaagtttgggcagagggccctggatttctacagcattcatgtgaccaaggagtccacccaccccgtgaagcccctggcccagatcgccggaaacagatacgcctccggacctgtgggaaaggccctgagcgacgcatgtatgggcacaatcgcctccttcctgtctaagtaccaggacatcatcatcgaacaccagaaggtggtgaagggcaaccagaagagactggagagcctgcgggagctggccggcaaggaaaacctggaataccctagcgtgaccctgccacctcagcctcacaccaaggagggcgttgatgcctacaacgaagtgatcgcccgggtgcgaatgtgggtgaacctgaacctgtggcagaagctgaagctaagcagagatgatgccaagcctctgctgagactgaagggattcccttcctttcctctggtcgagagacaggccaacgaagtggactggtgggacatggtgtgtaacgtgaagaagctgatcaacgagaaaaaggaggatggcaaggtgttttggcagaatctggctggctacaagagacaggaagccctgagaccatacctgagcagcgaggaagatcggaagaagggaaagaaattcgctcggtaccagctgggcgacctgctgctgcacctggaaaagaagcacggcgaggactggggaaaggtgtacgacgaggcctgggagcggattgacaagaaagtggaaggcctgagcaagcacatcaagctggaagaggaacggagaagcgaggacgcccagagcaaggccgccctgaccgactggctgcgggctaaggccagcttcgtgatcgagggcctgaaggaggccgacaaggacgagttctgcagatgcgagctgaagctgcagaagtggtacggggacctgcggggaaagcccttcgccatcgaagccgagaacagcatcctggacatcagcggcttcagcaagcagtacaactgtgccttcatctggcagaaggacggcgtgaagaagctgaacctgtacctgatcatcaactacttcaagggcggcaagctgcggttcaagaagatcaaacctgaagccttcgaagccaacagattctacaccgtgatcaacaaaaagagcggcgagatcgtgcccatggaggtgaacttcaacttcgacgaccccaacctgatcatcctgcctctggcctttggcaagagacagggcagagaattcatctggaacgacctgctgtccctggaaaccggcagcctgaagctggccaacggaagagtgatcgagaagacactgtacaacagaagaacccggcaggatgagcctgccctgttcgtggccctgaccttcgagcggcgggaggtcctggactcctccaatatcaaaccaatgaacctgatcggcgtggcaagaggcgaaaacatccccgccgtgatcgccctgaccgaccccgagggctgcccactgagccggtttaaggatagcctgggaaacccaacccacatcctgagaatcggcgagagctataaggagaagcagcggaccatccaggccaagaaggaggtggagcagcggagagccggcggctacagccggaagtacgccagcaaagccaagaatctggcagacgatatggtgagaaacaccgctagagatctgctgtactacgccgtgacccaggatgccatgctgatcttcgccaacctgagccggggcttcggccggcagggcaagcggaccttcatggccgagagacagtacacacggatggaggactggctgaccgccaagctggcctacgagggcctgagcaagacctacctgtccaagacactggcccagtacacctccaagacatgcagcaactgtgggtttaccatcaccagcgccgactacgacagggtgctggagaagctgaagaagacagcaacaggctggatgaccacaattaacggcaaggagctgaaggtggagggccagattacctactacaacagatacaagagacagaacgtagtcaaggacctgtccgtcgagctggatagactgagcgaagaatctgtgaacaacgacatctcctcctggacaaagggcagaagcggagaagctctgagcctcctgaagaaaagattctcccatagacccgtgcaggagaagttcgtgtgcctgaactgcggcttcgagacacacgcagccgagcaagccgccctgaacatcgccagatcctggctgttcctgcggagccaggagtacaagaaataccagacaaacaagacaaccggcaacaccgataagagagccttcgtcgagacctggcagtccttttaccggaagaagcttaaggaggtgtggaaacctgccgtgcggtctggcggatctggcggaggctccacaagcgcccagatgcccgtgaagttcgaggacatcgccgtgagcttcagccaggaggagtgggagtacctgaacgaggagcagaaggagctgtacagggaggtgatggaggagaactaccagaccctgatcagcctgggcagcccccccgtgacccccgacatcatcagccacatcgagaggggcgaggagccctacatcagggaggagcccggcagcgaggagagggagcccggcaggagcagctgcaccagccccaagaaaaagagaaaagtctaagctgccttctgcggggcttgccttctggccatgcccttcttctctcccttgcacctgtacctcttggtctttgaataaagcctgagtaggaaggctagcaaaaaaaaaaaaaaaaaaaaaaaaaaaaaaaaaaaaaaaaaaaaaaaaaaaaaaaaaaaaaaaaaaaaaaaaaaaaaaaa

SEQ ID NO: 7129 - RNA, 5797 nt, synthetic construct
  source 1..5797: mol_type = other RNA
aggaaataagagagaaaagaagagtaagaagaaatataagagccaccatggcccctaagaagaagcgtaaagtgagccggatggaacgcctcgtctacgaggtgcggcagaagtgcagaaacatcgaggacatctgcatctcctgcggatctctgaacgtgaccctggagcacccactgttcatcggcggcatgtgccagaactgtaaaaactgttttctggagtgtgcctatcaatacgacgatgacggctaccagagctactgcaccatctgttgcggcggaagagaggtgctgatgtgtggaaataacaactgctgccggtgcttctgcgtggaatgcgtggacctgctggtgggccccggcgccgcccaggccgctattaaggaagatccttggaactgctacatgtgcggccacaagggcacatacggcctgctgagacggagagaggactggcctagcagactgcagatgttcttcgccaataaccacgaccaggagttcgacccccctaaggtgtaccctcccgtccccgccgagaagagaaagcccatccgggtcctgagcctgttcgatggcatcgccaccggtctgctggtgctgaaggacctgggcatccaggtggataggtacattgcctccgaggtgtgcgaggactccatcaccgtgggaatggtgcgtcatcagggcaagatcatgtacgtgggcgacgtgcggagcgtgacacagaagcatatccaggagtggggccctttcgacctggtgatcggcggcagcccttgcaatgacctgagcatcgtgaacccagcccggaagggcctgtacgagggaaccggcagactgttcttcgagttttacagactgctgcacgacgcccggcctaaggaaggcgacgaccggcccttcttttggctgttcgagaatgtggtggccatgggagtcagcgacaagcgggatattagccggttcctggagagcaaccccgtgatgatcgatgccaaggaagtgagcgccgcccaccgggccagatacttctggggcaatctgcctggcatgaacagacccctggccagcaccgtgaacgacaagctggagctgcaggagtgcctggagcacggccggatcgccaagttcagcaaggtgagaaccatcaccacccgaagcaacagcatcaaacaaggcaaggaccagcactttcctgtgttcatgaacgagaaggaggacatcctgtggtgtaccgagatggagagagtgttcgggttcccagtccactacacagatgtcagcaacatgtctagactggccagacagagactgctgggaagaagctggtccgtccctgtgatcagacacctgttcgcccctctgaaggagtacttcgcctgcgtgagcagcggcaacagcaacgccaacagccggggccccagcttctctagcggcctggtgccactgtccctgagagggagccacatgggccccatggagatctacaaaaccgtgagcgcctggaagcggcagcctgtgcgcgtgctgagcctgtttcggaatatcgataaagtcctgaaaagcctgggattcctggagagcggctctggctccggcggtggcaccctgaagtacgtggaggatgtgacaaacgtggtcagacgggatgtggagaagtggggccccttcgatctggtgtacggcagcacccaacccctgggcagctcttgtgaccggtgccctggctggtacatgtttcagttccaccggatcctgcagtacgccctgccgagacaggagtcccagcggccattcttttggattttcatggacaacttgctgctgaccgaggatgaccaggaaactaccactcggttcctgcagaccgaagccgtgaccctgcaggacgtgagaggccgggactaccagaacgccatgcgggtgtggtccaacatccctggactgaaaagcaagcacgcacctctgacccctaaagaagaggagtacctgcaggcccaggtgcggagcagaagcaagctggacgcccctaaggtggatctgctggtgaagaattgcctcctgcccctgagagagtacttcaagtatttcagccagaatagtctgcccctgggcggcccaagcagcggcgcccctcctcccagcggcggcagcccagccggctccccaacctctaccgaggagggcacctctgagtccgccacccccgagagcggccctggcacctccaccgagcccagcgagggcagcgcacccggcagccctgccggcagccccacctccacagaggagggaaccagcaccgagcccagcgaaggcagcgccccaggcaccagcaccgagcctagtgagggcggctctggcggcggcagcgcccaggagattaaacggatcaacaagatcagaagaagacttgtgaaagacagcaacaccaagaaggccggcaagacaggccccatgaaaaccctgctggttagagtgatgacacccgatctgagagagcggctggaaaacctgagaaagaagcctgaaaatatcccccagcccatcagcaatacatctagagccaacctgaataagctgctgaccgattacaccgaaatgaagaaggcgatcctgcatgtgtactgggaagagttccagaaggaccctgtgggcctgatgagccgggtggcccagcctgccagcaagaagatcgatcagaacaagctgaaacctgagatggacgagaagggcaacctgaccaccgccggctttgcctgctctcagtgtggccagcccctgttcgtgtacaagctggagcaggtgtctgagaagggcaaggcttacaccaactacttcggacggtgcaatgtggccgagcacgaaaagctgatcctgctggcccagctgaagcccgagaaggatagcgacgaagccgtgacatatagcctgggaaagtttgggcagagggccctggatttctacagcattcatgtgaccaaggagtccacccaccccgtgaagcccctggcccagatcgccggaaacagatacgcctccggacctgtgggaaaggccctgagcgacgcatgtatgggcacaatcgcctccttcctgtctaagtaccaggacatcatcatcgaacaccagaaggtggtgaagggcaaccagaagagactggagagcctgcgggagctggccggcaaggaaaacctggaataccctagcgtgaccctgccacctcagcctcacaccaaggagggcgttgatgcctacaacgaagtgatcgcccgggtgcgaatgtgggtgaacctgaacctgtggcagaagctgaagctaagcagagatgatgccaagcctctgctgagactgaagggattcccttcctttcctctggtcgagagacaggccaacgaagtggactggtgggacatggtgtgtaacgtgaagaagctgatcaacgagaaaaaggaggatggcaaggtgttttggcagaatctggctggctacaagagacaggaagccctgagaccatacctgagcagcgaggaagatcggaagaagggaaagaaattcgctcggtaccagctgggcgacctgctgctgcacctggaaaagaagcacggcgaggactggggaaaggtgtacgacgaggcctgggagcggattgacaagaaagtggaaggcctgagcaagcacatcaagctggaagaggaacggagaagcgaggacgcccagagcaaggccgccctgaccgactggctgcgggctaaggccagcttcgtgatcgagggcctgaaggaggccgacaaggacgagttctgcagatgcgagctgaagctgcagaagtggtacggggacctgcggggaaagcccttcgccatcgaagccgagaacagcatcctggacatcagcggcttcagcaagcagtacaactgtgccttcatctggcagaaggacggcgtgaagaagctgaacctgtacctgatcatcaactacttcaagggcggcaagctgcggttcaagaagatcaaacctgaagccttcgaagccaacagattctacaccgtgatcaacaaaaagagcggcgagatcgtgcccatggaggtgaacttcaacttcgacgaccccaacctgatcatcctgcctctggcctttggcaagagacagggcagagaattcatctggaacgacctgctgtccctggaaaccggcagcctgaagctggccaacggaagagtgatcgagaagacactgtacaacagaagaacccggcaggatgagcctgccctgttcgtggccctgaccttcgagcggcgggaggtcctggactcctccaatatcaaaccaatgaacctgatcggcgtggcaagaggcgaaaacatccccgccgtgatcgccctgaccgaccccgagggctgcccactgagccggtttaaggatagcctgggaaacccaacccacatcctgagaatcggcgagagctataaggagaagcagcggaccatccaggccaagaaggaggtggagcagcggagagccggcggctacagccggaagtacgccagcaaagccaagaatctggcagacgatatggtgagaaacaccgctagagatctgctgtactacgccgtgacccaggatgccatgctgatcttcgccaacctgagccggggcttcggccggcagggcaagcggaccttcatggccgagagacagtacacacggatggaggactggctgaccgccaagctggcctacgagggcctgagcaagacctacctgtccaagacactggcccagtacacctccaagacatgcagcaactgtgggtttaccatcaccagcgccgactacgacagggtgctggagaagctgaagaagacagcaacaggctggatgaccacaattaacggcaaggagctgaaggtggagggccagattacctactacaacagatacaagagacagaacgtagtcaaggacctgtccgtcgagctggatagactgagcgaagaatctgtgaacaacgacatctcctcctggacaaagggcagaagcggagaagctctgagcctcctgaagaaaagattctcccatagacccgtgcaggagaagttcgtgtgcctgaactgcggcttcgagacacacgcagccgagcaagccgccctgaacatcgccagatcctggctgttcctgcggagccaggagtacaagaaataccagacaaacaagacaaccggcaacaccgataagagagccttcgtcgagacctggcagtccttttaccggaagaagcttaaggaggtgtggaaacctgccgtgcggtctggcggatctggcggaggctccacaagcaaggaccagggcagcctgaccctggaggacgtggccgtggacttcacctgggaggagtggcagctgctggcccccgcccagaaggacctgtacagggacgtgatgctggagaactacagcaacctgctgagcatcggctaccaggccagcaagcccgacgccctgagcaggctggagaggggcgagccctggcccgtggaggacgagatccacagccagatctgccccgagatgaggaaggacaccagccccaagaaaaagagaaaagtctaagctgccttctgcggggcttgccttctggccatgcccttcttctctcccttgcacctgtacctcttggtctttgaataaagcctgagtaggaaggctagcaaaaaaaaaaaaaaaaaaaaaaaaaaaaaaaaaaaaaaaaaaaaaaaaaaaaaaaaaaaaaaaaaaaaaaaaaaaaaaaa

SEQ ID NO: 7130 - RNA, 5797 nt, synthetic construct
  source 1..5797: mol_type = other RNA
aggaaataagagagaaaagaagagtaagaagaaatataagagccaccatggcccctaagaagaagcgtaaagtgagccggatggaacgcctcgtctacgaggtgcggcagaagtgcagaaacatcgaggacatctgcatctcctgcggatctctgaacgtgaccctggagcacccactgttcatcggcggcatgtgccagaactgtaaaaactgttttctggagtgtgcctatcaatacgacgatgacggctaccagagctactgcaccatctgttgcggcggaagagaggtgctgatgtgtggaaataacaactgctgccggtgcttctgcgtggaatgcgtggacctgctggtgggccccggcgccgcccaggccgctattaaggaagatccttggaactgctacatgtgcggccacaagggcacatacggcctgctgagacggagagaggactggcctagcagactgcagatgttcttcgccaataaccacgaccaggagttcgacccccctaaggtgtaccctcccgtccccgccgagaagagaaagcccatccgggtcctgagcctgttcgatggcatcgccaccggtctgctggtgctgaaggacctgggcatccaggtggataggtacattgcctccgaggtgtgcgaggactccatcaccgtgggaatggtgcgtcatcagggcaagatcatgtacgtgggcgacgtgcggagcgtgacacagaagcatatccaggagtggggccctttcgacctggtgatcggcggcagcccttgcaatgacctgagcatcgtgaacccagcccggaagggcctgtacgagggaaccggcagactgttcttcgagttttacagactgctgcacgacgcccggcctaaggaaggcgacgaccggcccttcttttggctgttcgagaatgtggtggccatgggagtcagcgacaagcgggatattagccggttcctggagagcaaccccgtgatgatcgatgccaaggaagtgagcgccgcccaccgggccagatacttctggggcaatctgcctggcatgaacagacccctggccagcaccgtgaacgacaagctggagctgcaggagtgcctggagcacggccggatcgccaagttcagcaaggtgagaaccatcaccacccgaagcaacagcatcaaacaaggcaaggaccagcactttcctgtgttcatgaacgagaaggaggacatcctgtggtgtaccgagatggagagagtgttcgggttcccagtccactacacagatgtcagcaacatgtctagactggccagacagagactgctgggaagaagctggtccgtccctgtgatcagacacctgttcgcccctctgaaggagtacttcgcctgcgtgagcagcggcaacagcaacgccaacagccggggccccagcttctctagcggcctggtgccactgtccctgagagggagccacatgggccccatggagatctacaaaaccgtgagcgcctggaagcggcagcctgtgcgcgtgctgagcctgtttcggaatatcgataaagtcctgaaaagcctgggattcctggagagcggctctggctccggcggtggcaccctgaagtacgtggaggatgtgacaaacgtggtcagacgggatgtggagaagtggggccccttcgatctggtgtacggcagcacccaacccctgggcagctcttgtgaccggtgccctggctggtacatgtttcagttccaccggatcctgcagtacgccctgccgagacaggagtcccagcggccattcttttggattttcatggacaacttgctgctgaccgaggatgaccaggaaactaccactcggttcctgcagaccgaagccgtgaccctgcaggacgtgagaggccgggactaccagaacgccatgcgggtgtggtccaacatccctggactgaaaagcaagcacgcacctctgacccctaaagaagaggagtacctgcaggcccaggtgcggagcagaagcaagctggacgcccctaaggtggatctgctggtgaagaattgcctcctgcccctgagagagtacttcaagtatttcagccagaatagtctgcccctgggcggcccaagcagcggcgcccctcctcccagcggcggcagcccagccggctccccaacctctaccgaggagggcacctctgagtccgccacccccgagagcggccctggcacctccaccgagcccagcgagggcagcgcacccggcagccctgccggcagccccacctccacagaggagggaaccagcaccgagcccagcgaaggcagcgccccaggcaccagcaccgagcctagtgagggcggctctggcggcggcagcgcccaggagattaaacggatcaacaagatcagaagaagacttgtgaaagacagcaacaccaagaaggccggcaagacaggccccatgaaaaccctgctggttagagtgatgacacccgatctgagagagcggctggaaaacctgagaaagaagcctgaaaatatcccccagcccatcagcaatacatctagagccaacctgaataagctgctgaccgattacaccgaaatgaagaaggcgatcctgcatgtgtactgggaagagttccagaaggaccctgtgggcctgatgagccgggtggcccagcctgccagcaagaagatcgatcagaacaagctgaaacctgagatggacgagaagggcaacctgaccaccgccggctttgcctgctctcagtgtggccagcccctgttcgtgtacaagctggagcaggtgtctgagaagggcaaggcttacaccaactacttcggacggtgcaatgtggccgagcacgaaaagctgatcctgctggcccagctgaagcccgagaaggatagcgacgaagccgtgacatatagcctgggaaagtttgggcagagggccctggatttctacagcattcatgtgaccaaggagtccacccaccccgtgaagcccctggcccagatcgccggaaacagatacgcctccggacctgtgggaaaggccctgagcgacgcatgtatgggcacaatcgcctccttcctgtctaagtaccaggacatcatcatcgaacaccagaaggtggtgaagggcaaccagaagagactggagagcctgcgggagctggccggcaaggaaaacctggaataccctagcgtgaccctgccacctcagcctcacaccaaggagggcgttgatgcctacaacgaagtgatcgcccgggtgcgaatgtgggtgaacctgaacctgtggcagaagctgaagctaagcagagatgatgccaagcctctgctgagactgaagggattcccttcctttcctctggtcgagagacaggccaacgaagtggactggtgggacatggtgtgtaacgtgaagaagctgatcaacgagaaaaaggaggatggcaaggtgttttggcagaatctggctggctacaagagacaggaagccctgagaccatacctgagcagcgaggaagatcggaagaagggaaagaaattcgctcggtaccagctgggcgacctgctgctgcacctggaaaagaagcacggcgaggactggggaaaggtgtacgacgaggcctgggagcggattgacaagaaagtggaaggcctgagcaagcacatcaagctggaagaggaacggagaagcgaggacgcccagagcaaggccgccctgaccgactggctgcgggctaaggccagcttcgtgatcgagggcctgaaggaggccgacaaggacgagttctgcagatgcgagctgaagctgcagaagtggtacggggacctgcggggaaagcccttcgccatcgaagccgagaacagcatcctggacatcagcggcttcagcaagcagtacaactgtgccttcatctggcagaaggacggcgtgaagaagctgaacctgtacctgatcatcaactacttcaagggcggcaagctgcggttcaagaagatcaaacctgaagccttcgaagccaacagattctacaccgtgatcaacaaaaagagcggcgagatcgtgcccatggaggtgaacttcaacttcgacgaccccaacctgatcatcctgcctctggcctttggcaagagacagggcagagaattcatctggaacgacctgctgtccctggaaaccggcagcctgaagctggccaacggaagagtgatcgagaagacactgtacaacagaagaacccggcaggatgagcctgccctgttcgtggccctgaccttcgagcggcgggaggtcctggactcctccaatatcaaaccaatgaacctgatcggcgtggcaagaggcgaaaacatccccgccgtgatcgccctgaccgaccccgagggctgcccactgagccggtttaaggatagcctgggaaacccaacccacatcctgagaatcggcgagagctataaggagaagcagcggaccatccaggccaagaaggaggtggagcagcggagagccggcggctacagccggaagtacgccagcaaagccaagaatctggcagacgatatggtgagaaacaccgctagagatctgctgtactacgccgtgacccaggatgccatgctgatcttcgccaacctgagccggggcttcggccggcagggcaagcggaccttcatggccgagagacagtacacacggatggaggactggctgaccgccaagctggcctacgagggcctgagcaagacctacctgtccaagacactggcccagtacacctccaagacatgcagcaactgtgggtttaccatcaccagcgccgactacgacagggtgctggagaagctgaagaagacagcaacaggctggatgaccacaattaacggcaaggagctgaaggtggagggccagattacctactacaacagatacaagagacagaacgtagtcaaggacctgtccgtcgagctggatagactgagcgaagaatctgtgaacaacgacatctcctcctggacaaagggcagaagcggagaagctctgagcctcctgaagaaaagattctcccatagacccgtgcaggagaagttcgtgtgcctgaactgcggcttcgagacacacgcagccgagcaagccgccctgaacatcgccagatcctggctgttcctgcggagccaggagtacaagaaataccagacaaacaagacaaccggcaacaccgataagagagccttcgtcgagacctggcagtccttttaccggaagaagcttaaggaggtgtggaaacctgccgtgcggtctggcggatctggcggaggctccacaagccagatgaggctgaggttcgaggacatcagcgtgagcttcagccaggaggagtgggcctacctggacgaggagcagaaggagctgtacagggaggtgatgagggacaactaccagaccctgatcagcctgggcatcggcagcccccccgtgacccccgacatcatcagctgcatcgagcagggcgaggagccctacatcagggacgagcccggcagcgaggagaggaagaccggcaggagcagcaccagccccaagaaaaagagaaaagtctaagctgccttctgcggggcttgccttctggccatgcccttcttctctcccttgcacctgtacctcttggtctttgaataaagcctgagtaggaaggctagcaaaaaaaaaaaaaaaaaaaaaaaaaaaaaaaaaaaaaaaaaaaaaaaaaaaaaaaaaaaaaaaaaaaaaaaaaaaaaaaa

SEQ ID NO: 7131 - RNA, 5794 nt, synthetic construct
  source 1..5794: mol_type = other RNA
aggaaataagagagaaaagaagagtaagaagaaatataagagccaccatggcccctaagaagaagcgtaaagtgagccggatggaacgcctcgtctacgaggtgcggcagaagtgcagaaacatcgaggacatctgcatctcctgcggatctctgaacgtgaccctggagcacccactgttcatcggcggcatgtgccagaactgtaaaaactgttttctggagtgtgcctatcaatacgacgatgacggctaccagagctactgcaccatctgttgcggcggaagagaggtgctgatgtgtggaaataacaactgctgccggtgcttctgcgtggaatgcgtggacctgctggtgggccccggcgccgcccaggccgctattaaggaagatccttggaactgctacatgtgcggccacaagggcacatacggcctgctgagacggagagaggactggcctagcagactgcagatgttcttcgccaataaccacgaccaggagttcgacccccctaaggtgtaccctcccgtccccgccgagaagagaaagcccatccgggtcctgagcctgttcgatggcatcgccaccggtctgctggtgctgaaggacctgggcatccaggtggataggtacattgcctccgaggtgtgcgaggactccatcaccgtgggaatggtgcgtcatcagggcaagatcatgtacgtgggcgacgtgcggagcgtgacacagaagcatatccaggagtggggccctttcgacctggtgatcggcggcagcccttgcaatgacctgagcatcgtgaacccagcccggaagggcctgtacgagggaaccggcagactgttcttcgagttttacagactgctgcacgacgcccggcctaaggaaggcgacgaccggcccttcttttggctgttcgagaatgtggtggccatgggagtcagcgacaagcgggatattagccggttcctggagagcaaccccgtgatgatcgatgccaaggaagtgagcgccgcccaccgggccagatacttctggggcaatctgcctggcatgaacagacccctggccagcaccgtgaacgacaagctggagctgcaggagtgcctggagcacggccggatcgccaagttcagcaaggtgagaaccatcaccacccgaagcaacagcatcaaacaaggcaaggaccagcactttcctgtgttcatgaacgagaaggaggacatcctgtggtgtaccgagatggagagagtgttcgggttcccagtccactacacagatgtcagcaacatgtctagactggccagacagagactgctgggaagaagctggtccgtccctgtgatcagacacctgttcgcccctctgaaggagtacttcgcctgcgtgagcagcggcaacagcaacgccaacagccggggccccagcttctctagcggcctggtgccactgtccctgagagggagccacatgggccccatggagatctacaaaaccgtgagcgcctggaagcggcagcctgtgcgcgtgctgagcctgtttcggaatatcgataaagtcctgaaaagcctgggattcctggagagcggctctggctccggcggtggcaccctgaagtacgtggaggatgtgacaaacgtggtcagacgggatgtggagaagtggggccccttcgatctggtgtacggcagcacccaacccctgggcagctcttgtgaccggtgccctggctggtacatgtttcagttccaccggatcctgcagtacgccctgccgagacaggagtcccagcggccattcttttggattttcatggacaacttgctgctgaccgaggatgaccaggaaactaccactcggttcctgcagaccgaagccgtgaccctgcaggacgtgagaggccgggactaccagaacgccatgcgggtgtggtccaacatccctggactgaaaagcaagcacgcacctctgacccctaaagaagaggagtacctgcaggcccaggtgcggagcagaagcaagctggacgcccctaaggtggatctgctggtgaagaattgcctcctgcccctgagagagtacttcaagtatttcagccagaatagtctgcccctgggcggcccaagcagcggcgcccctcctcccagcggcggcagcccagccggctccccaacctctaccgaggagggcacctctgagtccgccacccccgagagcggccctggcacctccaccgagcccagcgagggcagcgcacccggcagccctgccggcagccccacctccacagaggagggaaccagcaccgagcccagcgaaggcagcgccccaggcaccagcaccgagcctagtgagggcggctctggcggcggcagcgcccaggagattaaacggatcaacaagatcagaagaagacttgtgaaagacagcaacaccaagaaggccggcaagacaggccccatgaaaaccctgctggttagagtgatgacacccgatctgagagagcggctggaaaacctgagaaagaagcctgaaaatatcccccagcccatcagcaatacatctagagccaacctgaataagctgctgaccgattacaccgaaatgaagaaggcgatcctgcatgtgtactgggaagagttccagaaggaccctgtgggcctgatgagccgggtggcccagcctgccagcaagaagatcgatcagaacaagctgaaacctgagatggacgagaagggcaacctgaccaccgccggctttgcctgctctcagtgtggccagcccctgttcgtgtacaagctggagcaggtgtctgagaagggcaaggcttacaccaactacttcggacggtgcaatgtggccgagcacgaaaagctgatcctgctggcccagctgaagcccgagaaggatagcgacgaagccgtgacatatagcctgggaaagtttgggcagagggccctggatttctacagcattcatgtgaccaaggagtccacccaccccgtgaagcccctggcccagatcgccggaaacagatacgcctccggacctgtgggaaaggccctgagcgacgcatgtatgggcacaatcgcctccttcctgtctaagtaccaggacatcatcatcgaacaccagaaggtggtgaagggcaaccagaagagactggagagcctgcgggagctggccggcaaggaaaacctggaataccctagcgtgaccctgccacctcagcctcacaccaaggagggcgttgatgcctacaacgaagtgatcgcccgggtgcgaatgtgggtgaacctgaacctgtggcagaagctgaagctaagcagagatgatgccaagcctctgctgagactgaagggattcccttcctttcctctggtcgagagacaggccaacgaagtggactggtgggacatggtgtgtaacgtgaagaagctgatcaacgagaaaaaggaggatggcaaggtgttttggcagaatctggctggctacaagagacaggaagccctgagaccatacctgagcagcgaggaagatcggaagaagggaaagaaattcgctcggtaccagctgggcgacctgctgctgcacctggaaaagaagcacggcgaggactggggaaaggtgtacgacgaggcctgggagcggattgacaagaaagtggaaggcctgagcaagcacatcaagctggaagaggaacggagaagcgaggacgcccagagcaaggccgccctgaccgactggctgcgggctaaggccagcttcgtgatcgagggcctgaaggaggccgacaaggacgagttctgcagatgcgagctgaagctgcagaagtggtacggggacctgcggggaaagcccttcgccatcgaagccgagaacagcatcctggacatcagcggcttcagcaagcagtacaactgtgccttcatctggcagaaggacggcgtgaagaagctgaacctgtacctgatcatcaactacttcaagggcggcaagctgcggttcaagaagatcaaacctgaagccttcgaagccaacagattctacaccgtgatcaacaaaaagagcggcgagatcgtgcccatggaggtgaacttcaacttcgacgaccccaacctgatcatcctgcctctggcctttggcaagagacagggcagagaattcatctggaacgacctgctgtccctggaaaccggcagcctgaagctggccaacggaagagtgatcgagaagacactgtacaacagaagaacccggcaggatgagcctgccctgttcgtggccctgaccttcgagcggcgggaggtcctggactcctccaatatcaaaccaatgaacctgatcggcgtggcaagaggcgaaaacatccccgccgtgatcgccctgaccgaccccgagggctgcccactgagccggtttaaggatagcctgggaaacccaacccacatcctgagaatcggcgagagctataaggagaagcagcggaccatccaggccaagaaggaggtggagcagcggagagccggcggctacagccggaagtacgccagcaaagccaagaatctggcagacgatatggtgagaaacaccgctagagatctgctgtactacgccgtgacccaggatgccatgctgatcttcgccaacctgagccggggcttcggccggcagggcaagcggaccttcatggccgagagacagtacacacggatggaggactggctgaccgccaagctggcctacgagggcctgagcaagacctacctgtccaagacactggcccagtacacctccaagacatgcagcaactgtgggtttaccatcaccagcgccgactacgacagggtgctggagaagctgaagaagacagcaacaggctggatgaccacaattaacggcaaggagctgaaggtggagggccagattacctactacaacagatacaagagacagaacgtagtcaaggacctgtccgtcgagctggatagactgagcgaagaatctgtgaacaacgacatctcctcctggacaaagggcagaagcggagaagctctgagcctcctgaagaaaagattctcccatagacccgtgcaggagaagttcgtgtgcctgaactgcggcttcgagacacacgcagccgagcaagccgccctgaacatcgccagatcctggctgttcctgcggagccaggagtacaagaaataccagacaaacaagacaaccggcaacaccgataagagagccttcgtcgagacctggcagtccttttaccggaagaagcttaaggaggtgtggaaacctgccgtgcggtctggcggatctggcggaggctccacaagcggcccccagggcgccagaagacaggccttcctggccttcggcgacgtgaccgtggacttcacccagaaggagtggagactgctgagccccgcccagagagccctgtacagagaggtgaccctggagaactacagccacctggtgagcctgggcatcctgcacagcaagcccgagctgatcagaagactggagcagggcgaggtgccctggggcgaggagagaagaagaagacccggccccaccagccccaagaaaaagagaaaagtctaagctgccttctgcggggcttgccttctggccatgcccttcttctctcccttgcacctgtacctcttggtctttgaataaagcctgagtaggaaggctagcaaaaaaaaaaaaaaaaaaaaaaaaaaaaaaaaaaaaaaaaaaaaaaaaaaaaaaaaaaaaaaaaaaaaaaaaaaaaaaaa

SEQ ID NO: 7132 - RNA, 5797 nt, synthetic construct
  source 1..5797: mol_type = other RNA
aggaaataagagagaaaagaagagtaagaagaaatataagagccaccatggcccctaagaagaagcgtaaagtgagccggatggaacgcctcgtctacgaggtgcggcagaagtgcagaaacatcgaggacatctgcatctcctgcggatctctgaacgtgaccctggagcacccactgttcatcggcggcatgtgccagaactgtaaaaactgttttctggagtgtgcctatcaatacgacgatgacggctaccagagctactgcaccatctgttgcggcggaagagaggtgctgatgtgtggaaataacaactgctgccggtgcttctgcgtggaatgcgtggacctgctggtgggccccggcgccgcccaggccgctattaaggaagatccttggaactgctacatgtgcggccacaagggcacatacggcctgctgagacggagagaggactggcctagcagactgcagatgttcttcgccaataaccacgaccaggagttcgacccccctaaggtgtaccctcccgtccccgccgagaagagaaagcccatccgggtcctgagcctgttcgatggcatcgccaccggtctgctggtgctgaaggacctgggcatccaggtggataggtacattgcctccgaggtgtgcgaggactccatcaccgtgggaatggtgcgtcatcagggcaagatcatgtacgtgggcgacgtgcggagcgtgacacagaagcatatccaggagtggggccctttcgacctggtgatcggcggcagcccttgcaatgacctgagcatcgtgaacccagcccggaagggcctgtacgagggaaccggcagactgttcttcgagttttacagactgctgcacgacgcccggcctaaggaaggcgacgaccggcccttcttttggctgttcgagaatgtggtggccatgggagtcagcgacaagcgggatattagccggttcctggagagcaaccccgtgatgatcgatgccaaggaagtgagcgccgcccaccgggccagatacttctggggcaatctgcctggcatgaacagacccctggccagcaccgtgaacgacaagctggagctgcaggagtgcctggagcacggccggatcgccaagttcagcaaggtgagaaccatcaccacccgaagcaacagcatcaaacaaggcaaggaccagcactttcctgtgttcatgaacgagaaggaggacatcctgtggtgtaccgagatggagagagtgttcgggttcccagtccactacacagatgtcagcaacatgtctagactggccagacagagactgctgggaagaagctggtccgtccctgtgatcagacacctgttcgcccctctgaaggagtacttcgcctgcgtgagcagcggcaacagcaacgccaacagccggggccccagcttctctagcggcctggtgccactgtccctgagagggagccacatgggccccatggagatctacaaaaccgtgagcgcctggaagcggcagcctgtgcgcgtgctgagcctgtttcggaatatcgataaagtcctgaaaagcctgggattcctggagagcggctctggctccggcggtggcaccctgaagtacgtggaggatgtgacaaacgtggtcagacgggatgtggagaagtggggccccttcgatctggtgtacggcagcacccaacccctgggcagctcttgtgaccggtgccctggctggtacatgtttcagttccaccggatcctgcagtacgccctgccgagacaggagtcccagcggccattcttttggattttcatggacaacttgctgctgaccgaggatgaccaggaaactaccactcggttcctgcagaccgaagccgtgaccctgcaggacgtgagaggccgggactaccagaacgccatgcgggtgtggtccaacatccctggactgaaaagcaagcacgcacctctgacccctaaagaagaggagtacctgcaggcccaggtgcggagcagaagcaagctggacgcccctaaggtggatctgctggtgaagaattgcctcctgcccctgagagagtacttcaagtatttcagccagaatagtctgcccctgggcggcccaagcagcggcgcccctcctcccagcggcggcagcccagccggctccccaacctctaccgaggagggcacctctgagtccgccacccccgagagcggccctggcacctccaccgagcccagcgagggcagcgcacccggcagccctgccggcagccccacctccacagaggagggaaccagcaccgagcccagcgaaggcagcgccccaggcaccagcaccgagcctagtgagggcggctctggcggcggcagcgcccaggagattaaacggatcaacaagatcagaagaagacttgtgaaagacagcaacaccaagaaggccggcaagacaggccccatgaaaaccctgctggttagagtgatgacacccgatctgagagagcggctggaaaacctgagaaagaagcctgaaaatatcccccagcccatcagcaatacatctagagccaacctgaataagctgctgaccgattacaccgaaatgaagaaggcgatcctgcatgtgtactgggaagagttccagaaggaccctgtgggcctgatgagccgggtggcccagcctgccagcaagaagatcgatcagaacaagctgaaacctgagatggacgagaagggcaacctgaccaccgccggctttgcctgctctcagtgtggccagcccctgttcgtgtacaagctggagcaggtgtctgagaagggcaaggcttacaccaactacttcggacggtgcaatgtggccgagcacgaaaagctgatcctgctggcccagctgaagcccgagaaggatagcgacgaagccgtgacatatagcctgggaaagtttgggcagagggccctggatttctacagcattcatgtgaccaaggagtccacccaccccgtgaagcccctggcccagatcgccggaaacagatacgcctccggacctgtgggaaaggccctgagcgacgcatgtatgggcacaatcgcctccttcctgtctaagtaccaggacatcatcatcgaacaccagaaggtggtgaagggcaaccagaagagactggagagcctgcgggagctggccggcaaggaaaacctggaataccctagcgtgaccctgccacctcagcctcacaccaaggagggcgttgatgcctacaacgaagtgatcgcccgggtgcgaatgtgggtgaacctgaacctgtggcagaagctgaagctaagcagagatgatgccaagcctctgctgagactgaagggattcccttcctttcctctggtcgagagacaggccaacgaagtggactggtgggacatggtgtgtaacgtgaagaagctgatcaacgagaaaaaggaggatggcaaggtgttttggcagaatctggctggctacaagagacaggaagccctgagaccatacctgagcagcgaggaagatcggaagaagggaaagaaattcgctcggtaccagctgggcgacctgctgctgcacctggaaaagaagcacggcgaggactggggaaaggtgtacgacgaggcctgggagcggattgacaagaaagtggaaggcctgagcaagcacatcaagctggaagaggaacggagaagcgaggacgcccagagcaaggccgccctgaccgactggctgcgggctaaggccagcttcgtgatcgagggcctgaaggaggccgacaaggacgagttctgcagatgcgagctgaagctgcagaagtggtacggggacctgcggggaaagcccttcgccatcgaagccgagaacagcatcctggacatcagcggcttcagcaagcagtacaactgtgccttcatctggcagaaggacggcgtgaagaagctgaacctgtacctgatcatcaactacttcaagggcggcaagctgcggttcaagaagatcaaacctgaagccttcgaagccaacagattctacaccgtgatcaacaaaaagagcggcgagatcgtgcccatggaggtgaacttcaacttcgacgaccccaacctgatcatcctgcctctggcctttggcaagagacagggcagagaattcatctggaacgacctgctgtccctggaaaccggcagcctgaagctggccaacggaagagtgatcgagaagacactgtacaacagaagaacccggcaggatgagcctgccctgttcgtggccctgaccttcgagcggcgggaggtcctggactcctccaatatcaaaccaatgaacctgatcggcgtggcaagaggcgaaaacatccccgccgtgatcgccctgaccgaccccgagggctgcccactgagccggtttaaggatagcctgggaaacccaacccacatcctgagaatcggcgagagctataaggagaagcagcggaccatccaggccaagaaggaggtggagcagcggagagccggcggctacagccggaagtacgccagcaaagccaagaatctggcagacgatatggtgagaaacaccgctagagatctgctgtactacgccgtgacccaggatgccatgctgatcttcgccaacctgagccggggcttcggccggcagggcaagcggaccttcatggccgagagacagtacacacggatggaggactggctgaccgccaagctggcctacgagggcctgagcaagacctacctgtccaagacactggcccagtacacctccaagacatgcagcaactgtgggtttaccatcaccagcgccgactacgacagggtgctggagaagctgaagaagacagcaacaggctggatgaccacaattaacggcaaggagctgaaggtggagggccagattacctactacaacagatacaagagacagaacgtagtcaaggacctgtccgtcgagctggatagactgagcgaagaatctgtgaacaacgacatctcctcctggacaaagggcagaagcggagaagctctgagcctcctgaagaaaagattctcccatagacccgtgcaggagaagttcgtgtgcctgaactgcggcttcgagacacacgcagccgagcaagccgccctgaacatcgccagatcctggctgttcctgcggagccaggagtacaagaaataccagacaaacaagacaaccggcaacaccgataagagagccttcgtcgagacctggcagtccttttaccggaagaagcttaaggaggtgtggaaacctgccgtgcggtctggcggatctggcggaggctccacaagctgctaccaggacagcgtgaccttcgacgacgtggccgtggacttcacccaggaggagtggaccctgctggaccccacccagaggagcctgtacagcgacgtgatgctggagaactacaagaacctggccaccgtgggcggccagatcatcaagcccagcctgatcagctggctggagcaggaggagagcaggaccgtgaggggcggcgtgctgcagggcaggaagacccagtggaggggcaccaccagccccaagaaaaagagaaaagtctaagctgccttctgcggggcttgccttctggccatgcccttcttctctcccttgcacctgtacctcttggtctttgaataaagcctgagtaggaaggctagcaaaaaaaaaaaaaaaaaaaaaaaaaaaaaaaaaaaaaaaaaaaaaaaaaaaaaaaaaaaaaaaaaaaaaaaaaaaaaaaa

SEQ ID NO: 7133 - RNA, 5797 nt, synthetic construct
  source 1..5797: mol_type = other RNA
aggaaataagagagaaaagaagagtaagaagaaatataagagccaccatggcccctaagaagaagcgtaaagtgagccggatggaacgcctcgtctacgaggtgcggcagaagtgcagaaacatcgaggacatctgcatctcctgcggatctctgaacgtgaccctggagcacccactgttcatcggcggcatgtgccagaactgtaaaaactgttttctggagtgtgcctatcaatacgacgatgacggctaccagagctactgcaccatctgttgcggcggaagagaggtgctgatgtgtggaaataacaactgctgccggtgcttctgcgtggaatgcgtggacctgctggtgggccccggcgccgcccaggccgctattaaggaagatccttggaactgctacatgtgcggccacaagggcacatacggcctgctgagacggagagaggactggcctagcagactgcagatgttcttcgccaataaccacgaccaggagttcgacccccctaaggtgtaccctcccgtccccgccgagaagagaaagcccatccgggtcctgagcctgttcgatggcatcgccaccggtctgctggtgctgaaggacctgggcatccaggtggataggtacattgcctccgaggtgtgcgaggactccatcaccgtgggaatggtgcgtcatcagggcaagatcatgtacgtgggcgacgtgcggagcgtgacacagaagcatatccaggagtggggccctttcgacctggtgatcggcggcagcccttgcaatgacctgagcatcgtgaacccagcccggaagggcctgtacgagggaaccggcagactgttcttcgagttttacagactgctgcacgacgcccggcctaaggaaggcgacgaccggcccttcttttggctgttcgagaatgtggtggccatgggagtcagcgacaagcgggatattagccggttcctggagagcaaccccgtgatgatcgatgccaaggaagtgagcgccgcccaccgggccagatacttctggggcaatctgcctggcatgaacagacccctggccagcaccgtgaacgacaagctggagctgcaggagtgcctggagcacggccggatcgccaagttcagcaaggtgagaaccatcaccacccgaagcaacagcatcaaacaaggcaaggaccagcactttcctgtgttcatgaacgagaaggaggacatcctgtggtgtaccgagatggagagagtgttcgggttcccagtccactacacagatgtcagcaacatgtctagactggccagacagagactgctgggaagaagctggtccgtccctgtgatcagacacctgttcgcccctctgaaggagtacttcgcctgcgtgagcagcggcaacagcaacgccaacagccggggccccagcttctctagcggcctggtgccactgtccctgagagggagccacatgggccccatggagatctacaaaaccgtgagcgcctggaagcggcagcctgtgcgcgtgctgagcctgtttcggaatatcgataaagtcctgaaaagcctgggattcctggagagcggctctggctccggcggtggcaccctgaagtacgtggaggatgtgacaaacgtggtcagacgggatgtggagaagtggggccccttcgatctggtgtacggcagcacccaacccctgggcagctcttgtgaccggtgccctggctggtacatgtttcagttccaccggatcctgcagtacgccctgccgagacaggagtcccagcggccattcttttggattttcatggacaacttgctgctgaccgaggatgaccaggaaactaccactcggttcctgcagaccgaagccgtgaccctgcaggacgtgagaggccgggactaccagaacgccatgcgggtgtggtccaacatccctggactgaaaagcaagcacgcacctctgacccctaaagaagaggagtacctgcaggcccaggtgcggagcagaagcaagctggacgcccctaaggtggatctgctggtgaagaattgcctcctgcccctgagagagtacttcaagtatttcagccagaatagtctgcccctgggcggcccaagcagcggcgcccctcctcccagcggcggcagcccagccggctccccaacctctaccgaggagggcacctctgagtccgccacccccgagagcggccctggcacctccaccgagcccagcgagggcagcgcacccggcagccctgccggcagccccacctccacagaggagggaaccagcaccgagcccagcgaaggcagcgccccaggcaccagcaccgagcctagtgagggcggctctggcggcggcagcgcccaggagattaaacggatcaacaagatcagaagaagacttgtgaaagacagcaacaccaagaaggccggcaagacaggccccatgaaaaccctgctggttagagtgatgacacccgatctgagagagcggctggaaaacctgagaaagaagcctgaaaatatcccccagcccatcagcaatacatctagagccaacctgaataagctgctgaccgattacaccgaaatgaagaaggcgatcctgcatgtgtactgggaagagttccagaaggaccctgtgggcctgatgagccgggtggcccagcctgccagcaagaagatcgatcagaacaagctgaaacctgagatggacgagaagggcaacctgaccaccgccggctttgcctgctctcagtgtggccagcccctgttcgtgtacaagctggagcaggtgtctgagaagggcaaggcttacaccaactacttcggacggtgcaatgtggccgagcacgaaaagctgatcctgctggcccagctgaagcccgagaaggatagcgacgaagccgtgacatatagcctgggaaagtttgggcagagggccctggatttctacagcattcatgtgaccaaggagtccacccaccccgtgaagcccctggcccagatcgccggaaacagatacgcctccggacctgtgggaaaggccctgagcgacgcatgtatgggcacaatcgcctccttcctgtctaagtaccaggacatcatcatcgaacaccagaaggtggtgaagggcaaccagaagagactggagagcctgcgggagctggccggcaaggaaaacctggaataccctagcgtgaccctgccacctcagcctcacaccaaggagggcgttgatgcctacaacgaagtgatcgcccgggtgcgaatgtgggtgaacctgaacctgtggcagaagctgaagctaagcagagatgatgccaagcctctgctgagactgaagggattcccttcctttcctctggtcgagagacaggccaacgaagtggactggtgggacatggtgtgtaacgtgaagaagctgatcaacgagaaaaaggaggatggcaaggtgttttggcagaatctggctggctacaagagacaggaagccctgagaccatacctgagcagcgaggaagatcggaagaagggaaagaaattcgctcggtaccagctgggcgacctgctgctgcacctggaaaagaagcacggcgaggactggggaaaggtgtacgacgaggcctgggagcggattgacaagaaagtggaaggcctgagcaagcacatcaagctggaagaggaacggagaagcgaggacgcccagagcaaggccgccctgaccgactggctgcgggctaaggccagcttcgtgatcgagggcctgaaggaggccgacaaggacgagttctgcagatgcgagctgaagctgcagaagtggtacggggacctgcggggaaagcccttcgccatcgaagccgagaacagcatcctggacatcagcggcttcagcaagcagtacaactgtgccttcatctggcagaaggacggcgtgaagaagctgaacctgtacctgatcatcaactacttcaagggcggcaagctgcggttcaagaagatcaaacctgaagccttcgaagccaacagattctacaccgtgatcaacaaaaagagcggcgagatcgtgcccatggaggtgaacttcaacttcgacgaccccaacctgatcatcctgcctctggcctttggcaagagacagggcagagaattcatctggaacgacctgctgtccctggaaaccggcagcctgaagctggccaacggaagagtgatcgagaagacactgtacaacagaagaacccggcaggatgagcctgccctgttcgtggccctgaccttcgagcggcgggaggtcctggactcctccaatatcaaaccaatgaacctgatcggcgtggcaagaggcgaaaacatccccgccgtgatcgccctgaccgaccccgagggctgcccactgagccggtttaaggatagcctgggaaacccaacccacatcctgagaatcggcgagagctataaggagaagcagcggaccatccaggccaagaaggaggtggagcagcggagagccggcggctacagccggaagtacgccagcaaagccaagaatctggcagacgatatggtgagaaacaccgctagagatctgctgtactacgccgtgacccaggatgccatgctgatcttcgccaacctgagccggggcttcggccggcagggcaagcggaccttcatggccgagagacagtacacacggatggaggactggctgaccgccaagctggcctacgagggcctgagcaagacctacctgtccaagacactggcccagtacacctccaagacatgcagcaactgtgggtttaccatcaccagcgccgactacgacagggtgctggagaagctgaagaagacagcaacaggctggatgaccacaattaacggcaaggagctgaaggtggagggccagattacctactacaacagatacaagagacagaacgtagtcaaggacctgtccgtcgagctggatagactgagcgaagaatctgtgaacaacgacatctcctcctggacaaagggcagaagcggagaagctctgagcctcctgaagaaaagattctcccatagacccgtgcaggagaagttcgtgtgcctgaactgcggcttcgagacacacgcagccgagcaagccgccctgaacatcgccagatcctggctgttcctgcggagccaggagtacaagaaataccagacaaacaagacaaccggcaacaccgataagagagccttcgtcgagacctggcagtccttttaccggaagaagcttaaggaggtgtggaaacctgccgtgcggtctggcggatctggcggaggctccacaagcttccaggccagcgtgaccttcaaggacgtggccgtggacttcacctgggaggagtggaggctgctggaccccccccagaaggagctgttctgggaggtgatgctggagaactacaggaacctggtgtgcctgggcctggccgacagcaacaaggacgtgatgatcagcgagctggagagcggcgagccccactggatccccaccggcggcgtgctgaggagctgctggcccggctgggagagcaccagccccaagaaaaagagaaaagtctaagctgccttctgcggggcttgccttctggccatgcccttcttctctcccttgcacctgtacctcttggtctttgaataaagcctgagtaggaaggctagcaaaaaaaaaaaaaaaaaaaaaaaaaaaaaaaaaaaaaaaaaaaaaaaaaaaaaaaaaaaaaaaaaaaaaaaaaaaaaaaa

SEQ ID NO: 7134 - RNA, 5797 nt, synthetic construct
  source 1..5797: mol_type = other RNA
aggaaataagagagaaaagaagagtaagaagaaatataagagccaccatggcccctaagaagaagcgtaaagtgagccggatggaacgcctcgtctacgaggtgcggcagaagtgcagaaacatcgaggacatctgcatctcctgcggatctctgaacgtgaccctggagcacccactgttcatcggcggcatgtgccagaactgtaaaaactgttttctggagtgtgcctatcaatacgacgatgacggctaccagagctactgcaccatctgttgcggcggaagagaggtgctgatgtgtggaaataacaactgctgccggtgcttctgcgtggaatgcgtggacctgctggtgggccccggcgccgcccaggccgctattaaggaagatccttggaactgctacatgtgcggccacaagggcacatacggcctgctgagacggagagaggactggcctagcagactgcagatgttcttcgccaataaccacgaccaggagttcgacccccctaaggtgtaccctcccgtccccgccgagaagagaaagcccatccgggtcctgagcctgttcgatggcatcgccaccggtctgctggtgctgaaggacctgggcatccaggtggataggtacattgcctccgaggtgtgcgaggactccatcaccgtgggaatggtgcgtcatcagggcaagatcatgtacgtgggcgacgtgcggagcgtgacacagaagcatatccaggagtggggccctttcgacctggtgatcggcggcagcccttgcaatgacctgagcatcgtgaacccagcccggaagggcctgtacgagggaaccggcagactgttcttcgagttttacagactgctgcacgacgcccggcctaaggaaggcgacgaccggcccttcttttggctgttcgagaatgtggtggccatgggagtcagcgacaagcgggatattagccggttcctggagagcaaccccgtgatgatcgatgccaaggaagtgagcgccgcccaccgggccagatacttctggggcaatctgcctggcatgaacagacccctggccagcaccgtgaacgacaagctggagctgcaggagtgcctggagcacggccggatcgccaagttcagcaaggtgagaaccatcaccacccgaagcaacagcatcaaacaaggcaaggaccagcactttcctgtgttcatgaacgagaaggaggacatcctgtggtgtaccgagatggagagagtgttcgggttcccagtccactacacagatgtcagcaacatgtctagactggccagacagagactgctgggaagaagctggtccgtccctgtgatcagacacctgttcgcccctctgaaggagtacttcgcctgcgtgagcagcggcaacagcaacgccaacagccggggccccagcttctctagcggcctggtgccactgtccctgagagggagccacatgggccccatggagatctacaaaaccgtgagcgcctggaagcggcagcctgtgcgcgtgctgagcctgtttcggaatatcgataaagtcctgaaaagcctgggattcctggagagcggctctggctccggcggtggcaccctgaagtacgtggaggatgtgacaaacgtggtcagacgggatgtggagaagtggggccccttcgatctggtgtacggcagcacccaacccctgggcagctcttgtgaccggtgccctggctggtacatgtttcagttccaccggatcctgcagtacgccctgccgagacaggagtcccagcggccattcttttggattttcatggacaacttgctgctgaccgaggatgaccaggaaactaccactcggttcctgcagaccgaagccgtgaccctgcaggacgtgagaggccgggactaccagaacgccatgcgggtgtggtccaacatccctggactgaaaagcaagcacgcacctctgacccctaaagaagaggagtacctgcaggcccaggtgcggagcagaagcaagctggacgcccctaaggtggatctgctggtgaagaattgcctcctgcccctgagagagtacttcaagtatttcagccagaatagtctgcccctgggcggcccaagcagcggcgcccctcctcccagcggcggcagcccagccggctccccaacctctaccgaggagggcacctctgagtccgccacccccgagagcggccctggcacctccaccgagcccagcgagggcagcgcacccggcagccctgccggcagccccacctccacagaggagggaaccagcaccgagcccagcgaaggcagcgccccaggcaccagcaccgagcctagtgagggcggctctggcggcggcagcgcccaggagattaaacggatcaacaagatcagaagaagacttgtgaaagacagcaacaccaagaaggccggcaagacaggccccatgaaaaccctgctggttagagtgatgacacccgatctgagagagcggctggaaaacctgagaaagaagcctgaaaatatcccccagcccatcagcaatacatctagagccaacctgaataagctgctgaccgattacaccgaaatgaagaaggcgatcctgcatgtgtactgggaagagttccagaaggaccctgtgggcctgatgagccgggtggcccagcctgccagcaagaagatcgatcagaacaagctgaaacctgagatggacgagaagggcaacctgaccaccgccggctttgcctgctctcagtgtggccagcccctgttcgtgtacaagctggagcaggtgtctgagaagggcaaggcttacaccaactacttcggacggtgcaatgtggccgagcacgaaaagctgatcctgctggcccagctgaagcccgagaaggatagcgacgaagccgtgacatatagcctgggaaagtttgggcagagggccctggatttctacagcattcatgtgaccaaggagtccacccaccccgtgaagcccctggcccagatcgccggaaacagatacgcctccggacctgtgggaaaggccctgagcgacgcatgtatgggcacaatcgcctccttcctgtctaagtaccaggacatcatcatcgaacaccagaaggtggtgaagggcaaccagaagagactggagagcctgcgggagctggccggcaaggaaaacctggaataccctagcgtgaccctgccacctcagcctcacaccaaggagggcgttgatgcctacaacgaagtgatcgcccgggtgcgaatgtgggtgaacctgaacctgtggcagaagctgaagctaagcagagatgatgccaagcctctgctgagactgaagggattcccttcctttcctctggtcgagagacaggccaacgaagtggactggtgggacatggtgtgtaacgtgaagaagctgatcaacgagaaaaaggaggatggcaaggtgttttggcagaatctggctggctacaagagacaggaagccctgagaccatacctgagcagcgaggaagatcggaagaagggaaagaaattcgctcggtaccagctgggcgacctgctgctgcacctggaaaagaagcacggcgaggactggggaaaggtgtacgacgaggcctgggagcggattgacaagaaagtggaaggcctgagcaagcacatcaagctggaagaggaacggagaagcgaggacgcccagagcaaggccgccctgaccgactggctgcgggctaaggccagcttcgtgatcgagggcctgaaggaggccgacaaggacgagttctgcagatgcgagctgaagctgcagaagtggtacggggacctgcggggaaagcccttcgccatcgaagccgagaacagcatcctggacatcagcggcttcagcaagcagtacaactgtgccttcatctggcagaaggacggcgtgaagaagctgaacctgtacctgatcatcaactacttcaagggcggcaagctgcggttcaagaagatcaaacctgaagccttcgaagccaacagattctacaccgtgatcaacaaaaagagcggcgagatcgtgcccatggaggtgaacttcaacttcgacgaccccaacctgatcatcctgcctctggcctttggcaagagacagggcagagaattcatctggaacgacctgctgtccctggaaaccggcagcctgaagctggccaacggaagagtgatcgagaagacactgtacaacagaagaacccggcaggatgagcctgccctgttcgtggccctgaccttcgagcggcgggaggtcctggactcctccaatatcaaaccaatgaacctgatcggcgtggcaagaggcgaaaacatccccgccgtgatcgccctgaccgaccccgagggctgcccactgagccggtttaaggatagcctgggaaacccaacccacatcctgagaatcggcgagagctataaggagaagcagcggaccatccaggccaagaaggaggtggagcagcggagagccggcggctacagccggaagtacgccagcaaagccaagaatctggcagacgatatggtgagaaacaccgctagagatctgctgtactacgccgtgacccaggatgccatgctgatcttcgccaacctgagccggggcttcggccggcagggcaagcggaccttcatggccgagagacagtacacacggatggaggactggctgaccgccaagctggcctacgagggcctgagcaagacctacctgtccaagacactggcccagtacacctccaagacatgcagcaactgtgggtttaccatcaccagcgccgactacgacagggtgctggagaagctgaagaagacagcaacaggctggatgaccacaattaacggcaaggagctgaaggtggagggccagattacctactacaacagatacaagagacagaacgtagtcaaggacctgtccgtcgagctggatagactgagcgaagaatctgtgaacaacgacatctcctcctggacaaagggcagaagcggagaagctctgagcctcctgaagaaaagattctcccatagacccgtgcaggagaagttcgtgtgcctgaactgcggcttcgagacacacgcagccgagcaagccgccctgaacatcgccagatcctggctgttcctgcggagccaggagtacaagaaataccagacaaacaagacaaccggcaacaccgataagagagccttcgtcgagacctggcagtccttttaccggaagaagcttaaggaggtgtggaaacctgccgtgcggtctggcggatctggcggaggctccacaagcatgatcaactaccagacccccgtgagcttcaaggacgtggtggtgggcttcacccaggaggagtggcacaggctgaaccccacccagagggccctgtacagggacgtgatgctggagacctacagcaacctggtgagcgtgggctacgagggcaccaagcccgacgtgatcctgaggctggagcaggaggaggccccctggatcggcgaggccgcctgcctgggctgccactgctgggaggacaccagccccaagaaaaagagaaaagtctaagctgccttctgcggggcttgccttctggccatgcccttcttctctcccttgcacctgtacctcttggtctttgaataaagcctgagtaggaaggctagcaaaaaaaaaaaaaaaaaaaaaaaaaaaaaaaaaaaaaaaaaaaaaaaaaaaaaaaaaaaaaaaaaaaaaaaaaaaaaaaa

SEQ ID NO: 7135 - RNA, 5797 nt, synthetic construct
  source 1..5797: mol_type = other RNA
aggaaataagagagaaaagaagagtaagaagaaatataagagccaccatggcccctaagaagaagcgtaaagtgagccggatggaacgcctcgtctacgaggtgcggcagaagtgcagaaacatcgaggacatctgcatctcctgcggatctctgaacgtgaccctggagcacccactgttcatcggcggcatgtgccagaactgtaaaaactgttttctggagtgtgcctatcaatacgacgatgacggctaccagagctactgcaccatctgttgcggcggaagagaggtgctgatgtgtggaaataacaactgctgccggtgcttctgcgtggaatgcgtggacctgctggtgggccccggcgccgcccaggccgctattaaggaagatccttggaactgctacatgtgcggccacaagggcacatacggcctgctgagacggagagaggactggcctagcagactgcagatgttcttcgccaataaccacgaccaggagttcgacccccctaaggtgtaccctcccgtccccgccgagaagagaaagcccatccgggtcctgagcctgttcgatggcatcgccaccggtctgctggtgctgaaggacctgggcatccaggtggataggtacattgcctccgaggtgtgcgaggactccatcaccgtgggaatggtgcgtcatcagggcaagatcatgtacgtgggcgacgtgcggagcgtgacacagaagcatatccaggagtggggccctttcgacctggtgatcggcggcagcccttgcaatgacctgagcatcgtgaacccagcccggaagggcctgtacgagggaaccggcagactgttcttcgagttttacagactgctgcacgacgcccggcctaaggaaggcgacgaccggcccttcttttggctgttcgagaatgtggtggccatgggagtcagcgacaagcgggatattagccggttcctggagagcaaccccgtgatgatcgatgccaaggaagtgagcgccgcccaccgggccagatacttctggggcaatctgcctggcatgaacagacccctggccagcaccgtgaacgacaagctggagctgcaggagtgcctggagcacggccggatcgccaagttcagcaaggtgagaaccatcaccacccgaagcaacagcatcaaacaaggcaaggaccagcactttcctgtgttcatgaacgagaaggaggacatcctgtggtgtaccgagatggagagagtgttcgggttcccagtccactacacagatgtcagcaacatgtctagactggccagacagagactgctgggaagaagctggtccgtccctgtgatcagacacctgttcgcccctctgaaggagtacttcgcctgcgtgagcagcggcaacagcaacgccaacagccggggccccagcttctctagcggcctggtgccactgtccctgagagggagccacatgggccccatggagatctacaaaaccgtgagcgcctggaagcggcagcctgtgcgcgtgctgagcctgtttcggaatatcgataaagtcctgaaaagcctgggattcctggagagcggctctggctccggcggtggcaccctgaagtacgtggaggatgtgacaaacgtggtcagacgggatgtggagaagtggggccccttcgatctggtgtacggcagcacccaacccctgggcagctcttgtgaccggtgccctggctggtacatgtttcagttccaccggatcctgcagtacgccctgccgagacaggagtcccagcggccattcttttggattttcatggacaacttgctgctgaccgaggatgaccaggaaactaccactcggttcctgcagaccgaagccgtgaccctgcaggacgtgagaggccgggactaccagaacgccatgcgggtgtggtccaacatccctggactgaaaagcaagcacgcacctctgacccctaaagaagaggagtacctgcaggcccaggtgcggagcagaagcaagctggacgcccctaaggtggatctgctggtgaagaattgcctcctgcccctgagagagtacttcaagtatttcagccagaatagtctgcccctgggcggcccaagcagcggcgcccctcctcccagcggcggcagcccagccggctccccaacctctaccgaggagggcacctctgagtccgccacccccgagagcggccctggcacctccaccgagcccagcgagggcagcgcacccggcagccctgccggcagccccacctccacagaggagggaaccagcaccgagcccagcgaaggcagcgccccaggcaccagcaccgagcctagtgagggcggctctggcggcggcagcgcccaggagattaaacggatcaacaagatcagaagaagacttgtgaaagacagcaacaccaagaaggccggcaagacaggccccatgaaaaccctgctggttagagtgatgacacccgatctgagagagcggctggaaaacctgagaaagaagcctgaaaatatcccccagcccatcagcaatacatctagagccaacctgaataagctgctgaccgattacaccgaaatgaagaaggcgatcctgcatgtgtactgggaagagttccagaaggaccctgtgggcctgatgagccgggtggcccagcctgccagcaagaagatcgatcagaacaagctgaaacctgagatggacgagaagggcaacctgaccaccgccggctttgcctgctctcagtgtggccagcccctgttcgtgtacaagctggagcaggtgtctgagaagggcaaggcttacaccaactacttcggacggtgcaatgtggccgagcacgaaaagctgatcctgctggcccagctgaagcccgagaaggatagcgacgaagccgtgacatatagcctgggaaagtttgggcagagggccctggatttctacagcattcatgtgaccaaggagtccacccaccccgtgaagcccctggcccagatcgccggaaacagatacgcctccggacctgtgggaaaggccctgagcgacgcatgtatgggcacaatcgcctccttcctgtctaagtaccaggacatcatcatcgaacaccagaaggtggtgaagggcaaccagaagagactggagagcctgcgggagctggccggcaaggaaaacctggaataccctagcgtgaccctgccacctcagcctcacaccaaggagggcgttgatgcctacaacgaagtgatcgcccgggtgcgaatgtgggtgaacctgaacctgtggcagaagctgaagctaagcagagatgatgccaagcctctgctgagactgaagggattcccttcctttcctctggtcgagagacaggccaacgaagtggactggtgggacatggtgtgtaacgtgaagaagctgatcaacgagaaaaaggaggatggcaaggtgttttggcagaatctggctggctacaagagacaggaagccctgagaccatacctgagcagcgaggaagatcggaagaagggaaagaaattcgctcggtaccagctgggcgacctgctgctgcacctggaaaagaagcacggcgaggactggggaaaggtgtacgacgaggcctgggagcggattgacaagaaagtggaaggcctgagcaagcacatcaagctggaagaggaacggagaagcgaggacgcccagagcaaggccgccctgaccgactggctgcgggctaaggccagcttcgtgatcgagggcctgaaggaggccgacaaggacgagttctgcagatgcgagctgaagctgcagaagtggtacggggacctgcggggaaagcccttcgccatcgaagccgagaacagcatcctggacatcagcggcttcagcaagcagtacaactgtgccttcatctggcagaaggacggcgtgaagaagctgaacctgtacctgatcatcaactacttcaagggcggcaagctgcggttcaagaagatcaaacctgaagccttcgaagccaacagattctacaccgtgatcaacaaaaagagcggcgagatcgtgcccatggaggtgaacttcaacttcgacgaccccaacctgatcatcctgcctctggcctttggcaagagacagggcagagaattcatctggaacgacctgctgtccctggaaaccggcagcctgaagctggccaacggaagagtgatcgagaagacactgtacaacagaagaacccggcaggatgagcctgccctgttcgtggccctgaccttcgagcggcgggaggtcctggactcctccaatatcaaaccaatgaacctgatcggcgtggcaagaggcgaaaacatccccgccgtgatcgccctgaccgaccccgagggctgcccactgagccggtttaaggatagcctgggaaacccaacccacatcctgagaatcggcgagagctataaggagaagcagcggaccatccaggccaagaaggaggtggagcagcggagagccggcggctacagccggaagtacgccagcaaagccaagaatctggcagacgatatggtgagaaacaccgctagagatctgctgtactacgccgtgacccaggatgccatgctgatcttcgccaacctgagccggggcttcggccggcagggcaagcggaccttcatggccgagagacagtacacacggatggaggactggctgaccgccaagctggcctacgagggcctgagcaagacctacctgtccaagacactggcccagtacacctccaagacatgcagcaactgtgggtttaccatcaccagcgccgactacgacagggtgctggagaagctgaagaagacagcaacaggctggatgaccacaattaacggcaaggagctgaaggtggagggccagattacctactacaacagatacaagagacagaacgtagtcaaggacctgtccgtcgagctggatagactgagcgaagaatctgtgaacaacgacatctcctcctggacaaagggcagaagcggagaagctctgagcctcctgaagaaaagattctcccatagacccgtgcaggagaagttcgtgtgcctgaactgcggcttcgagacacacgcagccgagcaagccgccctgaacatcgccagatcctggctgttcctgcggagccaggagtacaagaaataccagacaaacaagacaaccggcaacaccgataagagagccttcgtcgagacctggcagtccttttaccggaagaagcttaaggaggtgtggaaacctgccgtgcggtctggcggatctggcggaggctccacaagcaccgagggcctggtgatgttcgaggacgtggccgtgtacttcagcagggaggagtggggcctgctgaacgtgacccagaagggcctgtaccaggacgtgatgctggagaacttcgccctggtgagcagcctgggcctggcccccctgaggagccccgtgttcagccagctggagaacgacgagcagctgtgggtgcccagctgggtggacgagacccccgtgagcagggccgaggccaggaggaccagccccaagaaaaagagaaaagtctaagctgccttctgcggggcttgccttctggccatgcccttcttctctcccttgcacctgtacctcttggtctttgaataaagcctgagtaggaaggctagcaaaaaaaaaaaaaaaaaaaaaaaaaaaaaaaaaaaaaaaaaaaaaaaaaaaaaaaaaaaaaaaaaaaaaaaaaaaaaaaa

SEQ ID NO: 7136 - RNA, 5797 nt, synthetic construct
  source 1..5797: mol_type = other RNA
aggaaataagagagaaaagaagagtaagaagaaatataagagccaccatggcccctaagaagaagcgtaaagtgagccggatggaacgcctcgtctacgaggtgcggcagaagtgcagaaacatcgaggacatctgcatctcctgcggatctctgaacgtgaccctggagcacccactgttcatcggcggcatgtgccagaactgtaaaaactgttttctggagtgtgcctatcaatacgacgatgacggctaccagagctactgcaccatctgttgcggcggaagagaggtgctgatgtgtggaaataacaactgctgccggtgcttctgcgtggaatgcgtggacctgctggtgggccccggcgccgcccaggccgctattaaggaagatccttggaactgctacatgtgcggccacaagggcacatacggcctgctgagacggagagaggactggcctagcagactgcagatgttcttcgccaataaccacgaccaggagttcgacccccctaaggtgtaccctcccgtccccgccgagaagagaaagcccatccgggtcctgagcctgttcgatggcatcgccaccggtctgctggtgctgaaggacctgggcatccaggtggataggtacattgcctccgaggtgtgcgaggactccatcaccgtgggaatggtgcgtcatcagggcaagatcatgtacgtgggcgacgtgcggagcgtgacacagaagcatatccaggagtggggccctttcgacctggtgatcggcggcagcccttgcaatgacctgagcatcgtgaacccagcccggaagggcctgtacgagggaaccggcagactgttcttcgagttttacagactgctgcacgacgcccggcctaaggaaggcgacgaccggcccttcttttggctgttcgagaatgtggtggccatgggagtcagcgacaagcgggatattagccggttcctggagagcaaccccgtgatgatcgatgccaaggaagtgagcgccgcccaccgggccagatacttctggggcaatctgcctggcatgaacagacccctggccagcaccgtgaacgacaagctggagctgcaggagtgcctggagcacggccggatcgccaagttcagcaaggtgagaaccatcaccacccgaagcaacagcatcaaacaaggcaaggaccagcactttcctgtgttcatgaacgagaaggaggacatcctgtggtgtaccgagatggagagagtgttcgggttcccagtccactacacagatgtcagcaacatgtctagactggccagacagagactgctgggaagaagctggtccgtccctgtgatcagacacctgttcgcccctctgaaggagtacttcgcctgcgtgagcagcggcaacagcaacgccaacagccggggccccagcttctctagcggcctggtgccactgtccctgagagggagccacatgggccccatggagatctacaaaaccgtgagcgcctggaagcggcagcctgtgcgcgtgctgagcctgtttcggaatatcgataaagtcctgaaaagcctgggattcctggagagcggctctggctccggcggtggcaccctgaagtacgtggaggatgtgacaaacgtggtcagacgggatgtggagaagtggggccccttcgatctggtgtacggcagcacccaacccctgggcagctcttgtgaccggtgccctggctggtacatgtttcagttccaccggatcctgcagtacgccctgccgagacaggagtcccagcggccattcttttggattttcatggacaacttgctgctgaccgaggatgaccaggaaactaccactcggttcctgcagaccgaagccgtgaccctgcaggacgtgagaggccgggactaccagaacgccatgcgggtgtggtccaacatccctggactgaaaagcaagcacgcacctctgacccctaaagaagaggagtacctgcaggcccaggtgcggagcagaagcaagctggacgcccctaaggtggatctgctggtgaagaattgcctcctgcccctgagagagtacttcaagtatttcagccagaatagtctgcccctgggcggcccaagcagcggcgcccctcctcccagcggcggcagcccagccggctccccaacctctaccgaggagggcacctctgagtccgccacccccgagagcggccctggcacctccaccgagcccagcgagggcagcgcacccggcagccctgccggcagccccacctccacagaggagggaaccagcaccgagcccagcgaaggcagcgccccaggcaccagcaccgagcctagtgagggcggctctggcggcggcagcgcccaggagattaaacggatcaacaagatcagaagaagacttgtgaaagacagcaacaccaagaaggccggcaagacaggccccatgaaaaccctgctggttagagtgatgacacccgatctgagagagcggctggaaaacctgagaaagaagcctgaaaatatcccccagcccatcagcaatacatctagagccaacctgaataagctgctgaccgattacaccgaaatgaagaaggcgatcctgcatgtgtactgggaagagttccagaaggaccctgtgggcctgatgagccgggtggcccagcctgccagcaagaagatcgatcagaacaagctgaaacctgagatggacgagaagggcaacctgaccaccgccggctttgcctgctctcagtgtggccagcccctgttcgtgtacaagctggagcaggtgtctgagaagggcaaggcttacaccaactacttcggacggtgcaatgtggccgagcacgaaaagctgatcctgctggcccagctgaagcccgagaaggatagcgacgaagccgtgacatatagcctgggaaagtttgggcagagggccctggatttctacagcattcatgtgaccaaggagtccacccaccccgtgaagcccctggcccagatcgccggaaacagatacgcctccggacctgtgggaaaggccctgagcgacgcatgtatgggcacaatcgcctccttcctgtctaagtaccaggacatcatcatcgaacaccagaaggtggtgaagggcaaccagaagagactggagagcctgcgggagctggccggcaaggaaaacctggaataccctagcgtgaccctgccacctcagcctcacaccaaggagggcgttgatgcctacaacgaagtgatcgcccgggtgcgaatgtgggtgaacctgaacctgtggcagaagctgaagctaagcagagatgatgccaagcctctgctgagactgaagggattcccttcctttcctctggtcgagagacaggccaacgaagtggactggtgggacatggtgtgtaacgtgaagaagctgatcaacgagaaaaaggaggatggcaaggtgttttggcagaatctggctggctacaagagacaggaagccctgagaccatacctgagcagcgaggaagatcggaagaagggaaagaaattcgctcggtaccagctgggcgacctgctgctgcacctggaaaagaagcacggcgaggactggggaaaggtgtacgacgaggcctgggagcggattgacaagaaagtggaaggcctgagcaagcacatcaagctggaagaggaacggagaagcgaggacgcccagagcaaggccgccctgaccgactggctgcgggctaaggccagcttcgtgatcgagggcctgaaggaggccgacaaggacgagttctgcagatgcgagctgaagctgcagaagtggtacggggacctgcggggaaagcccttcgccatcgaagccgagaacagcatcctggacatcagcggcttcagcaagcagtacaactgtgccttcatctggcagaaggacggcgtgaagaagctgaacctgtacctgatcatcaactacttcaagggcggcaagctgcggttcaagaagatcaaacctgaagccttcgaagccaacagattctacaccgtgatcaacaaaaagagcggcgagatcgtgcccatggaggtgaacttcaacttcgacgaccccaacctgatcatcctgcctctggcctttggcaagagacagggcagagaattcatctggaacgacctgctgtccctggaaaccggcagcctgaagctggccaacggaagagtgatcgagaagacactgtacaacagaagaacccggcaggatgagcctgccctgttcgtggccctgaccttcgagcggcgggaggtcctggactcctccaatatcaaaccaatgaacctgatcggcgtggcaagaggcgaaaacatccccgccgtgatcgccctgaccgaccccgagggctgcccactgagccggtttaaggatagcctgggaaacccaacccacatcctgagaatcggcgagagctataaggagaagcagcggaccatccaggccaagaaggaggtggagcagcggagagccggcggctacagccggaagtacgccagcaaagccaagaatctggcagacgatatggtgagaaacaccgctagagatctgctgtactacgccgtgacccaggatgccatgctgatcttcgccaacctgagccggggcttcggccggcagggcaagcggaccttcatggccgagagacagtacacacggatggaggactggctgaccgccaagctggcctacgagggcctgagcaagacctacctgtccaagacactggcccagtacacctccaagacatgcagcaactgtgggtttaccatcaccagcgccgactacgacagggtgctggagaagctgaagaagacagcaacaggctggatgaccacaattaacggcaaggagctgaaggtggagggccagattacctactacaacagatacaagagacagaacgtagtcaaggacctgtccgtcgagctggatagactgagcgaagaatctgtgaacaacgacatctcctcctggacaaagggcagaagcggagaagctctgagcctcctgaagaaaagattctcccatagacccgtgcaggagaagttcgtgtgcctgaactgcggcttcgagacacacgcagccgagcaagccgccctgaacatcgccagatcctggctgttcctgcggagccaggagtacaagaaataccagacaaacaagacaaccggcaacaccgataagagagccttcgtcgagacctggcagtccttttaccggaagaagcttaaggaggtgtggaaacctgccgtgcggtctggcggatctggcggaggctccacaagcttccaggagagcgtgaccttcaaggacgtgagcgtggacttcacccagggcgagtggggccagctggaccccgcccagaagaacctgtacagggacgtgatgctggagaactacaggaccctggtgagcctgggcctgcaggtgttcaagcccgaggtgatctacaggctggagaggggcgaggccccctggatcctggagagggagatcagcaggggcccctgccccgactggcccgagaccaccagccccaagaaaaagagaaaagtctaagctgccttctgcggggcttgccttctggccatgcccttcttctctcccttgcacctgtacctcttggtctttgaataaagcctgagtaggaaggctagcaaaaaaaaaaaaaaaaaaaaaaaaaaaaaaaaaaaaaaaaaaaaaaaaaaaaaaaaaaaaaaaaaaaaaaaaaaaaaaaa

SEQ ID NO: 7137 - RNA, 5797 nt, synthetic construct
  source 1..5797: mol_type = other RNA
aggaaataagagagaaaagaagagtaagaagaaatataagagccaccatggcccctaagaagaagcgtaaagtgagccggatggaacgcctcgtctacgaggtgcggcagaagtgcagaaacatcgaggacatctgcatctcctgcggatctctgaacgtgaccctggagcacccactgttcatcggcggcatgtgccagaactgtaaaaactgttttctggagtgtgcctatcaatacgacgatgacggctaccagagctactgcaccatctgttgcggcggaagagaggtgctgatgtgtggaaataacaactgctgccggtgcttctgcgtggaatgcgtggacctgctggtgggccccggcgccgcccaggccgctattaaggaagatccttggaactgctacatgtgcggccacaagggcacatacggcctgctgagacggagagaggactggcctagcagactgcagatgttcttcgccaataaccacgaccaggagttcgacccccctaaggtgtaccctcccgtccccgccgagaagagaaagcccatccgggtcctgagcctgttcgatggcatcgccaccggtctgctggtgctgaaggacctgggcatccaggtggataggtacattgcctccgaggtgtgcgaggactccatcaccgtgggaatggtgcgtcatcagggcaagatcatgtacgtgggcgacgtgcggagcgtgacacagaagcatatccaggagtggggccctttcgacctggtgatcggcggcagcccttgcaatgacctgagcatcgtgaacccagcccggaagggcctgtacgagggaaccggcagactgttcttcgagttttacagactgctgcacgacgcccggcctaaggaaggcgacgaccggcccttcttttggctgttcgagaatgtggtggccatgggagtcagcgacaagcgggatattagccggttcctggagagcaaccccgtgatgatcgatgccaaggaagtgagcgccgcccaccgggccagatacttctggggcaatctgcctggcatgaacagacccctggccagcaccgtgaacgacaagctggagctgcaggagtgcctggagcacggccggatcgccaagttcagcaaggtgagaaccatcaccacccgaagcaacagcatcaaacaaggcaaggaccagcactttcctgtgttcatgaacgagaaggaggacatcctgtggtgtaccgagatggagagagtgttcgggttcccagtccactacacagatgtcagcaacatgtctagactggccagacagagactgctgggaagaagctggtccgtccctgtgatcagacacctgttcgcccctctgaaggagtacttcgcctgcgtgagcagcggcaacagcaacgccaacagccggggccccagcttctctagcggcctggtgccactgtccctgagagggagccacatgggccccatggagatctacaaaaccgtgagcgcctggaagcggcagcctgtgcgcgtgctgagcctgtttcggaatatcgataaagtcctgaaaagcctgggattcctggagagcggctctggctccggcggtggcaccctgaagtacgtggaggatgtgacaaacgtggtcagacgggatgtggagaagtggggccccttcgatctggtgtacggcagcacccaacccctgggcagctcttgtgaccggtgccctggctggtacatgtttcagttccaccggatcctgcagtacgccctgccgagacaggagtcccagcggccattcttttggattttcatggacaacttgctgctgaccgaggatgaccaggaaactaccactcggttcctgcagaccgaagccgtgaccctgcaggacgtgagaggccgggactaccagaacgccatgcgggtgtggtccaacatccctggactgaaaagcaagcacgcacctctgacccctaaagaagaggagtacctgcaggcccaggtgcggagcagaagcaagctggacgcccctaaggtggatctgctggtgaagaattgcctcctgcccctgagagagtacttcaagtatttcagccagaatagtctgcccctgggcggcccaagcagcggcgcccctcctcccagcggcggcagcccagccggctccccaacctctaccgaggagggcacctctgagtccgccacccccgagagcggccctggcacctccaccgagcccagcgagggcagcgcacccggcagccctgccggcagccccacctccacagaggagggaaccagcaccgagcccagcgaaggcagcgccccaggcaccagcaccgagcctagtgagggcggctctggcggcggcagcgcccaggagattaaacggatcaacaagatcagaagaagacttgtgaaagacagcaacaccaagaaggccggcaagacaggccccatgaaaaccctgctggttagagtgatgacacccgatctgagagagcggctggaaaacctgagaaagaagcctgaaaatatcccccagcccatcagcaatacatctagagccaacctgaataagctgctgaccgattacaccgaaatgaagaaggcgatcctgcatgtgtactgggaagagttccagaaggaccctgtgggcctgatgagccgggtggcccagcctgccagcaagaagatcgatcagaacaagctgaaacctgagatggacgagaagggcaacctgaccaccgccggctttgcctgctctcagtgtggccagcccctgttcgtgtacaagctggagcaggtgtctgagaagggcaaggcttacaccaactacttcggacggtgcaatgtggccgagcacgaaaagctgatcctgctggcccagctgaagcccgagaaggatagcgacgaagccgtgacatatagcctgggaaagtttgggcagagggccctggatttctacagcattcatgtgaccaaggagtccacccaccccgtgaagcccctggcccagatcgccggaaacagatacgcctccggacctgtgggaaaggccctgagcgacgcatgtatgggcacaatcgcctccttcctgtctaagtaccaggacatcatcatcgaacaccagaaggtggtgaagggcaaccagaagagactggagagcctgcgggagctggccggcaaggaaaacctggaataccctagcgtgaccctgccacctcagcctcacaccaaggagggcgttgatgcctacaacgaagtgatcgcccgggtgcgaatgtgggtgaacctgaacctgtggcagaagctgaagctaagcagagatgatgccaagcctctgctgagactgaagggattcccttcctttcctctggtcgagagacaggccaacgaagtggactggtgggacatggtgtgtaacgtgaagaagctgatcaacgagaaaaaggaggatggcaaggtgttttggcagaatctggctggctacaagagacaggaagccctgagaccatacctgagcagcgaggaagatcggaagaagggaaagaaattcgctcggtaccagctgggcgacctgctgctgcacctggaaaagaagcacggcgaggactggggaaaggtgtacgacgaggcctgggagcggattgacaagaaagtggaaggcctgagcaagcacatcaagctggaagaggaacggagaagcgaggacgcccagagcaaggccgccctgaccgactggctgcgggctaaggccagcttcgtgatcgagggcctgaaggaggccgacaaggacgagttctgcagatgcgagctgaagctgcagaagtggtacggggacctgcggggaaagcccttcgccatcgaagccgagaacagcatcctggacatcagcggcttcagcaagcagtacaactgtgccttcatctggcagaaggacggcgtgaagaagctgaacctgtacctgatcatcaactacttcaagggcggcaagctgcggttcaagaagatcaaacctgaagccttcgaagccaacagattctacaccgtgatcaacaaaaagagcggcgagatcgtgcccatggaggtgaacttcaacttcgacgaccccaacctgatcatcctgcctctggcctttggcaagagacagggcagagaattcatctggaacgacctgctgtccctggaaaccggcagcctgaagctggccaacggaagagtgatcgagaagacactgtacaacagaagaacccggcaggatgagcctgccctgttcgtggccctgaccttcgagcggcgggaggtcctggactcctccaatatcaaaccaatgaacctgatcggcgtggcaagaggcgaaaacatccccgccgtgatcgccctgaccgaccccgagggctgcccactgagccggtttaaggatagcctgggaaacccaacccacatcctgagaatcggcgagagctataaggagaagcagcggaccatccaggccaagaaggaggtggagcagcggagagccggcggctacagccggaagtacgccagcaaagccaagaatctggcagacgatatggtgagaaacaccgctagagatctgctgtactacgccgtgacccaggatgccatgctgatcttcgccaacctgagccggggcttcggccggcagggcaagcggaccttcatggccgagagacagtacacacggatggaggactggctgaccgccaagctggcctacgagggcctgagcaagacctacctgtccaagacactggcccagtacacctccaagacatgcagcaactgtgggtttaccatcaccagcgccgactacgacagggtgctggagaagctgaagaagacagcaacaggctggatgaccacaattaacggcaaggagctgaaggtggagggccagattacctactacaacagatacaagagacagaacgtagtcaaggacctgtccgtcgagctggatagactgagcgaagaatctgtgaacaacgacatctcctcctggacaaagggcagaagcggagaagctctgagcctcctgaagaaaagattctcccatagacccgtgcaggagaagttcgtgtgcctgaactgcggcttcgagacacacgcagccgagcaagccgccctgaacatcgccagatcctggctgttcctgcggagccaggagtacaagaaataccagacaaacaagacaaccggcaacaccgataagagagccttcgtcgagacctggcagtccttttaccggaagaagcttaaggaggtgtggaaacctgccgtgcggtctggcggatctggcggaggctccacaagcatctgggacctggtgatgttcagggacgtggccgtggacttcagccaggaggagtgggagtgcctgaacagctaccagaggaacctgtacagggacgtgatcctggagaactacagcaacctggtgagcctgggctgcagcatcagcaagcccgacgtgatcaccctgctggagcagggcaaggagccctggatggtgatgagggacgagaagaggaggtggaccctggacctggagagcaggaccagccccaagaaaaagagaaaagtctaagctgccttctgcggggcttgccttctggccatgcccttcttctctcccttgcacctgtacctcttggtctttgaataaagcctgagtaggaaggctagcaaaaaaaaaaaaaaaaaaaaaaaaaaaaaaaaaaaaaaaaaaaaaaaaaaaaaaaaaaaaaaaaaaaaaaaaaaaaaaaa

SEQ ID NO: 7138 - RNA, 5797 nt, synthetic construct
  source 1..5797: mol_type = other RNA
aggaaataagagagaaaagaagagtaagaagaaatataagagccaccatggcccctaagaagaagcgtaaagtgagccggatggaacgcctcgtctacgaggtgcggcagaagtgcagaaacatcgaggacatctgcatctcctgcggatctctgaacgtgaccctggagcacccactgttcatcggcggcatgtgccagaactgtaaaaactgttttctggagtgtgcctatcaatacgacgatgacggctaccagagctactgcaccatctgttgcggcggaagagaggtgctgatgtgtggaaataacaactgctgccggtgcttctgcgtggaatgcgtggacctgctggtgggccccggcgccgcccaggccgctattaaggaagatccttggaactgctacatgtgcggccacaagggcacatacggcctgctgagacggagagaggactggcctagcagactgcagatgttcttcgccaataaccacgaccaggagttcgacccccctaaggtgtaccctcccgtccccgccgagaagagaaagcccatccgggtcctgagcctgttcgatggcatcgccaccggtctgctggtgctgaaggacctgggcatccaggtggataggtacattgcctccgaggtgtgcgaggactccatcaccgtgggaatggtgcgtcatcagggcaagatcatgtacgtgggcgacgtgcggagcgtgacacagaagcatatccaggagtggggccctttcgacctggtgatcggcggcagcccttgcaatgacctgagcatcgtgaacccagcccggaagggcctgtacgagggaaccggcagactgttcttcgagttttacagactgctgcacgacgcccggcctaaggaaggcgacgaccggcccttcttttggctgttcgagaatgtggtggccatgggagtcagcgacaagcgggatattagccggttcctggagagcaaccccgtgatgatcgatgccaaggaagtgagcgccgcccaccgggccagatacttctggggcaatctgcctggcatgaacagacccctggccagcaccgtgaacgacaagctggagctgcaggagtgcctggagcacggccggatcgccaagttcagcaaggtgagaaccatcaccacccgaagcaacagcatcaaacaaggcaaggaccagcactttcctgtgttcatgaacgagaaggaggacatcctgtggtgtaccgagatggagagagtgttcgggttcccagtccactacacagatgtcagcaacatgtctagactggccagacagagactgctgggaagaagctggtccgtccctgtgatcagacacctgttcgcccctctgaaggagtacttcgcctgcgtgagcagcggcaacagcaacgccaacagccggggccccagcttctctagcggcctggtgccactgtccctgagagggagccacatgggccccatggagatctacaaaaccgtgagcgcctggaagcggcagcctgtgcgcgtgctgagcctgtttcggaatatcgataaagtcctgaaaagcctgggattcctggagagcggctctggctccggcggtggcaccctgaagtacgtggaggatgtgacaaacgtggtcagacgggatgtggagaagtggggccccttcgatctggtgtacggcagcacccaacccctgggcagctcttgtgaccggtgccctggctggtacatgtttcagttccaccggatcctgcagtacgccctgccgagacaggagtcccagcggccattcttttggattttcatggacaacttgctgctgaccgaggatgaccaggaaactaccactcggttcctgcagaccgaagccgtgaccctgcaggacgtgagaggccgggactaccagaacgccatgcgggtgtggtccaacatccctggactgaaaagcaagcacgcacctctgacccctaaagaagaggagtacctgcaggcccaggtgcggagcagaagcaagctggacgcccctaaggtggatctgctggtgaagaattgcctcctgcccctgagagagtacttcaagtatttcagccagaatagtctgcccctgggcggcccaagcagcggcgcccctcctcccagcggcggcagcccagccggctccccaacctctaccgaggagggcacctctgagtccgccacccccgagagcggccctggcacctccaccgagcccagcgagggcagcgcacccggcagccctgccggcagccccacctccacagaggagggaaccagcaccgagcccagcgaaggcagcgccccaggcaccagcaccgagcctagtgagggcggctctggcggcggcagcgcccaggagattaaacggatcaacaagatcagaagaagacttgtgaaagacagcaacaccaagaaggccggcaagacaggccccatgaaaaccctgctggttagagtgatgacacccgatctgagagagcggctggaaaacctgagaaagaagcctgaaaatatcccccagcccatcagcaatacatctagagccaacctgaataagctgctgaccgattacaccgaaatgaagaaggcgatcctgcatgtgtactgggaagagttccagaaggaccctgtgggcctgatgagccgggtggcccagcctgccagcaagaagatcgatcagaacaagctgaaacctgagatggacgagaagggcaacctgaccaccgccggctttgcctgctctcagtgtggccagcccctgttcgtgtacaagctggagcaggtgtctgagaagggcaaggcttacaccaactacttcggacggtgcaatgtggccgagcacgaaaagctgatcctgctggcccagctgaagcccgagaaggatagcgacgaagccgtgacatatagcctgggaaagtttgggcagagggccctggatttctacagcattcatgtgaccaaggagtccacccaccccgtgaagcccctggcccagatcgccggaaacagatacgcctccggacctgtgggaaaggccctgagcgacgcatgtatgggcacaatcgcctccttcctgtctaagtaccaggacatcatcatcgaacaccagaaggtggtgaagggcaaccagaagagactggagagcctgcgggagctggccggcaaggaaaacctggaataccctagcgtgaccctgccacctcagcctcacaccaaggagggcgttgatgcctacaacgaagtgatcgcccgggtgcgaatgtgggtgaacctgaacctgtggcagaagctgaagctaagcagagatgatgccaagcctctgctgagactgaagggattcccttcctttcctctggtcgagagacaggccaacgaagtggactggtgggacatggtgtgtaacgtgaagaagctgatcaacgagaaaaaggaggatggcaaggtgttttggcagaatctggctggctacaagagacaggaagccctgagaccatacctgagcagcgaggaagatcggaagaagggaaagaaattcgctcggtaccagctgggcgacctgctgctgcacctggaaaagaagcacggcgaggactggggaaaggtgtacgacgaggcctgggagcggattgacaagaaagtggaaggcctgagcaagcacatcaagctggaagaggaacggagaagcgaggacgcccagagcaaggccgccctgaccgactggctgcgggctaaggccagcttcgtgatcgagggcctgaaggaggccgacaaggacgagttctgcagatgcgagctgaagctgcagaagtggtacggggacctgcggggaaagcccttcgccatcgaagccgagaacagcatcctggacatcagcggcttcagcaagcagtacaactgtgccttcatctggcagaaggacggcgtgaagaagctgaacctgtacctgatcatcaactacttcaagggcggcaagctgcggttcaagaagatcaaacctgaagccttcgaagccaacagattctacaccgtgatcaacaaaaagagcggcgagatcgtgcccatggaggtgaacttcaacttcgacgaccccaacctgatcatcctgcctctggcctttggcaagagacagggcagagaattcatctggaacgacctgctgtccctggaaaccggcagcctgaagctggccaacggaagagtgatcgagaagacactgtacaacagaagaacccggcaggatgagcctgccctgttcgtggccctgaccttcgagcggcgggaggtcctggactcctccaatatcaaaccaatgaacctgatcggcgtggcaagaggcgaaaacatccccgccgtgatcgccctgaccgaccccgagggctgcccactgagccggtttaaggatagcctgggaaacccaacccacatcctgagaatcggcgagagctataaggagaagcagcggaccatccaggccaagaaggaggtggagcagcggagagccggcggctacagccggaagtacgccagcaaagccaagaatctggcagacgatatggtgagaaacaccgctagagatctgctgtactacgccgtgacccaggatgccatgctgatcttcgccaacctgagccggggcttcggccggcagggcaagcggaccttcatggccgagagacagtacacacggatggaggactggctgaccgccaagctggcctacgagggcctgagcaagacctacctgtccaagacactggcccagtacacctccaagacatgcagcaactgtgggtttaccatcaccagcgccgactacgacagggtgctggagaagctgaagaagacagcaacaggctggatgaccacaattaacggcaaggagctgaaggtggagggccagattacctactacaacagatacaagagacagaacgtagtcaaggacctgtccgtcgagctggatagactgagcgaagaatctgtgaacaacgacatctcctcctggacaaagggcagaagcggagaagctctgagcctcctgaagaaaagattctcccatagacccgtgcaggagaagttcgtgtgcctgaactgcggcttcgagacacacgcagccgagcaagccgccctgaacatcgccagatcctggctgttcctgcggagccaggagtacaagaaataccagacaaacaagacaaccggcaacaccgataagagagccttcgtcgagacctggcagtccttttaccggaagaagcttaaggaggtgtggaaacctgccgtgcggtctggcggatctggcggaggctccacaagcaggcccagggccgtgaagttcggcgacgtggccctgtacttcagcagggaggagtggggctgcctgaggcccgcccagagggccctgtacagggacgtgatgcaggagacctacggccacctgggcgccctgggctgcgccggccccaagcccgccctgatcagctggctggagaggaacaccgacgactgggagcccgccgccctggacccccagcagtgccccaagggcgtggccgtgcagaccagccccaagaaaaagagaaaagtctaagctgccttctgcggggcttgccttctggccatgcccttcttctctcccttgcacctgtacctcttggtctttgaataaagcctgagtaggaaggctagcaaaaaaaaaaaaaaaaaaaaaaaaaaaaaaaaaaaaaaaaaaaaaaaaaaaaaaaaaaaaaaaaaaaaaaaaaaaaaaaa

SEQ ID NO: 7139 - RNA, 5797 nt, synthetic construct
  source 1..5797: mol_type = other RNA
aggaaataagagagaaaagaagagtaagaagaaatataagagccaccatggcccctaagaagaagcgtaaagtgagccggatggaacgcctcgtctacgaggtgcggcagaagtgcagaaacatcgaggacatctgcatctcctgcggatctctgaacgtgaccctggagcacccactgttcatcggcggcatgtgccagaactgtaaaaactgttttctggagtgtgcctatcaatacgacgatgacggctaccagagctactgcaccatctgttgcggcggaagagaggtgctgatgtgtggaaataacaactgctgccggtgcttctgcgtggaatgcgtggacctgctggtgggccccggcgccgcccaggccgctattaaggaagatccttggaactgctacatgtgcggccacaagggcacatacggcctgctgagacggagagaggactggcctagcagactgcagatgttcttcgccaataaccacgaccaggagttcgacccccctaaggtgtaccctcccgtccccgccgagaagagaaagcccatccgggtcctgagcctgttcgatggcatcgccaccggtctgctggtgctgaaggacctgggcatccaggtggataggtacattgcctccgaggtgtgcgaggactccatcaccgtgggaatggtgcgtcatcagggcaagatcatgtacgtgggcgacgtgcggagcgtgacacagaagcatatccaggagtggggccctttcgacctggtgatcggcggcagcccttgcaatgacctgagcatcgtgaacccagcccggaagggcctgtacgagggaaccggcagactgttcttcgagttttacagactgctgcacgacgcccggcctaaggaaggcgacgaccggcccttcttttggctgttcgagaatgtggtggccatgggagtcagcgacaagcgggatattagccggttcctggagagcaaccccgtgatgatcgatgccaaggaagtgagcgccgcccaccgggccagatacttctggggcaatctgcctggcatgaacagacccctggccagcaccgtgaacgacaagctggagctgcaggagtgcctggagcacggccggatcgccaagttcagcaaggtgagaaccatcaccacccgaagcaacagcatcaaacaaggcaaggaccagcactttcctgtgttcatgaacgagaaggaggacatcctgtggtgtaccgagatggagagagtgttcgggttcccagtccactacacagatgtcagcaacatgtctagactggccagacagagactgctgggaagaagctggtccgtccctgtgatcagacacctgttcgcccctctgaaggagtacttcgcctgcgtgagcagcggcaacagcaacgccaacagccggggccccagcttctctagcggcctggtgccactgtccctgagagggagccacatgggccccatggagatctacaaaaccgtgagcgcctggaagcggcagcctgtgcgcgtgctgagcctgtttcggaatatcgataaagtcctgaaaagcctgggattcctggagagcggctctggctccggcggtggcaccctgaagtacgtggaggatgtgacaaacgtggtcagacgggatgtggagaagtggggccccttcgatctggtgtacggcagcacccaacccctgggcagctcttgtgaccggtgccctggctggtacatgtttcagttccaccggatcctgcagtacgccctgccgagacaggagtcccagcggccattcttttggattttcatggacaacttgctgctgaccgaggatgaccaggaaactaccactcggttcctgcagaccgaagccgtgaccctgcaggacgtgagaggccgggactaccagaacgccatgcgggtgtggtccaacatccctggactgaaaagcaagcacgcacctctgacccctaaagaagaggagtacctgcaggcccaggtgcggagcagaagcaagctggacgcccctaaggtggatctgctggtgaagaattgcctcctgcccctgagagagtacttcaagtatttcagccagaatagtctgcccctgggcggcccaagcagcggcgcccctcctcccagcggcggcagcccagccggctccccaacctctaccgaggagggcacctctgagtccgccacccccgagagcggccctggcacctccaccgagcccagcgagggcagcgcacccggcagccctgccggcagccccacctccacagaggagggaaccagcaccgagcccagcgaaggcagcgccccaggcaccagcaccgagcctagtgagggcggctctggcggcggcagcgcccaggagattaaacggatcaacaagatcagaagaagacttgtgaaagacagcaacaccaagaaggccggcaagacaggccccatgaaaaccctgctggttagagtgatgacacccgatctgagagagcggctggaaaacctgagaaagaagcctgaaaatatcccccagcccatcagcaatacatctagagccaacctgaataagctgctgaccgattacaccgaaatgaagaaggcgatcctgcatgtgtactgggaagagttccagaaggaccctgtgggcctgatgagccgggtggcccagcctgccagcaagaagatcgatcagaacaagctgaaacctgagatggacgagaagggcaacctgaccaccgccggctttgcctgctctcagtgtggccagcccctgttcgtgtacaagctggagcaggtgtctgagaagggcaaggcttacaccaactacttcggacggtgcaatgtggccgagcacgaaaagctgatcctgctggcccagctgaagcccgagaaggatagcgacgaagccgtgacatatagcctgggaaagtttgggcagagggccctggatttctacagcattcatgtgaccaaggagtccacccaccccgtgaagcccctggcccagatcgccggaaacagatacgcctccggacctgtgggaaaggccctgagcgacgcatgtatgggcacaatcgcctccttcctgtctaagtaccaggacatcatcatcgaacaccagaaggtggtgaagggcaaccagaagagactggagagcctgcgggagctggccggcaaggaaaacctggaataccctagcgtgaccctgccacctcagcctcacaccaaggagggcgttgatgcctacaacgaagtgatcgcccgggtgcgaatgtgggtgaacctgaacctgtggcagaagctgaagctaagcagagatgatgccaagcctctgctgagactgaagggattcccttcctttcctctggtcgagagacaggccaacgaagtggactggtgggacatggtgtgtaacgtgaagaagctgatcaacgagaaaaaggaggatggcaaggtgttttggcagaatctggctggctacaagagacaggaagccctgagaccatacctgagcagcgaggaagatcggaagaagggaaagaaattcgctcggtaccagctgggcgacctgctgctgcacctggaaaagaagcacggcgaggactggggaaaggtgtacgacgaggcctgggagcggattgacaagaaagtggaaggcctgagcaagcacatcaagctggaagaggaacggagaagcgaggacgcccagagcaaggccgccctgaccgactggctgcgggctaaggccagcttcgtgatcgagggcctgaaggaggccgacaaggacgagttctgcagatgcgagctgaagctgcagaagtggtacggggacctgcggggaaagcccttcgccatcgaagccgagaacagcatcctggacatcagcggcttcagcaagcagtacaactgtgccttcatctggcagaaggacggcgtgaagaagctgaacctgtacctgatcatcaactacttcaagggcggcaagctgcggttcaagaagatcaaacctgaagccttcgaagccaacagattctacaccgtgatcaacaaaaagagcggcgagatcgtgcccatggaggtgaacttcaacttcgacgaccccaacctgatcatcctgcctctggcctttggcaagagacagggcagagaattcatctggaacgacctgctgtccctggaaaccggcagcctgaagctggccaacggaagagtgatcgagaagacactgtacaacagaagaacccggcaggatgagcctgccctgttcgtggccctgaccttcgagcggcgggaggtcctggactcctccaatatcaaaccaatgaacctgatcggcgtggcaagaggcgaaaacatccccgccgtgatcgccctgaccgaccccgagggctgcccactgagccggtttaaggatagcctgggaaacccaacccacatcctgagaatcggcgagagctataaggagaagcagcggaccatccaggccaagaaggaggtggagcagcggagagccggcggctacagccggaagtacgccagcaaagccaagaatctggcagacgatatggtgagaaacaccgctagagatctgctgtactacgccgtgacccaggatgccatgctgatcttcgccaacctgagccggggcttcggccggcagggcaagcggaccttcatggccgagagacagtacacacggatggaggactggctgaccgccaagctggcctacgagggcctgagcaagacctacctgtccaagacactggcccagtacacctccaagacatgcagcaactgtgggtttaccatcaccagcgccgactacgacagggtgctggagaagctgaagaagacagcaacaggctggatgaccacaattaacggcaaggagctgaaggtggagggccagattacctactacaacagatacaagagacagaacgtagtcaaggacctgtccgtcgagctggatagactgagcgaagaatctgtgaacaacgacatctcctcctggacaaagggcagaagcggagaagctctgagcctcctgaagaaaagattctcccatagacccgtgcaggagaagttcgtgtgcctgaactgcggcttcgagacacacgcagccgagcaagccgccctgaacatcgccagatcctggctgttcctgcggagccaggagtacaagaaataccagacaaacaagacaaccggcaacaccgataagagagccttcgtcgagacctggcagtccttttaccggaagaagcttaaggaggtgtggaaacctgccgtgcggtctggcggatctggcggaggctccacaagcgtgcacggcagcgtgaccttcagggacgtggccatcgacttcagccaggaggagtgggagtgcctgcagcccgcccagaagaccctgtacagggacgtgatgctggagaactacagccacctgatcagcctgggcagcagcatcagcaagcccgacgtgatcaccctgctggagcaggagaaggagccctggatggtgaggaggaaggagaccaacaggtggtaccccgacctggagagcaagaccagccccaagaaaaagagaaaagtctaagctgccttctgcggggcttgccttctggccatgcccttcttctctcccttgcacctgtacctcttggtctttgaataaagcctgagtaggaaggctagcaaaaaaaaaaaaaaaaaaaaaaaaaaaaaaaaaaaaaaaaaaaaaaaaaaaaaaaaaaaaaaaaaaaaaaaaaaaaaaaa

SEQ ID NO: 7140 - RNA, 5794 nt, synthetic construct
  source 1..5794: mol_type = other RNA
aggaaataagagagaaaagaagagtaagaagaaatataagagccaccatggcccctaagaagaagcgtaaagtgagccggatggaacgcctcgtctacgaggtgcggcagaagtgcagaaacatcgaggacatctgcatctcctgcggatctctgaacgtgaccctggagcacccactgttcatcggcggcatgtgccagaactgtaaaaactgttttctggagtgtgcctatcaatacgacgatgacggctaccagagctactgcaccatctgttgcggcggaagagaggtgctgatgtgtggaaataacaactgctgccggtgcttctgcgtggaatgcgtggacctgctggtgggccccggcgccgcccaggccgctattaaggaagatccttggaactgctacatgtgcggccacaagggcacatacggcctgctgagacggagagaggactggcctagcagactgcagatgttcttcgccaataaccacgaccaggagttcgacccccctaaggtgtaccctcccgtccccgccgagaagagaaagcccatccgggtcctgagcctgttcgatggcatcgccaccggtctgctggtgctgaaggacctgggcatccaggtggataggtacattgcctccgaggtgtgcgaggactccatcaccgtgggaatggtgcgtcatcagggcaagatcatgtacgtgggcgacgtgcggagcgtgacacagaagcatatccaggagtggggccctttcgacctggtgatcggcggcagcccttgcaatgacctgagcatcgtgaacccagcccggaagggcctgtacgagggaaccggcagactgttcttcgagttttacagactgctgcacgacgcccggcctaaggaaggcgacgaccggcccttcttttggctgttcgagaatgtggtggccatgggagtcagcgacaagcgggatattagccggttcctggagagcaaccccgtgatgatcgatgccaaggaagtgagcgccgcccaccgggccagatacttctggggcaatctgcctggcatgaacagacccctggccagcaccgtgaacgacaagctggagctgcaggagtgcctggagcacggccggatcgccaagttcagcaaggtgagaaccatcaccacccgaagcaacagcatcaaacaaggcaaggaccagcactttcctgtgttcatgaacgagaaggaggacatcctgtggtgtaccgagatggagagagtgttcgggttcccagtccactacacagatgtcagcaacatgtctagactggccagacagagactgctgggaagaagctggtccgtccctgtgatcagacacctgttcgcccctctgaaggagtacttcgcctgcgtgagcagcggcaacagcaacgccaacagccggggccccagcttctctagcggcctggtgccactgtccctgagagggagccacatgggccccatggagatctacaaaaccgtgagcgcctggaagcggcagcctgtgcgcgtgctgagcctgtttcggaatatcgataaagtcctgaaaagcctgggattcctggagagcggctctggctccggcggtggcaccctgaagtacgtggaggatgtgacaaacgtggtcagacgggatgtggagaagtggggccccttcgatctggtgtacggcagcacccaacccctgggcagctcttgtgaccggtgccctggctggtacatgtttcagttccaccggatcctgcagtacgccctgccgagacaggagtcccagcggccattcttttggattttcatggacaacttgctgctgaccgaggatgaccaggaaactaccactcggttcctgcagaccgaagccgtgaccctgcaggacgtgagaggccgggactaccagaacgccatgcgggtgtggtccaacatccctggactgaaaagcaagcacgcacctctgacccctaaagaagaggagtacctgcaggcccaggtgcggagcagaagcaagctggacgcccctaaggtggatctgctggtgaagaattgcctcctgcccctgagagagtacttcaagtatttcagccagaatagtctgcccctgggcggcccaagcagcggcgcccctcctcccagcggcggcagcccagccggctccccaacctctaccgaggagggcacctctgagtccgccacccccgagagcggccctggcacctccaccgagcccagcgagggcagcgcacccggcagccctgccggcagccccacctccacagaggagggaaccagcaccgagcccagcgaaggcagcgccccaggcaccagcaccgagcctagtgagggcggctctggcggcggcagcgcccaggagattaaacggatcaacaagatcagaagaagacttgtgaaagacagcaacaccaagaaggccggcaagacaggccccatgaaaaccctgctggttagagtgatgacacccgatctgagagagcggctggaaaacctgagaaagaagcctgaaaatatcccccagcccatcagcaatacatctagagccaacctgaataagctgctgaccgattacaccgaaatgaagaaggcgatcctgcatgtgtactgggaagagttccagaaggaccctgtgggcctgatgagccgggtggcccagcctgccagcaagaagatcgatcagaacaagctgaaacctgagatggacgagaagggcaacctgaccaccgccggctttgcctgctctcagtgtggccagcccctgttcgtgtacaagctggagcaggtgtctgagaagggcaaggcttacaccaactacttcggacggtgcaatgtggccgagcacgaaaagctgatcctgctggcccagctgaagcccgagaaggatagcgacgaagccgtgacatatagcctgggaaagtttgggcagagggccctggatttctacagcattcatgtgaccaaggagtccacccaccccgtgaagcccctggcccagatcgccggaaacagatacgcctccggacctgtgggaaaggccctgagcgacgcatgtatgggcacaatcgcctccttcctgtctaagtaccaggacatcatcatcgaacaccagaaggtggtgaagggcaaccagaagagactggagagcctgcgggagctggccggcaaggaaaacctggaataccctagcgtgaccctgccacctcagcctcacaccaaggagggcgttgatgcctacaacgaagtgatcgcccgggtgcgaatgtgggtgaacctgaacctgtggcagaagctgaagctaagcagagatgatgccaagcctctgctgagactgaagggattcccttcctttcctctggtcgagagacaggccaacgaagtggactggtgggacatggtgtgtaacgtgaagaagctgatcaacgagaaaaaggaggatggcaaggtgttttggcagaatctggctggctacaagagacaggaagccctgagaccatacctgagcagcgaggaagatcggaagaagggaaagaaattcgctcggtaccagctgggcgacctgctgctgcacctggaaaagaagcacggcgaggactggggaaaggtgtacgacgaggcctgggagcggattgacaagaaagtggaaggcctgagcaagcacatcaagctggaagaggaacggagaagcgaggacgcccagagcaaggccgccctgaccgactggctgcgggctaaggccagcttcgtgatcgagggcctgaaggaggccgacaaggacgagttctgcagatgcgagctgaagctgcagaagtggtacggggacctgcggggaaagcccttcgccatcgaagccgagaacagcatcctggacatcagcggcttcagcaagcagtacaactgtgccttcatctggcagaaggacggcgtgaagaagctgaacctgtacctgatcatcaactacttcaagggcggcaagctgcggttcaagaagatcaaacctgaagccttcgaagccaacagattctacaccgtgatcaacaaaaagagcggcgagatcgtgcccatggaggtgaacttcaacttcgacgaccccaacctgatcatcctgcctctggcctttggcaagagacagggcagagaattcatctggaacgacctgctgtccctggaaaccggcagcctgaagctggccaacggaagagtgatcgagaagacactgtacaacagaagaacccggcaggatgagcctgccctgttcgtggccctgaccttcgagcggcgggaggtcctggactcctccaatatcaaaccaatgaacctgatcggcgtggcaagaggcgaaaacatccccgccgtgatcgccctgaccgaccccgagggctgcccactgagccggtttaaggatagcctgggaaacccaacccacatcctgagaatcggcgagagctataaggagaagcagcggaccatccaggccaagaaggaggtggagcagcggagagccggcggctacagccggaagtacgccagcaaagccaagaatctggcagacgatatggtgagaaacaccgctagagatctgctgtactacgccgtgacccaggatgccatgctgatcttcgccaacctgagccggggcttcggccggcagggcaagcggaccttcatggccgagagacagtacacacggatggaggactggctgaccgccaagctggcctacgagggcctgagcaagacctacctgtccaagacactggcccagtacacctccaagacatgcagcaactgtgggtttaccatcaccagcgccgactacgacagggtgctggagaagctgaagaagacagcaacaggctggatgaccacaattaacggcaaggagctgaaggtggagggccagattacctactacaacagatacaagagacagaacgtagtcaaggacctgtccgtcgagctggatagactgagcgaagaatctgtgaacaacgacatctcctcctggacaaagggcagaagcggagaagctctgagcctcctgaagaaaagattctcccatagacccgtgcaggagaagttcgtgtgcctgaactgcggcttcgagacacacgcagccgagcaagccgccctgaacatcgccagatcctggctgttcctgcggagccaggagtacaagaaataccagacaaacaagacaaccggcaacaccgataagagagccttcgtcgagacctggcagtccttttaccggaagaagcttaaggaggtgtggaaacctgccgtgcggtctggcggatctggcggaggctccacaagcatggtgctggtgagcttcgaggacgtggccgtggacttcacctgggaggagtggcaggccctggacgccgcccagaggaccctgtacagggacgtgatgctggagacctacagcagcctggtgagcctgggccactgcatggccaagcccgagctgatcttcaacctggagcagggcctgggccccaggagcaccgccggcgccagcgtgtggaacctgagcggcaggaccgaggacagcaccagccccaagaaaaagagaaaagtctaagctgccttctgcggggcttgccttctggccatgcccttcttctctcccttgcacctgtacctcttggtctttgaataaagcctgagtaggaaggctagcaaaaaaaaaaaaaaaaaaaaaaaaaaaaaaaaaaaaaaaaaaaaaaaaaaaaaaaaaaaaaaaaaaaaaaaaaaaaaaaa

SEQ ID NO: 7141 - RNA, 5797 nt, synthetic construct
  source 1..5797: mol_type = other RNA
aggaaataagagagaaaagaagagtaagaagaaatataagagccaccatggcccctaagaagaagcgtaaagtgagccggatggaacgcctcgtctacgaggtgcggcagaagtgcagaaacatcgaggacatctgcatctcctgcggatctctgaacgtgaccctggagcacccactgttcatcggcggcatgtgccagaactgtaaaaactgttttctggagtgtgcctatcaatacgacgatgacggctaccagagctactgcaccatctgttgcggcggaagagaggtgctgatgtgtggaaataacaactgctgccggtgcttctgcgtggaatgcgtggacctgctggtgggccccggcgccgcccaggccgctattaaggaagatccttggaactgctacatgtgcggccacaagggcacatacggcctgctgagacggagagaggactggcctagcagactgcagatgttcttcgccaataaccacgaccaggagttcgacccccctaaggtgtaccctcccgtccccgccgagaagagaaagcccatccgggtcctgagcctgttcgatggcatcgccaccggtctgctggtgctgaaggacctgggcatccaggtggataggtacattgcctccgaggtgtgcgaggactccatcaccgtgggaatggtgcgtcatcagggcaagatcatgtacgtgggcgacgtgcggagcgtgacacagaagcatatccaggagtggggccctttcgacctggtgatcggcggcagcccttgcaatgacctgagcatcgtgaacccagcccggaagggcctgtacgagggaaccggcagactgttcttcgagttttacagactgctgcacgacgcccggcctaaggaaggcgacgaccggcccttcttttggctgttcgagaatgtggtggccatgggagtcagcgacaagcgggatattagccggttcctggagagcaaccccgtgatgatcgatgccaaggaagtgagcgccgcccaccgggccagatacttctggggcaatctgcctggcatgaacagacccctggccagcaccgtgaacgacaagctggagctgcaggagtgcctggagcacggccggatcgccaagttcagcaaggtgagaaccatcaccacccgaagcaacagcatcaaacaaggcaaggaccagcactttcctgtgttcatgaacgagaaggaggacatcctgtggtgtaccgagatggagagagtgttcgggttcccagtccactacacagatgtcagcaacatgtctagactggccagacagagactgctgggaagaagctggtccgtccctgtgatcagacacctgttcgcccctctgaaggagtacttcgcctgcgtgagcagcggcaacagcaacgccaacagccggggccccagcttctctagcggcctggtgccactgtccctgagagggagccacatgggccccatggagatctacaaaaccgtgagcgcctggaagcggcagcctgtgcgcgtgctgagcctgtttcggaatatcgataaagtcctgaaaagcctgggattcctggagagcggctctggctccggcggtggcaccctgaagtacgtggaggatgtgacaaacgtggtcagacgggatgtggagaagtggggccccttcgatctggtgtacggcagcacccaacccctgggcagctcttgtgaccggtgccctggctggtacatgtttcagttccaccggatcctgcagtacgccctgccgagacaggagtcccagcggccattcttttggattttcatggacaacttgctgctgaccgaggatgaccaggaaactaccactcggttcctgcagaccgaagccgtgaccctgcaggacgtgagaggccgggactaccagaacgccatgcgggtgtggtccaacatccctggactgaaaagcaagcacgcacctctgacccctaaagaagaggagtacctgcaggcccaggtgcggagcagaagcaagctggacgcccctaaggtggatctgctggtgaagaattgcctcctgcccctgagagagtacttcaagtatttcagccagaatagtctgcccctgggcggcccaagcagcggcgcccctcctcccagcggcggcagcccagccggctccccaacctctaccgaggagggcacctctgagtccgccacccccgagagcggccctggcacctccaccgagcccagcgagggcagcgcacccggcagccctgccggcagccccacctccacagaggagggaaccagcaccgagcccagcgaaggcagcgccccaggcaccagcaccgagcctagtgagggcggctctggcggcggcagcgcccaggagattaaacggatcaacaagatcagaagaagacttgtgaaagacagcaacaccaagaaggccggcaagacaggccccatgaaaaccctgctggttagagtgatgacacccgatctgagagagcggctggaaaacctgagaaagaagcctgaaaatatcccccagcccatcagcaatacatctagagccaacctgaataagctgctgaccgattacaccgaaatgaagaaggcgatcctgcatgtgtactgggaagagttccagaaggaccctgtgggcctgatgagccgggtggcccagcctgccagcaagaagatcgatcagaacaagctgaaacctgagatggacgagaagggcaacctgaccaccgccggctttgcctgctctcagtgtggccagcccctgttcgtgtacaagctggagcaggtgtctgagaagggcaaggcttacaccaactacttcggacggtgcaatgtggccgagcacgaaaagctgatcctgctggcccagctgaagcccgagaaggatagcgacgaagccgtgacatatagcctgggaaagtttgggcagagggccctggatttctacagcattcatgtgaccaaggagtccacccaccccgtgaagcccctggcccagatcgccggaaacagatacgcctccggacctgtgggaaaggccctgagcgacgcatgtatgggcacaatcgcctccttcctgtctaagtaccaggacatcatcatcgaacaccagaaggtggtgaagggcaaccagaagagactggagagcctgcgggagctggccggcaaggaaaacctggaataccctagcgtgaccctgccacctcagcctcacaccaaggagggcgttgatgcctacaacgaagtgatcgcccgggtgcgaatgtgggtgaacctgaacctgtggcagaagctgaagctaagcagagatgatgccaagcctctgctgagactgaagggattcccttcctttcctctggtcgagagacaggccaacgaagtggactggtgggacatggtgtgtaacgtgaagaagctgatcaacgagaaaaaggaggatggcaaggtgttttggcagaatctggctggctacaagagacaggaagccctgagaccatacctgagcagcgaggaagatcggaagaagggaaagaaattcgctcggtaccagctgggcgacctgctgctgcacctggaaaagaagcacggcgaggactggggaaaggtgtacgacgaggcctgggagcggattgacaagaaagtggaaggcctgagcaagcacatcaagctggaagaggaacggagaagcgaggacgcccagagcaaggccgccctgaccgactggctgcgggctaaggccagcttcgtgatcgagggcctgaaggaggccgacaaggacgagttctgcagatgcgagctgaagctgcagaagtggtacggggacctgcggggaaagcccttcgccatcgaagccgagaacagcatcctggacatcagcggcttcagcaagcagtacaactgtgccttcatctggcagaaggacggcgtgaagaagctgaacctgtacctgatcatcaactacttcaagggcggcaagctgcggttcaagaagatcaaacctgaagccttcgaagccaacagattctacaccgtgatcaacaaaaagagcggcgagatcgtgcccatggaggtgaacttcaacttcgacgaccccaacctgatcatcctgcctctggcctttggcaagagacagggcagagaattcatctggaacgacctgctgtccctggaaaccggcagcctgaagctggccaacggaagagtgatcgagaagacactgtacaacagaagaacccggcaggatgagcctgccctgttcgtggccctgaccttcgagcggcgggaggtcctggactcctccaatatcaaaccaatgaacctgatcggcgtggcaagaggcgaaaacatccccgccgtgatcgccctgaccgaccccgagggctgcccactgagccggtttaaggatagcctgggaaacccaacccacatcctgagaatcggcgagagctataaggagaagcagcggaccatccaggccaagaaggaggtggagcagcggagagccggcggctacagccggaagtacgccagcaaagccaagaatctggcagacgatatggtgagaaacaccgctagagatctgctgtactacgccgtgacccaggatgccatgctgatcttcgccaacctgagccggggcttcggccggcagggcaagcggaccttcatggccgagagacagtacacacggatggaggactggctgaccgccaagctggcctacgagggcctgagcaagacctacctgtccaagacactggcccagtacacctccaagacatgcagcaactgtgggtttaccatcaccagcgccgactacgacagggtgctggagaagctgaagaagacagcaacaggctggatgaccacaattaacggcaaggagctgaaggtggagggccagattacctactacaacagatacaagagacagaacgtagtcaaggacctgtccgtcgagctggatagactgagcgaagaatctgtgaacaacgacatctcctcctggacaaagggcagaagcggagaagctctgagcctcctgaagaaaagattctcccatagacccgtgcaggagaagttcgtgtgcctgaactgcggcttcgagacacacgcagccgagcaagccgccctgaacatcgccagatcctggctgttcctgcggagccaggagtacaagaaataccagacaaacaagacaaccggcaacaccgataagagagccttcgtcgagacctggcagtccttttaccggaagaagcttaaggaggtgtggaaacctgccgtgcggtctggcggatctggcggaggctccacaagcatggacaccgtggccctggaggacgtggccgtgaacttcacccaggaggagtgggccctgctgggccccagccagaagaagctgtacagggacgtgatgcaggagaccatcaggaacctggactgcatcaagatgatcagcgaggaccagaacatcgaggaccagtacaagaaccccaagaagaacctgaggtgcaggatggccgagaggctgagcgagagcaaggacaacagccagtgcggcaccagccccaagaaaaagagaaaagtctaagctgccttctgcggggcttgccttctggccatgcccttcttctctcccttgcacctgtacctcttggtctttgaataaagcctgagtaggaaggctagcaaaaaaaaaaaaaaaaaaaaaaaaaaaaaaaaaaaaaaaaaaaaaaaaaaaaaaaaaaaaaaaaaaaaaaaaaaaaaaaa

SEQ ID NO: 7142 - RNA, 5797 nt, synthetic construct
  source 1..5797: mol_type = other RNA
aggaaataagagagaaaagaagagtaagaagaaatataagagccaccatggcccctaagaagaagcgtaaagtgagccggatggaacgcctcgtctacgaggtgcggcagaagtgcagaaacatcgaggacatctgcatctcctgcggatctctgaacgtgaccctggagcacccactgttcatcggcggcatgtgccagaactgtaaaaactgttttctggagtgtgcctatcaatacgacgatgacggctaccagagctactgcaccatctgttgcggcggaagagaggtgctgatgtgtggaaataacaactgctgccggtgcttctgcgtggaatgcgtggacctgctggtgggccccggcgccgcccaggccgctattaaggaagatccttggaactgctacatgtgcggccacaagggcacatacggcctgctgagacggagagaggactggcctagcagactgcagatgttcttcgccaataaccacgaccaggagttcgacccccctaaggtgtaccctcccgtccccgccgagaagagaaagcccatccgggtcctgagcctgttcgatggcatcgccaccggtctgctggtgctgaaggacctgggcatccaggtggataggtacattgcctccgaggtgtgcgaggactccatcaccgtgggaatggtgcgtcatcagggcaagatcatgtacgtgggcgacgtgcggagcgtgacacagaagcatatccaggagtggggccctttcgacctggtgatcggcggcagcccttgcaatgacctgagcatcgtgaacccagcccggaagggcctgtacgagggaaccggcagactgttcttcgagttttacagactgctgcacgacgcccggcctaaggaaggcgacgaccggcccttcttttggctgttcgagaatgtggtggccatgggagtcagcgacaagcgggatattagccggttcctggagagcaaccccgtgatgatcgatgccaaggaagtgagcgccgcccaccgggccagatacttctggggcaatctgcctggcatgaacagacccctggccagcaccgtgaacgacaagctggagctgcaggagtgcctggagcacggccggatcgccaagttcagcaaggtgagaaccatcaccacccgaagcaacagcatcaaacaaggcaaggaccagcactttcctgtgttcatgaacgagaaggaggacatcctgtggtgtaccgagatggagagagtgttcgggttcccagtccactacacagatgtcagcaacatgtctagactggccagacagagactgctgggaagaagctggtccgtccctgtgatcagacacctgttcgcccctctgaaggagtacttcgcctgcgtgagcagcggcaacagcaacgccaacagccggggccccagcttctctagcggcctggtgccactgtccctgagagggagccacatgggccccatggagatctacaaaaccgtgagcgcctggaagcggcagcctgtgcgcgtgctgagcctgtttcggaatatcgataaagtcctgaaaagcctgggattcctggagagcggctctggctccggcggtggcaccctgaagtacgtggaggatgtgacaaacgtggtcagacgggatgtggagaagtggggccccttcgatctggtgtacggcagcacccaacccctgggcagctcttgtgaccggtgccctggctggtacatgtttcagttccaccggatcctgcagtacgccctgccgagacaggagtcccagcggccattcttttggattttcatggacaacttgctgctgaccgaggatgaccaggaaactaccactcggttcctgcagaccgaagccgtgaccctgcaggacgtgagaggccgggactaccagaacgccatgcgggtgtggtccaacatccctggactgaaaagcaagcacgcacctctgacccctaaagaagaggagtacctgcaggcccaggtgcggagcagaagcaagctggacgcccctaaggtggatctgctggtgaagaattgcctcctgcccctgagagagtacttcaagtatttcagccagaatagtctgcccctgggcggcccaagcagcggcgcccctcctcccagcggcggcagcccagccggctccccaacctctaccgaggagggcacctctgagtccgccacccccgagagcggccctggcacctccaccgagcccagcgagggcagcgcacccggcagccctgccggcagccccacctccacagaggagggaaccagcaccgagcccagcgaaggcagcgccccaggcaccagcaccgagcctagtgagggcggctctggcggcggcagcgcccaggagattaaacggatcaacaagatcagaagaagacttgtgaaagacagcaacaccaagaaggccggcaagacaggccccatgaaaaccctgctggttagagtgatgacacccgatctgagagagcggctggaaaacctgagaaagaagcctgaaaatatcccccagcccatcagcaatacatctagagccaacctgaataagctgctgaccgattacaccgaaatgaagaaggcgatcctgcatgtgtactgggaagagttccagaaggaccctgtgggcctgatgagccgggtggcccagcctgccagcaagaagatcgatcagaacaagctgaaacctgagatggacgagaagggcaacctgaccaccgccggctttgcctgctctcagtgtggccagcccctgttcgtgtacaagctggagcaggtgtctgagaagggcaaggcttacaccaactacttcggacggtgcaatgtggccgagcacgaaaagctgatcctgctggcccagctgaagcccgagaaggatagcgacgaagccgtgacatatagcctgggaaagtttgggcagagggccctggatttctacagcattcatgtgaccaaggagtccacccaccccgtgaagcccctggcccagatcgccggaaacagatacgcctccggacctgtgggaaaggccctgagcgacgcatgtatgggcacaatcgcctccttcctgtctaagtaccaggacatcatcatcgaacaccagaaggtggtgaagggcaaccagaagagactggagagcctgcgggagctggccggcaaggaaaacctggaataccctagcgtgaccctgccacctcagcctcacaccaaggagggcgttgatgcctacaacgaagtgatcgcccgggtgcgaatgtgggtgaacctgaacctgtggcagaagctgaagctaagcagagatgatgccaagcctctgctgagactgaagggattcccttcctttcctctggtcgagagacaggccaacgaagtggactggtgggacatggtgtgtaacgtgaagaagctgatcaacgagaaaaaggaggatggcaaggtgttttggcagaatctggctggctacaagagacaggaagccctgagaccatacctgagcagcgaggaagatcggaagaagggaaagaaattcgctcggtaccagctgggcgacctgctgctgcacctggaaaagaagcacggcgaggactggggaaaggtgtacgacgaggcctgggagcggattgacaagaaagtggaaggcctgagcaagcacatcaagctggaagaggaacggagaagcgaggacgcccagagcaaggccgccctgaccgactggctgcgggctaaggccagcttcgtgatcgagggcctgaaggaggccgacaaggacgagttctgcagatgcgagctgaagctgcagaagtggtacggggacctgcggggaaagcccttcgccatcgaagccgagaacagcatcctggacatcagcggcttcagcaagcagtacaactgtgccttcatctggcagaaggacggcgtgaagaagctgaacctgtacctgatcatcaactacttcaagggcggcaagctgcggttcaagaagatcaaacctgaagccttcgaagccaacagattctacaccgtgatcaacaaaaagagcggcgagatcgtgcccatggaggtgaacttcaacttcgacgaccccaacctgatcatcctgcctctggcctttggcaagagacagggcagagaattcatctggaacgacctgctgtccctggaaaccggcagcctgaagctggccaacggaagagtgatcgagaagacactgtacaacagaagaacccggcaggatgagcctgccctgttcgtggccctgaccttcgagcggcgggaggtcctggactcctccaatatcaaaccaatgaacctgatcggcgtggcaagaggcgaaaacatccccgccgtgatcgccctgaccgaccccgagggctgcccactgagccggtttaaggatagcctgggaaacccaacccacatcctgagaatcggcgagagctataaggagaagcagcggaccatccaggccaagaaggaggtggagcagcggagagccggcggctacagccggaagtacgccagcaaagccaagaatctggcagacgatatggtgagaaacaccgctagagatctgctgtactacgccgtgacccaggatgccatgctgatcttcgccaacctgagccggggcttcggccggcagggcaagcggaccttcatggccgagagacagtacacacggatggaggactggctgaccgccaagctggcctacgagggcctgagcaagacctacctgtccaagacactggcccagtacacctccaagacatgcagcaactgtgggtttaccatcaccagcgccgactacgacagggtgctggagaagctgaagaagacagcaacaggctggatgaccacaattaacggcaaggagctgaaggtggagggccagattacctactacaacagatacaagagacagaacgtagtcaaggacctgtccgtcgagctggatagactgagcgaagaatctgtgaacaacgacatctcctcctggacaaagggcagaagcggagaagctctgagcctcctgaagaaaagattctcccatagacccgtgcaggagaagttcgtgtgcctgaactgcggcttcgagacacacgcagccgagcaagccgccctgaacatcgccagatcctggctgttcctgcggagccaggagtacaagaaataccagacaaacaagacaaccggcaacaccgataagagagccttcgtcgagacctggcagtccttttaccggaagaagcttaaggaggtgtggaaacctgccgtgcggtctggcggatctggcggaggctccacaagcgcccaggtgtgcgtgaccttcgacgacgtggccgtgaccttcacccaggaggagtggggccacctggaccccgcccagaggaccctgtaccaggaggtgatgctggagacctgcggcctgctgatgagcctgggctgccccgtgcccaggcccgagctgatctaccagctggagcacggccaggagctgtggaccgtgaagagggacctgagcggcagcacctgccccgtggacaagggcaagaccagccccaagaaaaagagaaaagtctaagctgccttctgcggggcttgccttctggccatgcccttcttctctcccttgcacctgtacctcttggtctttgaataaagcctgagtaggaaggctagcaaaaaaaaaaaaaaaaaaaaaaaaaaaaaaaaaaaaaaaaaaaaaaaaaaaaaaaaaaaaaaaaaaaaaaaaaaaaaaaa

SEQ ID NO: 7143 - RNA, 5806 nt, synthetic construct
  source 1..5806: mol_type = other RNA
aggaaataagagagaaaagaagagtaagaagaaatataagagccaccatggcccctaagaagaagcgtaaagtgagccggatggaacgcctcgtctacgaggtgcggcagaagtgcagaaacatcgaggacatctgcatctcctgcggatctctgaacgtgaccctggagcacccactgttcatcggcggcatgtgccagaactgtaaaaactgttttctggagtgtgcctatcaatacgacgatgacggctaccagagctactgcaccatctgttgcggcggaagagaggtgctgatgtgtggaaataacaactgctgccggtgcttctgcgtggaatgcgtggacctgctggtgggccccggcgccgcccaggccgctattaaggaagatccttggaactgctacatgtgcggccacaagggcacatacggcctgctgagacggagagaggactggcctagcagactgcagatgttcttcgccaataaccacgaccaggagttcgacccccctaaggtgtaccctcccgtccccgccgagaagagaaagcccatccgggtcctgagcctgttcgatggcatcgccaccggtctgctggtgctgaaggacctgggcatccaggtggataggtacattgcctccgaggtgtgcgaggactccatcaccgtgggaatggtgcgtcatcagggcaagatcatgtacgtgggcgacgtgcggagcgtgacacagaagcatatccaggagtggggccctttcgacctggtgatcggcggcagcccttgcaatgacctgagcatcgtgaacccagcccggaagggcctgtacgagggaaccggcagactgttcttcgagttttacagactgctgcacgacgcccggcctaaggaaggcgacgaccggcccttcttttggctgttcgagaatgtggtggccatgggagtcagcgacaagcgggatattagccggttcctggagagcaaccccgtgatgatcgatgccaaggaagtgagcgccgcccaccgggccagatacttctggggcaatctgcctggcatgaacagacccctggccagcaccgtgaacgacaagctggagctgcaggagtgcctggagcacggccggatcgccaagttcagcaaggtgagaaccatcaccacccgaagcaacagcatcaaacaaggcaaggaccagcactttcctgtgttcatgaacgagaaggaggacatcctgtggtgtaccgagatggagagagtgttcgggttcccagtccactacacagatgtcagcaacatgtctagactggccagacagagactgctgggaagaagctggtccgtccctgtgatcagacacctgttcgcccctctgaaggagtacttcgcctgcgtgagcagcggcaacagcaacgccaacagccggggccccagcttctctagcggcctggtgccactgtccctgagagggagccacatgggccccatggagatctacaaaaccgtgagcgcctggaagcggcagcctgtgcgcgtgctgagcctgtttcggaatatcgataaagtcctgaaaagcctgggattcctggagagcggctctggctccggcggtggcaccctgaagtacgtggaggatgtgacaaacgtggtcagacgggatgtggagaagtggggccccttcgatctggtgtacggcagcacccaacccctgggcagctcttgtgaccggtgccctggctggtacatgtttcagttccaccggatcctgcagtacgccctgccgagacaggagtcccagcggccattcttttggattttcatggacaacttgctgctgaccgaggatgaccaggaaactaccactcggttcctgcagaccgaagccgtgaccctgcaggacgtgagaggccgggactaccagaacgccatgcgggtgtggtccaacatccctggactgaaaagcaagcacgcacctctgacccctaaagaagaggagtacctgcaggcccaggtgcggagcagaagcaagctggacgcccctaaggtggatctgctggtgaagaattgcctcctgcccctgagagagtacttcaagtatttcagccagaatagtctgcccctgggcggcccaagcagcggcgcccctcctcccagcggcggcagcccagccggctccccaacctctaccgaggagggcacctctgagtccgccacccccgagagcggccctggcacctccaccgagcccagcgagggcagcgcacccggcagccctgccggcagccccacctccacagaggagggaaccagcaccgagcccagcgaaggcagcgccccaggcaccagcaccgagcctagtgagggcggctctggcggcggcagcgcccaggagattaaacggatcaacaagatcagaagaagacttgtgaaagacagcaacaccaagaaggccggcaagacaggccccatgaaaaccctgctggttagagtgatgacacccgatctgagagagcggctggaaaacctgagaaagaagcctgaaaatatcccccagcccatcagcaatacatctagagccaacctgaataagctgctgaccgattacaccgaaatgaagaaggcgatcctgcatgtgtactgggaagagttccagaaggaccctgtgggcctgatgagccgggtggcccagcctgccagcaagaagatcgatcagaacaagctgaaacctgagatggacgagaagggcaacctgaccaccgccggctttgcctgctctcagtgtggccagcccctgttcgtgtacaagctggagcaggtgtctgagaagggcaaggcttacaccaactacttcggacggtgcaatgtggccgagcacgaaaagctgatcctgctggcccagctgaagcccgagaaggatagcgacgaagccgtgacatatagcctgggaaagtttgggcagagggccctggatttctacagcattcatgtgaccaaggagtccacccaccccgtgaagcccctggcccagatcgccggaaacagatacgcctccggacctgtgggaaaggccctgagcgacgcatgtatgggcacaatcgcctccttcctgtctaagtaccaggacatcatcatcgaacaccagaaggtggtgaagggcaaccagaagagactggagagcctgcgggagctggccggcaaggaaaacctggaataccctagcgtgaccctgccacctcagcctcacaccaaggagggcgttgatgcctacaacgaagtgatcgcccgggtgcgaatgtgggtgaacctgaacctgtggcagaagctgaagctaagcagagatgatgccaagcctctgctgagactgaagggattcccttcctttcctctggtcgagagacaggccaacgaagtggactggtgggacatggtgtgtaacgtgaagaagctgatcaacgagaaaaaggaggatggcaaggtgttttggcagaatctggctggctacaagagacaggaagccctgagaccatacctgagcagcgaggaagatcggaagaagggaaagaaattcgctcggtaccagctgggcgacctgctgctgcacctggaaaagaagcacggcgaggactggggaaaggtgtacgacgaggcctgggagcggattgacaagaaagtggaaggcctgagcaagcacatcaagctggaagaggaacggagaagcgaggacgcccagagcaaggccgccctgaccgactggctgcgggctaaggccagcttcgtgatcgagggcctgaaggaggccgacaaggacgagttctgcagatgcgagctgaagctgcagaagtggtacggggacctgcggggaaagcccttcgccatcgaagccgagaacagcatcctggacatcagcggcttcagcaagcagtacaactgtgccttcatctggcagaaggacggcgtgaagaagctgaacctgtacctgatcatcaactacttcaagggcggcaagctgcggttcaagaagatcaaacctgaagccttcgaagccaacagattctacaccgtgatcaacaaaaagagcggcgagatcgtgcccatggaggtgaacttcaacttcgacgaccccaacctgatcatcctgcctctggcctttggcaagagacagggcagagaattcatctggaacgacctgctgtccctggaaaccggcagcctgaagctggccaacggaagagtgatcgagaagacactgtacaacagaagaacccggcaggatgagcctgccctgttcgtggccctgaccttcgagcggcgggaggtcctggactcctccaatatcaaaccaatgaacctgatcggcgtggcaagaggcgaaaacatccccgccgtgatcgccctgaccgaccccgagggctgcccactgagccggtttaaggatagcctgggaaacccaacccacatcctgagaatcggcgagagctataaggagaagcagcggaccatccaggccaagaaggaggtggagcagcggagagccggcggctacagccggaagtacgccagcaaagccaagaatctggcagacgatatggtgagaaacaccgctagagatctgctgtactacgccgtgacccaggatgccatgctgatcttcgccaacctgagccggggcttcggccggcagggcaagcggaccttcatggccgagagacagtacacacggatggaggactggctgaccgccaagctggcctacgagggcctgagcaagacctacctgtccaagacactggcccagtacacctccaagacatgcagcaactgtgggtttaccatcaccagcgccgactacgacagggtgctggagaagctgaagaagacagcaacaggctggatgaccacaattaacggcaaggagctgaaggtggagggccagattacctactacaacagatacaagagacagaacgtagtcaaggacctgtccgtcgagctggatagactgagcgaagaatctgtgaacaacgacatctcctcctggacaaagggcagaagcggagaagctctgagcctcctgaagaaaagattctcccatagacccgtgcaggagaagttcgtgtgcctgaactgcggcttcgagacacacgcagccgagcaagccgccctgaacatcgccagatcctggctgttcctgcggagccaggagtacaagaaataccagacaaacaagacaaccggcaacaccgataagagagccttcgtcgagacctggcagtccttttaccggaagaagcttaaggaggtgtggaaacctgccgtgcggtctggcggatctggcggaggctccacaagcgtgagcttcgaggacgtggccgtgcacttcacccaggaggagtgggccctgctggaccccagccagaagagcctgtacagggacgtgatgctggagacctgcaggaacctggccgccatcggctacatctgggaggagcagaccatcgaggacgactgcaagaacttcggcaggtaccagaggcacaccatcagccacagcgagtacaccccctacgagcacgaggagtgcggcaacatgccctgcgaccccaccagccccaagaaaaagagaaaagtctaagctgccttctgcggggcttgccttctggccatgcccttcttctctcccttgcacctgtacctcttggtctttgaataaagcctgagtaggaaggctagcaaaaaaaaaaaaaaaaaaaaaaaaaaaaaaaaaaaaaaaaaaaaaaaaaaaaaaaaaaaaaaaaaaaaaaaaaaaaaaaa

SEQ ID NO: 7144 - RNA, 5797 nt, synthetic construct
  source 1..5797: mol_type = other RNA
aggaaataagagagaaaagaagagtaagaagaaatataagagccaccatggcccctaagaagaagcgtaaagtgagccggatggaacgcctcgtctacgaggtgcggcagaagtgcagaaacatcgaggacatctgcatctcctgcggatctctgaacgtgaccctggagcacccactgttcatcggcggcatgtgccagaactgtaaaaactgttttctggagtgtgcctatcaatacgacgatgacggctaccagagctactgcaccatctgttgcggcggaagagaggtgctgatgtgtggaaataacaactgctgccggtgcttctgcgtggaatgcgtggacctgctggtgggccccggcgccgcccaggccgctattaaggaagatccttggaactgctacatgtgcggccacaagggcacatacggcctgctgagacggagagaggactggcctagcagactgcagatgttcttcgccaataaccacgaccaggagttcgacccccctaaggtgtaccctcccgtccccgccgagaagagaaagcccatccgggtcctgagcctgttcgatggcatcgccaccggtctgctggtgctgaaggacctgggcatccaggtggataggtacattgcctccgaggtgtgcgaggactccatcaccgtgggaatggtgcgtcatcagggcaagatcatgtacgtgggcgacgtgcggagcgtgacacagaagcatatccaggagtggggccctttcgacctggtgatcggcggcagcccttgcaatgacctgagcatcgtgaacccagcccggaagggcctgtacgagggaaccggcagactgttcttcgagttttacagactgctgcacgacgcccggcctaaggaaggcgacgaccggcccttcttttggctgttcgagaatgtggtggccatgggagtcagcgacaagcgggatattagccggttcctggagagcaaccccgtgatgatcgatgccaaggaagtgagcgccgcccaccgggccagatacttctggggcaatctgcctggcatgaacagacccctggccagcaccgtgaacgacaagctggagctgcaggagtgcctggagcacggccggatcgccaagttcagcaaggtgagaaccatcaccacccgaagcaacagcatcaaacaaggcaaggaccagcactttcctgtgttcatgaacgagaaggaggacatcctgtggtgtaccgagatggagagagtgttcgggttcccagtccactacacagatgtcagcaacatgtctagactggccagacagagactgctgggaagaagctggtccgtccctgtgatcagacacctgttcgcccctctgaaggagtacttcgcctgcgtgagcagcggcaacagcaacgccaacagccggggccccagcttctctagcggcctggtgccactgtccctgagagggagccacatgggccccatggagatctacaaaaccgtgagcgcctggaagcggcagcctgtgcgcgtgctgagcctgtttcggaatatcgataaagtcctgaaaagcctgggattcctggagagcggctctggctccggcggtggcaccctgaagtacgtggaggatgtgacaaacgtggtcagacgggatgtggagaagtggggccccttcgatctggtgtacggcagcacccaacccctgggcagctcttgtgaccggtgccctggctggtacatgtttcagttccaccggatcctgcagtacgccctgccgagacaggagtcccagcggccattcttttggattttcatggacaacttgctgctgaccgaggatgaccaggaaactaccactcggttcctgcagaccgaagccgtgaccctgcaggacgtgagaggccgggactaccagaacgccatgcgggtgtggtccaacatccctggactgaaaagcaagcacgcacctctgacccctaaagaagaggagtacctgcaggcccaggtgcggagcagaagcaagctggacgcccctaaggtggatctgctggtgaagaattgcctcctgcccctgagagagtacttcaagtatttcagccagaatagtctgcccctgggcggcccaagcagcggcgcccctcctcccagcggcggcagcccagccggctccccaacctctaccgaggagggcacctctgagtccgccacccccgagagcggccctggcacctccaccgagcccagcgagggcagcgcacccggcagccctgccggcagccccacctccacagaggagggaaccagcaccgagcccagcgaaggcagcgccccaggcaccagcaccgagcctagtgagggcggctctggcggcggcagcgcccaggagattaaacggatcaacaagatcagaagaagacttgtgaaagacagcaacaccaagaaggccggcaagacaggccccatgaaaaccctgctggttagagtgatgacacccgatctgagagagcggctggaaaacctgagaaagaagcctgaaaatatcccccagcccatcagcaatacatctagagccaacctgaataagctgctgaccgattacaccgaaatgaagaaggcgatcctgcatgtgtactgggaagagttccagaaggaccctgtgggcctgatgagccgggtggcccagcctgccagcaagaagatcgatcagaacaagctgaaacctgagatggacgagaagggcaacctgaccaccgccggctttgcctgctctcagtgtggccagcccctgttcgtgtacaagctggagcaggtgtctgagaagggcaaggcttacaccaactacttcggacggtgcaatgtggccgagcacgaaaagctgatcctgctggcccagctgaagcccgagaaggatagcgacgaagccgtgacatatagcctgggaaagtttgggcagagggccctggatttctacagcattcatgtgaccaaggagtccacccaccccgtgaagcccctggcccagatcgccggaaacagatacgcctccggacctgtgggaaaggccctgagcgacgcatgtatgggcacaatcgcctccttcctgtctaagtaccaggacatcatcatcgaacaccagaaggtggtgaagggcaaccagaagagactggagagcctgcgggagctggccggcaaggaaaacctggaataccctagcgtgaccctgccacctcagcctcacaccaaggagggcgttgatgcctacaacgaagtgatcgcccgggtgcgaatgtgggtgaacctgaacctgtggcagaagctgaagctaagcagagatgatgccaagcctctgctgagactgaagggattcccttcctttcctctggtcgagagacaggccaacgaagtggactggtgggacatggtgtgtaacgtgaagaagctgatcaacgagaaaaaggaggatggcaaggtgttttggcagaatctggctggctacaagagacaggaagccctgagaccatacctgagcagcgaggaagatcggaagaagggaaagaaattcgctcggtaccagctgggcgacctgctgctgcacctggaaaagaagcacggcgaggactggggaaaggtgtacgacgaggcctgggagcggattgacaagaaagtggaaggcctgagcaagcacatcaagctggaagaggaacggagaagcgaggacgcccagagcaaggccgccctgaccgactggctgcgggctaaggccagcttcgtgatcgagggcctgaaggaggccgacaaggacgagttctgcagatgcgagctgaagctgcagaagtggtacggggacctgcggggaaagcccttcgccatcgaagccgagaacagcatcctggacatcagcggcttcagcaagcagtacaactgtgccttcatctggcagaaggacggcgtgaagaagctgaacctgtacctgatcatcaactacttcaagggcggcaagctgcggttcaagaagatcaaacctgaagccttcgaagccaacagattctacaccgtgatcaacaaaaagagcggcgagatcgtgcccatggaggtgaacttcaacttcgacgaccccaacctgatcatcctgcctctggcctttggcaagagacagggcagagaattcatctggaacgacctgctgtccctggaaaccggcagcctgaagctggccaacggaagagtgatcgagaagacactgtacaacagaagaacccggcaggatgagcctgccctgttcgtggccctgaccttcgagcggcgggaggtcctggactcctccaatatcaaaccaatgaacctgatcggcgtggcaagaggcgaaaacatccccgccgtgatcgccctgaccgaccccgagggctgcccactgagccggtttaaggatagcctgggaaacccaacccacatcctgagaatcggcgagagctataaggagaagcagcggaccatccaggccaagaaggaggtggagcagcggagagccggcggctacagccggaagtacgccagcaaagccaagaatctggcagacgatatggtgagaaacaccgctagagatctgctgtactacgccgtgacccaggatgccatgctgatcttcgccaacctgagccggggcttcggccggcagggcaagcggaccttcatggccgagagacagtacacacggatggaggactggctgaccgccaagctggcctacgagggcctgagcaagacctacctgtccaagacactggcccagtacacctccaagacatgcagcaactgtgggtttaccatcaccagcgccgactacgacagggtgctggagaagctgaagaagacagcaacaggctggatgaccacaattaacggcaaggagctgaaggtggagggccagattacctactacaacagatacaagagacagaacgtagtcaaggacctgtccgtcgagctggatagactgagcgaagaatctgtgaacaacgacatctcctcctggacaaagggcagaagcggagaagctctgagcctcctgaagaaaagattctcccatagacccgtgcaggagaagttcgtgtgcctgaactgcggcttcgagacacacgcagccgagcaagccgccctgaacatcgccagatcctggctgttcctgcggagccaggagtacaagaaataccagacaaacaagacaaccggcaacaccgataagagagccttcgtcgagacctggcagtccttttaccggaagaagcttaaggaggtgtggaaacctgccgtgcggtctggcggatctggcggaggctccacaagcgccgaggagctggtgaccttcgaggacgtggccgtgcacttcagccccgaggagctgccctacctgagcgccagccagaggaacctgtacagggaggtgatgctggagaactacaggaacctggtgagcctgggctaccagttccccaagcccgacatcatcagccagctggaggaggaggagagccacgccagggaggaggacggcagcaccgtgacctgccaggactgggaggagcagagcaccagccccaagaaaaagagaaaagtctaagctgccttctgcggggcttgccttctggccatgcccttcttctctcccttgcacctgtacctcttggtctttgaataaagcctgagtaggaaggctagcaaaaaaaaaaaaaaaaaaaaaaaaaaaaaaaaaaaaaaaaaaaaaaaaaaaaaaaaaaaaaaaaaaaaaaaaaaaaaaaa

SEQ ID NO: 7145 - RNA, 5794 nt, synthetic construct
  source 1..5794: mol_type = other RNA
aggaaataagagagaaaagaagagtaagaagaaatataagagccaccatggcccctaagaagaagcgtaaagtgagccggatggaacgcctcgtctacgaggtgcggcagaagtgcagaaacatcgaggacatctgcatctcctgcggatctctgaacgtgaccctggagcacccactgttcatcggcggcatgtgccagaactgtaaaaactgttttctggagtgtgcctatcaatacgacgatgacggctaccagagctactgcaccatctgttgcggcggaagagaggtgctgatgtgtggaaataacaactgctgccggtgcttctgcgtggaatgcgtggacctgctggtgggccccggcgccgcccaggccgctattaaggaagatccttggaactgctacatgtgcggccacaagggcacatacggcctgctgagacggagagaggactggcctagcagactgcagatgttcttcgccaataaccacgaccaggagttcgacccccctaaggtgtaccctcccgtccccgccgagaagagaaagcccatccgggtcctgagcctgttcgatggcatcgccaccggtctgctggtgctgaaggacctgggcatccaggtggataggtacattgcctccgaggtgtgcgaggactccatcaccgtgggaatggtgcgtcatcagggcaagatcatgtacgtgggcgacgtgcggagcgtgacacagaagcatatccaggagtggggccctttcgacctggtgatcggcggcagcccttgcaatgacctgagcatcgtgaacccagcccggaagggcctgtacgagggaaccggcagactgttcttcgagttttacagactgctgcacgacgcccggcctaaggaaggcgacgaccggcccttcttttggctgttcgagaatgtggtggccatgggagtcagcgacaagcgggatattagccggttcctggagagcaaccccgtgatgatcgatgccaaggaagtgagcgccgcccaccgggccagatacttctggggcaatctgcctggcatgaacagacccctggccagcaccgtgaacgacaagctggagctgcaggagtgcctggagcacggccggatcgccaagttcagcaaggtgagaaccatcaccacccgaagcaacagcatcaaacaaggcaaggaccagcactttcctgtgttcatgaacgagaaggaggacatcctgtggtgtaccgagatggagagagtgttcgggttcccagtccactacacagatgtcagcaacatgtctagactggccagacagagactgctgggaagaagctggtccgtccctgtgatcagacacctgttcgcccctctgaaggagtacttcgcctgcgtgagcagcggcaacagcaacgccaacagccggggccccagcttctctagcggcctggtgccactgtccctgagagggagccacatgggccccatggagatctacaaaaccgtgagcgcctggaagcggcagcctgtgcgcgtgctgagcctgtttcggaatatcgataaagtcctgaaaagcctgggattcctggagagcggctctggctccggcggtggcaccctgaagtacgtggaggatgtgacaaacgtggtcagacgggatgtggagaagtggggccccttcgatctggtgtacggcagcacccaacccctgggcagctcttgtgaccggtgccctggctggtacatgtttcagttccaccggatcctgcagtacgccctgccgagacaggagtcccagcggccattcttttggattttcatggacaacttgctgctgaccgaggatgaccaggaaactaccactcggttcctgcagaccgaagccgtgaccctgcaggacgtgagaggccgggactaccagaacgccatgcgggtgtggtccaacatccctggactgaaaagcaagcacgcacctctgacccctaaagaagaggagtacctgcaggcccaggtgcggagcagaagcaagctggacgcccctaaggtggatctgctggtgaagaattgcctcctgcccctgagagagtacttcaagtatttcagccagaatagtctgcccctgggcggcccaagcagcggcgcccctcctcccagcggcggcagcccagccggctccccaacctctaccgaggagggcacctctgagtccgccacccccgagagcggccctggcacctccaccgagcccagcgagggcagcgcacccggcagccctgccggcagccccacctccacagaggagggaaccagcaccgagcccagcgaaggcagcgccccaggcaccagcaccgagcctagtgagggcggctctggcggcggcagcgcccaggagattaaacggatcaacaagatcagaagaagacttgtgaaagacagcaacaccaagaaggccggcaagacaggccccatgaaaaccctgctggttagagtgatgacacccgatctgagagagcggctggaaaacctgagaaagaagcctgaaaatatcccccagcccatcagcaatacatctagagccaacctgaataagctgctgaccgattacaccgaaatgaagaaggcgatcctgcatgtgtactgggaagagttccagaaggaccctgtgggcctgatgagccgggtggcccagcctgccagcaagaagatcgatcagaacaagctgaaacctgagatggacgagaagggcaacctgaccaccgccggctttgcctgctctcagtgtggccagcccctgttcgtgtacaagctggagcaggtgtctgagaagggcaaggcttacaccaactacttcggacggtgcaatgtggccgagcacgaaaagctgatcctgctggcccagctgaagcccgagaaggatagcgacgaagccgtgacatatagcctgggaaagtttgggcagagggccctggatttctacagcattcatgtgaccaaggagtccacccaccccgtgaagcccctggcccagatcgccggaaacagatacgcctccggacctgtgggaaaggccctgagcgacgcatgtatgggcacaatcgcctccttcctgtctaagtaccaggacatcatcatcgaacaccagaaggtggtgaagggcaaccagaagagactggagagcctgcgggagctggccggcaaggaaaacctggaataccctagcgtgaccctgccacctcagcctcacaccaaggagggcgttgatgcctacaacgaagtgatcgcccgggtgcgaatgtgggtgaacctgaacctgtggcagaagctgaagctaagcagagatgatgccaagcctctgctgagactgaagggattcccttcctttcctctggtcgagagacaggccaacgaagtggactggtgggacatggtgtgtaacgtgaagaagctgatcaacgagaaaaaggaggatggcaaggtgttttggcagaatctggctggctacaagagacaggaagccctgagaccatacctgagcagcgaggaagatcggaagaagggaaagaaattcgctcggtaccagctgggcgacctgctgctgcacctggaaaagaagcacggcgaggactggggaaaggtgtacgacgaggcctgggagcggattgacaagaaagtggaaggcctgagcaagcacatcaagctggaagaggaacggagaagcgaggacgcccagagcaaggccgccctgaccgactggctgcgggctaaggccagcttcgtgatcgagggcctgaaggaggccgacaaggacgagttctgcagatgcgagctgaagctgcagaagtggtacggggacctgcggggaaagcccttcgccatcgaagccgagaacagcatcctggacatcagcggcttcagcaagcagtacaactgtgccttcatctggcagaaggacggcgtgaagaagctgaacctgtacctgatcatcaactacttcaagggcggcaagctgcggttcaagaagatcaaacctgaagccttcgaagccaacagattctacaccgtgatcaacaaaaagagcggcgagatcgtgcccatggaggtgaacttcaacttcgacgaccccaacctgatcatcctgcctctggcctttggcaagagacagggcagagaattcatctggaacgacctgctgtccctggaaaccggcagcctgaagctggccaacggaagagtgatcgagaagacactgtacaacagaagaacccggcaggatgagcctgccctgttcgtggccctgaccttcgagcggcgggaggtcctggactcctccaatatcaaaccaatgaacctgatcggcgtggcaagaggcgaaaacatccccgccgtgatcgccctgaccgaccccgagggctgcccactgagccggtttaaggatagcctgggaaacccaacccacatcctgagaatcggcgagagctataaggagaagcagcggaccatccaggccaagaaggaggtggagcagcggagagccggcggctacagccggaagtacgccagcaaagccaagaatctggcagacgatatggtgagaaacaccgctagagatctgctgtactacgccgtgacccaggatgccatgctgatcttcgccaacctgagccggggcttcggccggcagggcaagcggaccttcatggccgagagacagtacacacggatggaggactggctgaccgccaagctggcctacgagggcctgagcaagacctacctgtccaagacactggcccagtacacctccaagacatgcagcaactgtgggtttaccatcaccagcgccgactacgacagggtgctggagaagctgaagaagacagcaacaggctggatgaccacaattaacggcaaggagctgaaggtggagggccagattacctactacaacagatacaagagacagaacgtagtcaaggacctgtccgtcgagctggatagactgagcgaagaatctgtgaacaacgacatctcctcctggacaaagggcagaagcggagaagctctgagcctcctgaagaaaagattctcccatagacccgtgcaggagaagttcgtgtgcctgaactgcggcttcgagacacacgcagccgagcaagccgccctgaacatcgccagatcctggctgttcctgcggagccaggagtacaagaaataccagacaaacaagacaaccggcaacaccgataagagagccttcgtcgagacctggcagtccttttaccggaagaagcttaaggaggtgtggaaacctgccgtgcggtctggcggatctggcggaggctccacaagcgacaccgtggtgttcgaggacgtggtggtggacttcaccctggaggagtgggccctgctgaaccccgcccagagaaagctgtacagagacgtgatgctggagaccttcaagcacctggccagcgtggacaacgaggcccagctgaaggccagcggcagcatcagccagcaggacaccagcggcgagaagctgagcctgaagcagaagatcgagaagttcaccagaaagaacatctgggccaccagccccaagaaaaagagaaaagtctaagctgccttctgcggggcttgccttctggccatgcccttcttctctcccttgcacctgtacctcttggtctttgaataaagcctgagtaggaaggctagcaaaaaaaaaaaaaaaaaaaaaaaaaaaaaaaaaaaaaaaaaaaaaaaaaaaaaaaaaaaaaaaaaaaaaaaaaaaaaaaa

SEQ ID NO: 7146 - RNA, 5797 nt, synthetic construct
  source 1..5797: mol_type = other RNA
aggaaataagagagaaaagaagagtaagaagaaatataagagccaccatggcccctaagaagaagcgtaaagtgagccggatggaacgcctcgtctacgaggtgcggcagaagtgcagaaacatcgaggacatctgcatctcctgcggatctctgaacgtgaccctggagcacccactgttcatcggcggcatgtgccagaactgtaaaaactgttttctggagtgtgcctatcaatacgacgatgacggctaccagagctactgcaccatctgttgcggcggaagagaggtgctgatgtgtggaaataacaactgctgccggtgcttctgcgtggaatgcgtggacctgctggtgggccccggcgccgcccaggccgctattaaggaagatccttggaactgctacatgtgcggccacaagggcacatacggcctgctgagacggagagaggactggcctagcagactgcagatgttcttcgccaataaccacgaccaggagttcgacccccctaaggtgtaccctcccgtccccgccgagaagagaaagcccatccgggtcctgagcctgttcgatggcatcgccaccggtctgctggtgctgaaggacctgggcatccaggtggataggtacattgcctccgaggtgtgcgaggactccatcaccgtgggaatggtgcgtcatcagggcaagatcatgtacgtgggcgacgtgcggagcgtgacacagaagcatatccaggagtggggccctttcgacctggtgatcggcggcagcccttgcaatgacctgagcatcgtgaacccagcccggaagggcctgtacgagggaaccggcagactgttcttcgagttttacagactgctgcacgacgcccggcctaaggaaggcgacgaccggcccttcttttggctgttcgagaatgtggtggccatgggagtcagcgacaagcgggatattagccggttcctggagagcaaccccgtgatgatcgatgccaaggaagtgagcgccgcccaccgggccagatacttctggggcaatctgcctggcatgaacagacccctggccagcaccgtgaacgacaagctggagctgcaggagtgcctggagcacggccggatcgccaagttcagcaaggtgagaaccatcaccacccgaagcaacagcatcaaacaaggcaaggaccagcactttcctgtgttcatgaacgagaaggaggacatcctgtggtgtaccgagatggagagagtgttcgggttcccagtccactacacagatgtcagcaacatgtctagactggccagacagagactgctgggaagaagctggtccgtccctgtgatcagacacctgttcgcccctctgaaggagtacttcgcctgcgtgagcagcggcaacagcaacgccaacagccggggccccagcttctctagcggcctggtgccactgtccctgagagggagccacatgggccccatggagatctacaaaaccgtgagcgcctggaagcggcagcctgtgcgcgtgctgagcctgtttcggaatatcgataaagtcctgaaaagcctgggattcctggagagcggctctggctccggcggtggcaccctgaagtacgtggaggatgtgacaaacgtggtcagacgggatgtggagaagtggggccccttcgatctggtgtacggcagcacccaacccctgggcagctcttgtgaccggtgccctggctggtacatgtttcagttccaccggatcctgcagtacgccctgccgagacaggagtcccagcggccattcttttggattttcatggacaacttgctgctgaccgaggatgaccaggaaactaccactcggttcctgcagaccgaagccgtgaccctgcaggacgtgagaggccgggactaccagaacgccatgcgggtgtggtccaacatccctggactgaaaagcaagcacgcacctctgacccctaaagaagaggagtacctgcaggcccaggtgcggagcagaagcaagctggacgcccctaaggtggatctgctggtgaagaattgcctcctgcccctgagagagtacttcaagtatttcagccagaatagtctgcccctgggcggcccaagcagcggcgcccctcctcccagcggcggcagcccagccggctccccaacctctaccgaggagggcacctctgagtccgccacccccgagagcggccctggcacctccaccgagcccagcgagggcagcgcacccggcagccctgccggcagccccacctccacagaggagggaaccagcaccgagcccagcgaaggcagcgccccaggcaccagcaccgagcctagtgagggcggctctggcggcggcagcgcccaggagattaaacggatcaacaagatcagaagaagacttgtgaaagacagcaacaccaagaaggccggcaagacaggccccatgaaaaccctgctggttagagtgatgacacccgatctgagagagcggctggaaaacctgagaaagaagcctgaaaatatcccccagcccatcagcaatacatctagagccaacctgaataagctgctgaccgattacaccgaaatgaagaaggcgatcctgcatgtgtactgggaagagttccagaaggaccctgtgggcctgatgagccgggtggcccagcctgccagcaagaagatcgatcagaacaagctgaaacctgagatggacgagaagggcaacctgaccaccgccggctttgcctgctctcagtgtggccagcccctgttcgtgtacaagctggagcaggtgtctgagaagggcaaggcttacaccaactacttcggacggtgcaatgtggccgagcacgaaaagctgatcctgctggcccagctgaagcccgagaaggatagcgacgaagccgtgacatatagcctgggaaagtttgggcagagggccctggatttctacagcattcatgtgaccaaggagtccacccaccccgtgaagcccctggcccagatcgccggaaacagatacgcctccggacctgtgggaaaggccctgagcgacgcatgtatgggcacaatcgcctccttcctgtctaagtaccaggacatcatcatcgaacaccagaaggtggtgaagggcaaccagaagagactggagagcctgcgggagctggccggcaaggaaaacctggaataccctagcgtgaccctgccacctcagcctcacaccaaggagggcgttgatgcctacaacgaagtgatcgcccgggtgcgaatgtgggtgaacctgaacctgtggcagaagctgaagctaagcagagatgatgccaagcctctgctgagactgaagggattcccttcctttcctctggtcgagagacaggccaacgaagtggactggtgggacatggtgtgtaacgtgaagaagctgatcaacgagaaaaaggaggatggcaaggtgttttggcagaatctggctggctacaagagacaggaagccctgagaccatacctgagcagcgaggaagatcggaagaagggaaagaaattcgctcggtaccagctgggcgacctgctgctgcacctggaaaagaagcacggcgaggactggggaaaggtgtacgacgaggcctgggagcggattgacaagaaagtggaaggcctgagcaagcacatcaagctggaagaggaacggagaagcgaggacgcccagagcaaggccgccctgaccgactggctgcgggctaaggccagcttcgtgatcgagggcctgaaggaggccgacaaggacgagttctgcagatgcgagctgaagctgcagaagtggtacggggacctgcggggaaagcccttcgccatcgaagccgagaacagcatcctggacatcagcggcttcagcaagcagtacaactgtgccttcatctggcagaaggacggcgtgaagaagctgaacctgtacctgatcatcaactacttcaagggcggcaagctgcggttcaagaagatcaaacctgaagccttcgaagccaacagattctacaccgtgatcaacaaaaagagcggcgagatcgtgcccatggaggtgaacttcaacttcgacgaccccaacctgatcatcctgcctctggcctttggcaagagacagggcagagaattcatctggaacgacctgctgtccctggaaaccggcagcctgaagctggccaacggaagagtgatcgagaagacactgtacaacagaagaacccggcaggatgagcctgccctgttcgtggccctgaccttcgagcggcgggaggtcctggactcctccaatatcaaaccaatgaacctgatcggcgtggcaagaggcgaaaacatccccgccgtgatcgccctgaccgaccccgagggctgcccactgagccggtttaaggatagcctgggaaacccaacccacatcctgagaatcggcgagagctataaggagaagcagcggaccatccaggccaagaaggaggtggagcagcggagagccggcggctacagccggaagtacgccagcaaagccaagaatctggcagacgatatggtgagaaacaccgctagagatctgctgtactacgccgtgacccaggatgccatgctgatcttcgccaacctgagccggggcttcggccggcagggcaagcggaccttcatggccgagagacagtacacacggatggaggactggctgaccgccaagctggcctacgagggcctgagcaagacctacctgtccaagacactggcccagtacacctccaagacatgcagcaactgtgggtttaccatcaccagcgccgactacgacagggtgctggagaagctgaagaagacagcaacaggctggatgaccacaattaacggcaaggagctgaaggtggagggccagattacctactacaacagatacaagagacagaacgtagtcaaggacctgtccgtcgagctggatagactgagcgaagaatctgtgaacaacgacatctcctcctggacaaagggcagaagcggagaagctctgagcctcctgaagaaaagattctcccatagacccgtgcaggagaagttcgtgtgcctgaactgcggcttcgagacacacgcagccgagcaagccgccctgaacatcgccagatcctggctgttcctgcggagccaggagtacaagaaataccagacaaacaagacaaccggcaacaccgataagagagccttcgtcgagacctggcagtccttttaccggaagaagcttaaggaggtgtggaaacctgccgtgcggtctggcggatctggcggaggctccacaagccagcagaggcccgtgagcttcaaggacgtggtggtgggcttcacccaggaggagtggcacaggctgaaccccgcccagagggccctgtacagggacgtgatgctggagacctacagcaacctggtgagcgtgggctacgagggcaccaagccctacgtgatcctgaagctggagcaggaggaggccccctggatctgcgaggccgcctgcagcggctgccactgccaggagaacatctgccagaccagccccaagaaaaagagaaaagtctaagctgccttctgcggggcttgccttctggccatgcccttcttctctcccttgcacctgtacctcttggtctttgaataaagcctgagtaggaaggctagcaaaaaaaaaaaaaaaaaaaaaaaaaaaaaaaaaaaaaaaaaaaaaaaaaaaaaaaaaaaaaaaaaaaaaaaaaaaaaaaa

SEQ ID NO: 7147 - RNA, 5797 nt, synthetic construct
  source 1..5797: mol_type = other RNA
aggaaataagagagaaaagaagagtaagaagaaatataagagccaccatggcccctaagaagaagcgtaaagtgagccggatggaacgcctcgtctacgaggtgcggcagaagtgcagaaacatcgaggacatctgcatctcctgcggatctctgaacgtgaccctggagcacccactgttcatcggcggcatgtgccagaactgtaaaaactgttttctggagtgtgcctatcaatacgacgatgacggctaccagagctactgcaccatctgttgcggcggaagagaggtgctgatgtgtggaaataacaactgctgccggtgcttctgcgtggaatgcgtggacctgctggtgggccccggcgccgcccaggccgctattaaggaagatccttggaactgctacatgtgcggccacaagggcacatacggcctgctgagacggagagaggactggcctagcagactgcagatgttcttcgccaataaccacgaccaggagttcgacccccctaaggtgtaccctcccgtccccgccgagaagagaaagcccatccgggtcctgagcctgttcgatggcatcgccaccggtctgctggtgctgaaggacctgggcatccaggtggataggtacattgcctccgaggtgtgcgaggactccatcaccgtgggaatggtgcgtcatcagggcaagatcatgtacgtgggcgacgtgcggagcgtgacacagaagcatatccaggagtggggccctttcgacctggtgatcggcggcagcccttgcaatgacctgagcatcgtgaacccagcccggaagggcctgtacgagggaaccggcagactgttcttcgagttttacagactgctgcacgacgcccggcctaaggaaggcgacgaccggcccttcttttggctgttcgagaatgtggtggccatgggagtcagcgacaagcgggatattagccggttcctggagagcaaccccgtgatgatcgatgccaaggaagtgagcgccgcccaccgggccagatacttctggggcaatctgcctggcatgaacagacccctggccagcaccgtgaacgacaagctggagctgcaggagtgcctggagcacggccggatcgccaagttcagcaaggtgagaaccatcaccacccgaagcaacagcatcaaacaaggcaaggaccagcactttcctgtgttcatgaacgagaaggaggacatcctgtggtgtaccgagatggagagagtgttcgggttcccagtccactacacagatgtcagcaacatgtctagactggccagacagagactgctgggaagaagctggtccgtccctgtgatcagacacctgttcgcccctctgaaggagtacttcgcctgcgtgagcagcggcaacagcaacgccaacagccggggccccagcttctctagcggcctggtgccactgtccctgagagggagccacatgggccccatggagatctacaaaaccgtgagcgcctggaagcggcagcctgtgcgcgtgctgagcctgtttcggaatatcgataaagtcctgaaaagcctgggattcctggagagcggctctggctccggcggtggcaccctgaagtacgtggaggatgtgacaaacgtggtcagacgggatgtggagaagtggggccccttcgatctggtgtacggcagcacccaacccctgggcagctcttgtgaccggtgccctggctggtacatgtttcagttccaccggatcctgcagtacgccctgccgagacaggagtcccagcggccattcttttggattttcatggacaacttgctgctgaccgaggatgaccaggaaactaccactcggttcctgcagaccgaagccgtgaccctgcaggacgtgagaggccgggactaccagaacgccatgcgggtgtggtccaacatccctggactgaaaagcaagcacgcacctctgacccctaaagaagaggagtacctgcaggcccaggtgcggagcagaagcaagctggacgcccctaaggtggatctgctggtgaagaattgcctcctgcccctgagagagtacttcaagtatttcagccagaatagtctgcccctgggcggcccaagcagcggcgcccctcctcccagcggcggcagcccagccggctccccaacctctaccgaggagggcacctctgagtccgccacccccgagagcggccctggcacctccaccgagcccagcgagggcagcgcacccggcagccctgccggcagccccacctccacagaggagggaaccagcaccgagcccagcgaaggcagcgccccaggcaccagcaccgagcctagtgagggcggctctggcggcggcagcgcccaggagattaaacggatcaacaagatcagaagaagacttgtgaaagacagcaacaccaagaaggccggcaagacaggccccatgaaaaccctgctggttagagtgatgacacccgatctgagagagcggctggaaaacctgagaaagaagcctgaaaatatcccccagcccatcagcaatacatctagagccaacctgaataagctgctgaccgattacaccgaaatgaagaaggcgatcctgcatgtgtactgggaagagttccagaaggaccctgtgggcctgatgagccgggtggcccagcctgccagcaagaagatcgatcagaacaagctgaaacctgagatggacgagaagggcaacctgaccaccgccggctttgcctgctctcagtgtggccagcccctgttcgtgtacaagctggagcaggtgtctgagaagggcaaggcttacaccaactacttcggacggtgcaatgtggccgagcacgaaaagctgatcctgctggcccagctgaagcccgagaaggatagcgacgaagccgtgacatatagcctgggaaagtttgggcagagggccctggatttctacagcattcatgtgaccaaggagtccacccaccccgtgaagcccctggcccagatcgccggaaacagatacgcctccggacctgtgggaaaggccctgagcgacgcatgtatgggcacaatcgcctccttcctgtctaagtaccaggacatcatcatcgaacaccagaaggtggtgaagggcaaccagaagagactggagagcctgcgggagctggccggcaaggaaaacctggaataccctagcgtgaccctgccacctcagcctcacaccaaggagggcgttgatgcctacaacgaagtgatcgcccgggtgcgaatgtgggtgaacctgaacctgtggcagaagctgaagctaagcagagatgatgccaagcctctgctgagactgaagggattcccttcctttcctctggtcgagagacaggccaacgaagtggactggtgggacatggtgtgtaacgtgaagaagctgatcaacgagaaaaaggaggatggcaaggtgttttggcagaatctggctggctacaagagacaggaagccctgagaccatacctgagcagcgaggaagatcggaagaagggaaagaaattcgctcggtaccagctgggcgacctgctgctgcacctggaaaagaagcacggcgaggactggggaaaggtgtacgacgaggcctgggagcggattgacaagaaagtggaaggcctgagcaagcacatcaagctggaagaggaacggagaagcgaggacgcccagagcaaggccgccctgaccgactggctgcgggctaaggccagcttcgtgatcgagggcctgaaggaggccgacaaggacgagttctgcagatgcgagctgaagctgcagaagtggtacggggacctgcggggaaagcccttcgccatcgaagccgagaacagcatcctggacatcagcggcttcagcaagcagtacaactgtgccttcatctggcagaaggacggcgtgaagaagctgaacctgtacctgatcatcaactacttcaagggcggcaagctgcggttcaagaagatcaaacctgaagccttcgaagccaacagattctacaccgtgatcaacaaaaagagcggcgagatcgtgcccatggaggtgaacttcaacttcgacgaccccaacctgatcatcctgcctctggcctttggcaagagacagggcagagaattcatctggaacgacctgctgtccctggaaaccggcagcctgaagctggccaacggaagagtgatcgagaagacactgtacaacagaagaacccggcaggatgagcctgccctgttcgtggccctgaccttcgagcggcgggaggtcctggactcctccaatatcaaaccaatgaacctgatcggcgtggcaagaggcgaaaacatccccgccgtgatcgccctgaccgaccccgagggctgcccactgagccggtttaaggatagcctgggaaacccaacccacatcctgagaatcggcgagagctataaggagaagcagcggaccatccaggccaagaaggaggtggagcagcggagagccggcggctacagccggaagtacgccagcaaagccaagaatctggcagacgatatggtgagaaacaccgctagagatctgctgtactacgccgtgacccaggatgccatgctgatcttcgccaacctgagccggggcttcggccggcagggcaagcggaccttcatggccgagagacagtacacacggatggaggactggctgaccgccaagctggcctacgagggcctgagcaagacctacctgtccaagacactggcccagtacacctccaagacatgcagcaactgtgggtttaccatcaccagcgccgactacgacagggtgctggagaagctgaagaagacagcaacaggctggatgaccacaattaacggcaaggagctgaaggtggagggccagattacctactacaacagatacaagagacagaacgtagtcaaggacctgtccgtcgagctggatagactgagcgaagaatctgtgaacaacgacatctcctcctggacaaagggcagaagcggagaagctctgagcctcctgaagaaaagattctcccatagacccgtgcaggagaagttcgtgtgcctgaactgcggcttcgagacacacgcagccgagcaagccgccctgaacatcgccagatcctggctgttcctgcggagccaggagtacaagaaataccagacaaacaagacaaccggcaacaccgataagagagccttcgtcgagacctggcagtccttttaccggaagaagcttaaggaggtgtggaaacctgccgtgcggtctggcggatctggcggaggctccacaagcctgcaggaggccgtgaccttcgaggacgtggccgtgaacttcagcaacgaggagtggcagtgcctgacccacgcccagaggcacctgtacaaggacgtgatgctggagaactacggcaacgtggtgagcctgggcttccccttccccaagccccccctgatcagccacctggagcaggaggccgagctgtgcgcccaggacaggcaggacagggagttcctgagctgcagctaccccgtgagcaccagccccaagaaaaagagaaaagtctaagctgccttctgcggggcttgccttctggccatgcccttcttctctcccttgcacctgtacctcttggtctttgaataaagcctgagtaggaaggctagcaaaaaaaaaaaaaaaaaaaaaaaaaaaaaaaaaaaaaaaaaaaaaaaaaaaaaaaaaaaaaaaaaaaaaaaaaaaaaaaa

SEQ ID NO: 7148 - RNA, 5797 nt, synthetic construct
  source 1..5797: mol_type = other RNA
aggaaataagagagaaaagaagagtaagaagaaatataagagccaccatggcccctaagaagaagcgtaaagtgagccggatggaacgcctcgtctacgaggtgcggcagaagtgcagaaacatcgaggacatctgcatctcctgcggatctctgaacgtgaccctggagcacccactgttcatcggcggcatgtgccagaactgtaaaaactgttttctggagtgtgcctatcaatacgacgatgacggctaccagagctactgcaccatctgttgcggcggaagagaggtgctgatgtgtggaaataacaactgctgccggtgcttctgcgtggaatgcgtggacctgctggtgggccccggcgccgcccaggccgctattaaggaagatccttggaactgctacatgtgcggccacaagggcacatacggcctgctgagacggagagaggactggcctagcagactgcagatgttcttcgccaataaccacgaccaggagttcgacccccctaaggtgtaccctcccgtccccgccgagaagagaaagcccatccgggtcctgagcctgttcgatggcatcgccaccggtctgctggtgctgaaggacctgggcatccaggtggataggtacattgcctccgaggtgtgcgaggactccatcaccgtgggaatggtgcgtcatcagggcaagatcatgtacgtgggcgacgtgcggagcgtgacacagaagcatatccaggagtggggccctttcgacctggtgatcggcggcagcccttgcaatgacctgagcatcgtgaacccagcccggaagggcctgtacgagggaaccggcagactgttcttcgagttttacagactgctgcacgacgcccggcctaaggaaggcgacgaccggcccttcttttggctgttcgagaatgtggtggccatgggagtcagcgacaagcgggatattagccggttcctggagagcaaccccgtgatgatcgatgccaaggaagtgagcgccgcccaccgggccagatacttctggggcaatctgcctggcatgaacagacccctggccagcaccgtgaacgacaagctggagctgcaggagtgcctggagcacggccggatcgccaagttcagcaaggtgagaaccatcaccacccgaagcaacagcatcaaacaaggcaaggaccagcactttcctgtgttcatgaacgagaaggaggacatcctgtggtgtaccgagatggagagagtgttcgggttcccagtccactacacagatgtcagcaacatgtctagactggccagacagagactgctgggaagaagctggtccgtccctgtgatcagacacctgttcgcccctctgaaggagtacttcgcctgcgtgagcagcggcaacagcaacgccaacagccggggccccagcttctctagcggcctggtgccactgtccctgagagggagccacatgggccccatggagatctacaaaaccgtgagcgcctggaagcggcagcctgtgcgcgtgctgagcctgtttcggaatatcgataaagtcctgaaaagcctgggattcctggagagcggctctggctccggcggtggcaccctgaagtacgtggaggatgtgacaaacgtggtcagacgggatgtggagaagtggggccccttcgatctggtgtacggcagcacccaacccctgggcagctcttgtgaccggtgccctggctggtacatgtttcagttccaccggatcctgcagtacgccctgccgagacaggagtcccagcggccattcttttggattttcatggacaacttgctgctgaccgaggatgaccaggaaactaccactcggttcctgcagaccgaagccgtgaccctgcaggacgtgagaggccgggactaccagaacgccatgcgggtgtggtccaacatccctggactgaaaagcaagcacgcacctctgacccctaaagaagaggagtacctgcaggcccaggtgcggagcagaagcaagctggacgcccctaaggtggatctgctggtgaagaattgcctcctgcccctgagagagtacttcaagtatttcagccagaatagtctgcccctgggcggcccaagcagcggcgcccctcctcccagcggcggcagcccagccggctccccaacctctaccgaggagggcacctctgagtccgccacccccgagagcggccctggcacctccaccgagcccagcgagggcagcgcacccggcagccctgccggcagccccacctccacagaggagggaaccagcaccgagcccagcgaaggcagcgccccaggcaccagcaccgagcctagtgagggcggctctggcggcggcagcgcccaggagattaaacggatcaacaagatcagaagaagacttgtgaaagacagcaacaccaagaaggccggcaagacaggccccatgaaaaccctgctggttagagtgatgacacccgatctgagagagcggctggaaaacctgagaaagaagcctgaaaatatcccccagcccatcagcaatacatctagagccaacctgaataagctgctgaccgattacaccgaaatgaagaaggcgatcctgcatgtgtactgggaagagttccagaaggaccctgtgggcctgatgagccgggtggcccagcctgccagcaagaagatcgatcagaacaagctgaaacctgagatggacgagaagggcaacctgaccaccgccggctttgcctgctctcagtgtggccagcccctgttcgtgtacaagctggagcaggtgtctgagaagggcaaggcttacaccaactacttcggacggtgcaatgtggccgagcacgaaaagctgatcctgctggcccagctgaagcccgagaaggatagcgacgaagccgtgacatatagcctgggaaagtttgggcagagggccctggatttctacagcattcatgtgaccaaggagtccacccaccccgtgaagcccctggcccagatcgccggaaacagatacgcctccggacctgtgggaaaggccctgagcgacgcatgtatgggcacaatcgcctccttcctgtctaagtaccaggacatcatcatcgaacaccagaaggtggtgaagggcaaccagaagagactggagagcctgcgggagctggccggcaaggaaaacctggaataccctagcgtgaccctgccacctcagcctcacaccaaggagggcgttgatgcctacaacgaagtgatcgcccgggtgcgaatgtgggtgaacctgaacctgtggcagaagctgaagctaagcagagatgatgccaagcctctgctgagactgaagggattcccttcctttcctctggtcgagagacaggccaacgaagtggactggtgggacatggtgtgtaacgtgaagaagctgatcaacgagaaaaaggaggatggcaaggtgttttggcagaatctggctggctacaagagacaggaagccctgagaccatacctgagcagcgaggaagatcggaagaagggaaagaaattcgctcggtaccagctgggcgacctgctgctgcacctggaaaagaagcacggcgaggactggggaaaggtgtacgacgaggcctgggagcggattgacaagaaagtggaaggcctgagcaagcacatcaagctggaagaggaacggagaagcgaggacgcccagagcaaggccgccctgaccgactggctgcgggctaaggccagcttcgtgatcgagggcctgaaggaggccgacaaggacgagttctgcagatgcgagctgaagctgcagaagtggtacggggacctgcggggaaagcccttcgccatcgaagccgagaacagcatcctggacatcagcggcttcagcaagcagtacaactgtgccttcatctggcagaaggacggcgtgaagaagctgaacctgtacctgatcatcaactacttcaagggcggcaagctgcggttcaagaagatcaaacctgaagccttcgaagccaacagattctacaccgtgatcaacaaaaagagcggcgagatcgtgcccatggaggtgaacttcaacttcgacgaccccaacctgatcatcctgcctctggcctttggcaagagacagggcagagaattcatctggaacgacctgctgtccctggaaaccggcagcctgaagctggccaacggaagagtgatcgagaagacactgtacaacagaagaacccggcaggatgagcctgccctgttcgtggccctgaccttcgagcggcgggaggtcctggactcctccaatatcaaaccaatgaacctgatcggcgtggcaagaggcgaaaacatccccgccgtgatcgccctgaccgaccccgagggctgcccactgagccggtttaaggatagcctgggaaacccaacccacatcctgagaatcggcgagagctataaggagaagcagcggaccatccaggccaagaaggaggtggagcagcggagagccggcggctacagccggaagtacgccagcaaagccaagaatctggcagacgatatggtgagaaacaccgctagagatctgctgtactacgccgtgacccaggatgccatgctgatcttcgccaacctgagccggggcttcggccggcagggcaagcggaccttcatggccgagagacagtacacacggatggaggactggctgaccgccaagctggcctacgagggcctgagcaagacctacctgtccaagacactggcccagtacacctccaagacatgcagcaactgtgggtttaccatcaccagcgccgactacgacagggtgctggagaagctgaagaagacagcaacaggctggatgaccacaattaacggcaaggagctgaaggtggagggccagattacctactacaacagatacaagagacagaacgtagtcaaggacctgtccgtcgagctggatagactgagcgaagaatctgtgaacaacgacatctcctcctggacaaagggcagaagcggagaagctctgagcctcctgaagaaaagattctcccatagacccgtgcaggagaagttcgtgtgcctgaactgcggcttcgagacacacgcagccgagcaagccgccctgaacatcgccagatcctggctgttcctgcggagccaggagtacaagaaataccagacaaacaagacaaccggcaacaccgataagagagccttcgtcgagacctggcagtccttttaccggaagaagcttaaggaggtgtggaaacctgccgtgcggtctggcggatctggcggaggctccacaagctgctaccaggacagcgtgaccttcgacgacgtggccgtggacttcacccaggaggagtggaccctgctggacagcacccagaggagcctgtacagcgacgtgatgctggagaactacaagaacctggccaccgtgggcggccagatcatcaagcccagcctgatcagctggctggagcaggaggagagcaagaccgtgcagggcggcgtgctgcagggcaggaagacccagtggaggggcaccaccagccccaagaaaaagagaaaagtctaagctgccttctgcggggcttgccttctggccatgcccttcttctctcccttgcacctgtacctcttggtctttgaataaagcctgagtaggaaggctagcaaaaaaaaaaaaaaaaaaaaaaaaaaaaaaaaaaaaaaaaaaaaaaaaaaaaaaaaaaaaaaaaaaaaaaaaaaaaaaaa

SEQ ID NO: 7149 - RNA, 5797 nt, synthetic construct
  source 1..5797: mol_type = other RNA
aggaaataagagagaaaagaagagtaagaagaaatataagagccaccatggcccctaagaagaagcgtaaagtgagccggatggaacgcctcgtctacgaggtgcggcagaagtgcagaaacatcgaggacatctgcatctcctgcggatctctgaacgtgaccctggagcacccactgttcatcggcggcatgtgccagaactgtaaaaactgttttctggagtgtgcctatcaatacgacgatgacggctaccagagctactgcaccatctgttgcggcggaagagaggtgctgatgtgtggaaataacaactgctgccggtgcttctgcgtggaatgcgtggacctgctggtgggccccggcgccgcccaggccgctattaaggaagatccttggaactgctacatgtgcggccacaagggcacatacggcctgctgagacggagagaggactggcctagcagactgcagatgttcttcgccaataaccacgaccaggagttcgacccccctaaggtgtaccctcccgtccccgccgagaagagaaagcccatccgggtcctgagcctgttcgatggcatcgccaccggtctgctggtgctgaaggacctgggcatccaggtggataggtacattgcctccgaggtgtgcgaggactccatcaccgtgggaatggtgcgtcatcagggcaagatcatgtacgtgggcgacgtgcggagcgtgacacagaagcatatccaggagtggggccctttcgacctggtgatcggcggcagcccttgcaatgacctgagcatcgtgaacccagcccggaagggcctgtacgagggaaccggcagactgttcttcgagttttacagactgctgcacgacgcccggcctaaggaaggcgacgaccggcccttcttttggctgttcgagaatgtggtggccatgggagtcagcgacaagcgggatattagccggttcctggagagcaaccccgtgatgatcgatgccaaggaagtgagcgccgcccaccgggccagatacttctggggcaatctgcctggcatgaacagacccctggccagcaccgtgaacgacaagctggagctgcaggagtgcctggagcacggccggatcgccaagttcagcaaggtgagaaccatcaccacccgaagcaacagcatcaaacaaggcaaggaccagcactttcctgtgttcatgaacgagaaggaggacatcctgtggtgtaccgagatggagagagtgttcgggttcccagtccactacacagatgtcagcaacatgtctagactggccagacagagactgctgggaagaagctggtccgtccctgtgatcagacacctgttcgcccctctgaaggagtacttcgcctgcgtgagcagcggcaacagcaacgccaacagccggggccccagcttctctagcggcctggtgccactgtccctgagagggagccacatgggccccatggagatctacaaaaccgtgagcgcctggaagcggcagcctgtgcgcgtgctgagcctgtttcggaatatcgataaagtcctgaaaagcctgggattcctggagagcggctctggctccggcggtggcaccctgaagtacgtggaggatgtgacaaacgtggtcagacgggatgtggagaagtggggccccttcgatctggtgtacggcagcacccaacccctgggcagctcttgtgaccggtgccctggctggtacatgtttcagttccaccggatcctgcagtacgccctgccgagacaggagtcccagcggccattcttttggattttcatggacaacttgctgctgaccgaggatgaccaggaaactaccactcggttcctgcagaccgaagccgtgaccctgcaggacgtgagaggccgggactaccagaacgccatgcgggtgtggtccaacatccctggactgaaaagcaagcacgcacctctgacccctaaagaagaggagtacctgcaggcccaggtgcggagcagaagcaagctggacgcccctaaggtggatctgctggtgaagaattgcctcctgcccctgagagagtacttcaagtatttcagccagaatagtctgcccctgggcggcccaagcagcggcgcccctcctcccagcggcggcagcccagccggctccccaacctctaccgaggagggcacctctgagtccgccacccccgagagcggccctggcacctccaccgagcccagcgagggcagcgcacccggcagccctgccggcagccccacctccacagaggagggaaccagcaccgagcccagcgaaggcagcgccccaggcaccagcaccgagcctagtgagggcggctctggcggcggcagcgcccaggagattaaacggatcaacaagatcagaagaagacttgtgaaagacagcaacaccaagaaggccggcaagacaggccccatgaaaaccctgctggttagagtgatgacacccgatctgagagagcggctggaaaacctgagaaagaagcctgaaaatatcccccagcccatcagcaatacatctagagccaacctgaataagctgctgaccgattacaccgaaatgaagaaggcgatcctgcatgtgtactgggaagagttccagaaggaccctgtgggcctgatgagccgggtggcccagcctgccagcaagaagatcgatcagaacaagctgaaacctgagatggacgagaagggcaacctgaccaccgccggctttgcctgctctcagtgtggccagcccctgttcgtgtacaagctggagcaggtgtctgagaagggcaaggcttacaccaactacttcggacggtgcaatgtggccgagcacgaaaagctgatcctgctggcccagctgaagcccgagaaggatagcgacgaagccgtgacatatagcctgggaaagtttgggcagagggccctggatttctacagcattcatgtgaccaaggagtccacccaccccgtgaagcccctggcccagatcgccggaaacagatacgcctccggacctgtgggaaaggccctgagcgacgcatgtatgggcacaatcgcctccttcctgtctaagtaccaggacatcatcatcgaacaccagaaggtggtgaagggcaaccagaagagactggagagcctgcgggagctggccggcaaggaaaacctggaataccctagcgtgaccctgccacctcagcctcacaccaaggagggcgttgatgcctacaacgaagtgatcgcccgggtgcgaatgtgggtgaacctgaacctgtggcagaagctgaagctaagcagagatgatgccaagcctctgctgagactgaagggattcccttcctttcctctggtcgagagacaggccaacgaagtggactggtgggacatggtgtgtaacgtgaagaagctgatcaacgagaaaaaggaggatggcaaggtgttttggcagaatctggctggctacaagagacaggaagccctgagaccatacctgagcagcgaggaagatcggaagaagggaaagaaattcgctcggtaccagctgggcgacctgctgctgcacctggaaaagaagcacggcgaggactggggaaaggtgtacgacgaggcctgggagcggattgacaagaaagtggaaggcctgagcaagcacatcaagctggaagaggaacggagaagcgaggacgcccagagcaaggccgccctgaccgactggctgcgggctaaggccagcttcgtgatcgagggcctgaaggaggccgacaaggacgagttctgcagatgcgagctgaagctgcagaagtggtacggggacctgcggggaaagcccttcgccatcgaagccgagaacagcatcctggacatcagcggcttcagcaagcagtacaactgtgccttcatctggcagaaggacggcgtgaagaagctgaacctgtacctgatcatcaactacttcaagggcggcaagctgcggttcaagaagatcaaacctgaagccttcgaagccaacagattctacaccgtgatcaacaaaaagagcggcgagatcgtgcccatggaggtgaacttcaacttcgacgaccccaacctgatcatcctgcctctggcctttggcaagagacagggcagagaattcatctggaacgacctgctgtccctggaaaccggcagcctgaagctggccaacggaagagtgatcgagaagacactgtacaacagaagaacccggcaggatgagcctgccctgttcgtggccctgaccttcgagcggcgggaggtcctggactcctccaatatcaaaccaatgaacctgatcggcgtggcaagaggcgaaaacatccccgccgtgatcgccctgaccgaccccgagggctgcccactgagccggtttaaggatagcctgggaaacccaacccacatcctgagaatcggcgagagctataaggagaagcagcggaccatccaggccaagaaggaggtggagcagcggagagccggcggctacagccggaagtacgccagcaaagccaagaatctggcagacgatatggtgagaaacaccgctagagatctgctgtactacgccgtgacccaggatgccatgctgatcttcgccaacctgagccggggcttcggccggcagggcaagcggaccttcatggccgagagacagtacacacggatggaggactggctgaccgccaagctggcctacgagggcctgagcaagacctacctgtccaagacactggcccagtacacctccaagacatgcagcaactgtgggtttaccatcaccagcgccgactacgacagggtgctggagaagctgaagaagacagcaacaggctggatgaccacaattaacggcaaggagctgaaggtggagggccagattacctactacaacagatacaagagacagaacgtagtcaaggacctgtccgtcgagctggatagactgagcgaagaatctgtgaacaacgacatctcctcctggacaaagggcagaagcggagaagctctgagcctcctgaagaaaagattctcccatagacccgtgcaggagaagttcgtgtgcctgaactgcggcttcgagacacacgcagccgagcaagccgccctgaacatcgccagatcctggctgttcctgcggagccaggagtacaagaaataccagacaaacaagacaaccggcaacaccgataagagagccttcgtcgagacctggcagtccttttaccggaagaagcttaaggaggtgtggaaacctgccgtgcggtctggcggatctggcggaggctccacaagcagccaggagctggtgaccttcgaggacgtggccatctacttcaccgaggaggagtggggcctgctggaccccgcccagaggaagctgtacagggacgtgatgctggagaacttcggcaacgtgctgctgctgggcttccccgtgagcaagcccgacatcatcagcaagctggagaggggcgagatcccctgcgtgcccttcctgcccaggaagaagatcctggtgatcaggctgggcggcggcaccagccccaagaaaaagagaaaagtctaagctgccttctgcggggcttgccttctggccatgcccttcttctctcccttgcacctgtacctcttggtctttgaataaagcctgagtaggaaggctagcaaaaaaaaaaaaaaaaaaaaaaaaaaaaaaaaaaaaaaaaaaaaaaaaaaaaaaaaaaaaaaaaaaaaaaaaaaaaaaaa

SEQ ID NO: 7150 - RNA, 5797 nt, synthetic construct
  source 1..5797: mol_type = other RNA
aggaaataagagagaaaagaagagtaagaagaaatataagagccaccatggcccctaagaagaagcgtaaagtgagccggatggaacgcctcgtctacgaggtgcggcagaagtgcagaaacatcgaggacatctgcatctcctgcggatctctgaacgtgaccctggagcacccactgttcatcggcggcatgtgccagaactgtaaaaactgttttctggagtgtgcctatcaatacgacgatgacggctaccagagctactgcaccatctgttgcggcggaagagaggtgctgatgtgtggaaataacaactgctgccggtgcttctgcgtggaatgcgtggacctgctggtgggccccggcgccgcccaggccgctattaaggaagatccttggaactgctacatgtgcggccacaagggcacatacggcctgctgagacggagagaggactggcctagcagactgcagatgttcttcgccaataaccacgaccaggagttcgacccccctaaggtgtaccctcccgtccccgccgagaagagaaagcccatccgggtcctgagcctgttcgatggcatcgccaccggtctgctggtgctgaaggacctgggcatccaggtggataggtacattgcctccgaggtgtgcgaggactccatcaccgtgggaatggtgcgtcatcagggcaagatcatgtacgtgggcgacgtgcggagcgtgacacagaagcatatccaggagtggggccctttcgacctggtgatcggcggcagcccttgcaatgacctgagcatcgtgaacccagcccggaagggcctgtacgagggaaccggcagactgttcttcgagttttacagactgctgcacgacgcccggcctaaggaaggcgacgaccggcccttcttttggctgttcgagaatgtggtggccatgggagtcagcgacaagcgggatattagccggttcctggagagcaaccccgtgatgatcgatgccaaggaagtgagcgccgcccaccgggccagatacttctggggcaatctgcctggcatgaacagacccctggccagcaccgtgaacgacaagctggagctgcaggagtgcctggagcacggccggatcgccaagttcagcaaggtgagaaccatcaccacccgaagcaacagcatcaaacaaggcaaggaccagcactttcctgtgttcatgaacgagaaggaggacatcctgtggtgtaccgagatggagagagtgttcgggttcccagtccactacacagatgtcagcaacatgtctagactggccagacagagactgctgggaagaagctggtccgtccctgtgatcagacacctgttcgcccctctgaaggagtacttcgcctgcgtgagcagcggcaacagcaacgccaacagccggggccccagcttctctagcggcctggtgccactgtccctgagagggagccacatgggccccatggagatctacaaaaccgtgagcgcctggaagcggcagcctgtgcgcgtgctgagcctgtttcggaatatcgataaagtcctgaaaagcctgggattcctggagagcggctctggctccggcggtggcaccctgaagtacgtggaggatgtgacaaacgtggtcagacgggatgtggagaagtggggccccttcgatctggtgtacggcagcacccaacccctgggcagctcttgtgaccggtgccctggctggtacatgtttcagttccaccggatcctgcagtacgccctgccgagacaggagtcccagcggccattcttttggattttcatggacaacttgctgctgaccgaggatgaccaggaaactaccactcggttcctgcagaccgaagccgtgaccctgcaggacgtgagaggccgggactaccagaacgccatgcgggtgtggtccaacatccctggactgaaaagcaagcacgcacctctgacccctaaagaagaggagtacctgcaggcccaggtgcggagcagaagcaagctggacgcccctaaggtggatctgctggtgaagaattgcctcctgcccctgagagagtacttcaagtatttcagccagaatagtctgcccctgggcggcccaagcagcggcgcccctcctcccagcggcggcagcccagccggctccccaacctctaccgaggagggcacctctgagtccgccacccccgagagcggccctggcacctccaccgagcccagcgagggcagcgcacccggcagccctgccggcagccccacctccacagaggagggaaccagcaccgagcccagcgaaggcagcgccccaggcaccagcaccgagcctagtgagggcggctctggcggcggcagcgcccaggagattaaacggatcaacaagatcagaagaagacttgtgaaagacagcaacaccaagaaggccggcaagacaggccccatgaaaaccctgctggttagagtgatgacacccgatctgagagagcggctggaaaacctgagaaagaagcctgaaaatatcccccagcccatcagcaatacatctagagccaacctgaataagctgctgaccgattacaccgaaatgaagaaggcgatcctgcatgtgtactgggaagagttccagaaggaccctgtgggcctgatgagccgggtggcccagcctgccagcaagaagatcgatcagaacaagctgaaacctgagatggacgagaagggcaacctgaccaccgccggctttgcctgctctcagtgtggccagcccctgttcgtgtacaagctggagcaggtgtctgagaagggcaaggcttacaccaactacttcggacggtgcaatgtggccgagcacgaaaagctgatcctgctggcccagctgaagcccgagaaggatagcgacgaagccgtgacatatagcctgggaaagtttgggcagagggccctggatttctacagcattcatgtgaccaaggagtccacccaccccgtgaagcccctggcccagatcgccggaaacagatacgcctccggacctgtgggaaaggccctgagcgacgcatgtatgggcacaatcgcctccttcctgtctaagtaccaggacatcatcatcgaacaccagaaggtggtgaagggcaaccagaagagactggagagcctgcgggagctggccggcaaggaaaacctggaataccctagcgtgaccctgccacctcagcctcacaccaaggagggcgttgatgcctacaacgaagtgatcgcccgggtgcgaatgtgggtgaacctgaacctgtggcagaagctgaagctaagcagagatgatgccaagcctctgctgagactgaagggattcccttcctttcctctggtcgagagacaggccaacgaagtggactggtgggacatggtgtgtaacgtgaagaagctgatcaacgagaaaaaggaggatggcaaggtgttttggcagaatctggctggctacaagagacaggaagccctgagaccatacctgagcagcgaggaagatcggaagaagggaaagaaattcgctcggtaccagctgggcgacctgctgctgcacctggaaaagaagcacggcgaggactggggaaaggtgtacgacgaggcctgggagcggattgacaagaaagtggaaggcctgagcaagcacatcaagctggaagaggaacggagaagcgaggacgcccagagcaaggccgccctgaccgactggctgcgggctaaggccagcttcgtgatcgagggcctgaaggaggccgacaaggacgagttctgcagatgcgagctgaagctgcagaagtggtacggggacctgcggggaaagcccttcgccatcgaagccgagaacagcatcctggacatcagcggcttcagcaagcagtacaactgtgccttcatctggcagaaggacggcgtgaagaagctgaacctgtacctgatcatcaactacttcaagggcggcaagctgcggttcaagaagatcaaacctgaagccttcgaagccaacagattctacaccgtgatcaacaaaaagagcggcgagatcgtgcccatggaggtgaacttcaacttcgacgaccccaacctgatcatcctgcctctggcctttggcaagagacagggcagagaattcatctggaacgacctgctgtccctggaaaccggcagcctgaagctggccaacggaagagtgatcgagaagacactgtacaacagaagaacccggcaggatgagcctgccctgttcgtggccctgaccttcgagcggcgggaggtcctggactcctccaatatcaaaccaatgaacctgatcggcgtggcaagaggcgaaaacatccccgccgtgatcgccctgaccgaccccgagggctgcccactgagccggtttaaggatagcctgggaaacccaacccacatcctgagaatcggcgagagctataaggagaagcagcggaccatccaggccaagaaggaggtggagcagcggagagccggcggctacagccggaagtacgccagcaaagccaagaatctggcagacgatatggtgagaaacaccgctagagatctgctgtactacgccgtgacccaggatgccatgctgatcttcgccaacctgagccggggcttcggccggcagggcaagcggaccttcatggccgagagacagtacacacggatggaggactggctgaccgccaagctggcctacgagggcctgagcaagacctacctgtccaagacactggcccagtacacctccaagacatgcagcaactgtgggtttaccatcaccagcgccgactacgacagggtgctggagaagctgaagaagacagcaacaggctggatgaccacaattaacggcaaggagctgaaggtggagggccagattacctactacaacagatacaagagacagaacgtagtcaaggacctgtccgtcgagctggatagactgagcgaagaatctgtgaacaacgacatctcctcctggacaaagggcagaagcggagaagctctgagcctcctgaagaaaagattctcccatagacccgtgcaggagaagttcgtgtgcctgaactgcggcttcgagacacacgcagccgagcaagccgccctgaacatcgccagatcctggctgttcctgcggagccaggagtacaagaaataccagacaaacaagacaaccggcaacaccgataagagagccttcgtcgagacctggcagtccttttaccggaagaagcttaaggaggtgtggaaacctgccgtgcggtctggcggatctggcggaggctccacaagcctgttcgagagcgtgagcttcaaggacgtgaccatcgacttcagctgggaggagtggcagcagctggacttcgcccagaagagcctgtacagggacgtgatgctggagaactacttcaacctgatcagcgtgggctgccaggtgcccaagcccgaggtgatcttcaacctggagcaggtggagaacccctgcatgctgcacaggaagatcagcaggcagagctgcctggacggcgacatcggcaccagccccaagaaaaagagaaaagtctaagctgccttctgcggggcttgccttctggccatgcccttcttctctcccttgcacctgtacctcttggtctttgaataaagcctgagtaggaaggctagcaaaaaaaaaaaaaaaaaaaaaaaaaaaaaaaaaaaaaaaaaaaaaaaaaaaaaaaaaaaaaaaaaaaaaaaaaaaaaaaa

SEQ ID NO: 7151 - RNA, 5797 nt, synthetic construct
  source 1..5797: mol_type = other RNA
aggaaataagagagaaaagaagagtaagaagaaatataagagccaccatggcccctaagaagaagcgtaaagtgagccggatggaacgcctcgtctacgaggtgcggcagaagtgcagaaacatcgaggacatctgcatctcctgcggatctctgaacgtgaccctggagcacccactgttcatcggcggcatgtgccagaactgtaaaaactgttttctggagtgtgcctatcaatacgacgatgacggctaccagagctactgcaccatctgttgcggcggaagagaggtgctgatgtgtggaaataacaactgctgccggtgcttctgcgtggaatgcgtggacctgctggtgggccccggcgccgcccaggccgctattaaggaagatccttggaactgctacatgtgcggccacaagggcacatacggcctgctgagacggagagaggactggcctagcagactgcagatgttcttcgccaataaccacgaccaggagttcgacccccctaaggtgtaccctcccgtccccgccgagaagagaaagcccatccgggtcctgagcctgttcgatggcatcgccaccggtctgctggtgctgaaggacctgggcatccaggtggataggtacattgcctccgaggtgtgcgaggactccatcaccgtgggaatggtgcgtcatcagggcaagatcatgtacgtgggcgacgtgcggagcgtgacacagaagcatatccaggagtggggccctttcgacctggtgatcggcggcagcccttgcaatgacctgagcatcgtgaacccagcccggaagggcctgtacgagggaaccggcagactgttcttcgagttttacagactgctgcacgacgcccggcctaaggaaggcgacgaccggcccttcttttggctgttcgagaatgtggtggccatgggagtcagcgacaagcgggatattagccggttcctggagagcaaccccgtgatgatcgatgccaaggaagtgagcgccgcccaccgggccagatacttctggggcaatctgcctggcatgaacagacccctggccagcaccgtgaacgacaagctggagctgcaggagtgcctggagcacggccggatcgccaagttcagcaaggtgagaaccatcaccacccgaagcaacagcatcaaacaaggcaaggaccagcactttcctgtgttcatgaacgagaaggaggacatcctgtggtgtaccgagatggagagagtgttcgggttcccagtccactacacagatgtcagcaacatgtctagactggccagacagagactgctgggaagaagctggtccgtccctgtgatcagacacctgttcgcccctctgaaggagtacttcgcctgcgtgagcagcggcaacagcaacgccaacagccggggccccagcttctctagcggcctggtgccactgtccctgagagggagccacatgggccccatggagatctacaaaaccgtgagcgcctggaagcggcagcctgtgcgcgtgctgagcctgtttcggaatatcgataaagtcctgaaaagcctgggattcctggagagcggctctggctccggcggtggcaccctgaagtacgtggaggatgtgacaaacgtggtcagacgggatgtggagaagtggggccccttcgatctggtgtacggcagcacccaacccctgggcagctcttgtgaccggtgccctggctggtacatgtttcagttccaccggatcctgcagtacgccctgccgagacaggagtcccagcggccattcttttggattttcatggacaacttgctgctgaccgaggatgaccaggaaactaccactcggttcctgcagaccgaagccgtgaccctgcaggacgtgagaggccgggactaccagaacgccatgcgggtgtggtccaacatccctggactgaaaagcaagcacgcacctctgacccctaaagaagaggagtacctgcaggcccaggtgcggagcagaagcaagctggacgcccctaaggtggatctgctggtgaagaattgcctcctgcccctgagagagtacttcaagtatttcagccagaatagtctgcccctgggcggcccaagcagcggcgcccctcctcccagcggcggcagcccagccggctccccaacctctaccgaggagggcacctctgagtccgccacccccgagagcggccctggcacctccaccgagcccagcgagggcagcgcacccggcagccctgccggcagccccacctccacagaggagggaaccagcaccgagcccagcgaaggcagcgccccaggcaccagcaccgagcctagtgagggcggctctggcggcggcagcgcccaggagattaaacggatcaacaagatcagaagaagacttgtgaaagacagcaacaccaagaaggccggcaagacaggccccatgaaaaccctgctggttagagtgatgacacccgatctgagagagcggctggaaaacctgagaaagaagcctgaaaatatcccccagcccatcagcaatacatctagagccaacctgaataagctgctgaccgattacaccgaaatgaagaaggcgatcctgcatgtgtactgggaagagttccagaaggaccctgtgggcctgatgagccgggtggcccagcctgccagcaagaagatcgatcagaacaagctgaaacctgagatggacgagaagggcaacctgaccaccgccggctttgcctgctctcagtgtggccagcccctgttcgtgtacaagctggagcaggtgtctgagaagggcaaggcttacaccaactacttcggacggtgcaatgtggccgagcacgaaaagctgatcctgctggcccagctgaagcccgagaaggatagcgacgaagccgtgacatatagcctgggaaagtttgggcagagggccctggatttctacagcattcatgtgaccaaggagtccacccaccccgtgaagcccctggcccagatcgccggaaacagatacgcctccggacctgtgggaaaggccctgagcgacgcatgtatgggcacaatcgcctccttcctgtctaagtaccaggacatcatcatcgaacaccagaaggtggtgaagggcaaccagaagagactggagagcctgcgggagctggccggcaaggaaaacctggaataccctagcgtgaccctgccacctcagcctcacaccaaggagggcgttgatgcctacaacgaagtgatcgcccgggtgcgaatgtgggtgaacctgaacctgtggcagaagctgaagctaagcagagatgatgccaagcctctgctgagactgaagggattcccttcctttcctctggtcgagagacaggccaacgaagtggactggtgggacatggtgtgtaacgtgaagaagctgatcaacgagaaaaaggaggatggcaaggtgttttggcagaatctggctggctacaagagacaggaagccctgagaccatacctgagcagcgaggaagatcggaagaagggaaagaaattcgctcggtaccagctgggcgacctgctgctgcacctggaaaagaagcacggcgaggactggggaaaggtgtacgacgaggcctgggagcggattgacaagaaagtggaaggcctgagcaagcacatcaagctggaagaggaacggagaagcgaggacgcccagagcaaggccgccctgaccgactggctgcgggctaaggccagcttcgtgatcgagggcctgaaggaggccgacaaggacgagttctgcagatgcgagctgaagctgcagaagtggtacggggacctgcggggaaagcccttcgccatcgaagccgagaacagcatcctggacatcagcggcttcagcaagcagtacaactgtgccttcatctggcagaaggacggcgtgaagaagctgaacctgtacctgatcatcaactacttcaagggcggcaagctgcggttcaagaagatcaaacctgaagccttcgaagccaacagattctacaccgtgatcaacaaaaagagcggcgagatcgtgcccatggaggtgaacttcaacttcgacgaccccaacctgatcatcctgcctctggcctttggcaagagacagggcagagaattcatctggaacgacctgctgtccctggaaaccggcagcctgaagctggccaacggaagagtgatcgagaagacactgtacaacagaagaacccggcaggatgagcctgccctgttcgtggccctgaccttcgagcggcgggaggtcctggactcctccaatatcaaaccaatgaacctgatcggcgtggcaagaggcgaaaacatccccgccgtgatcgccctgaccgaccccgagggctgcccactgagccggtttaaggatagcctgggaaacccaacccacatcctgagaatcggcgagagctataaggagaagcagcggaccatccaggccaagaaggaggtggagcagcggagagccggcggctacagccggaagtacgccagcaaagccaagaatctggcagacgatatggtgagaaacaccgctagagatctgctgtactacgccgtgacccaggatgccatgctgatcttcgccaacctgagccggggcttcggccggcagggcaagcggaccttcatggccgagagacagtacacacggatggaggactggctgaccgccaagctggcctacgagggcctgagcaagacctacctgtccaagacactggcccagtacacctccaagacatgcagcaactgtgggtttaccatcaccagcgccgactacgacagggtgctggagaagctgaagaagacagcaacaggctggatgaccacaattaacggcaaggagctgaaggtggagggccagattacctactacaacagatacaagagacagaacgtagtcaaggacctgtccgtcgagctggatagactgagcgaagaatctgtgaacaacgacatctcctcctggacaaagggcagaagcggagaagctctgagcctcctgaagaaaagattctcccatagacccgtgcaggagaagttcgtgtgcctgaactgcggcttcgagacacacgcagccgagcaagccgccctgaacatcgccagatcctggctgttcctgcggagccaggagtacaagaaataccagacaaacaagacaaccggcaacaccgataagagagccttcgtcgagacctggcagtccttttaccggaagaagcttaaggaggtgtggaaacctgccgtgcggtctggcggatctggcggaggctccacaagcgcccagggcctggtgctgttcgaggacgtgagcgtggacttcacccagaaggagtggcagctgctggacaggacccagaggctgctgtacagggacgtgatgctggagaactacggccacctggtgagcctgggccactgcgtgagcaagcccgagctgatcctgaagctggagcaggaggaggagccctggatcctgaagggccagctggccagcgagagccaccccgaggtgcagaggaccaccagccccaagaaaaagagaaaagtctaagctgccttctgcggggcttgccttctggccatgcccttcttctctcccttgcacctgtacctcttggtctttgaataaagcctgagtaggaaggctagcaaaaaaaaaaaaaaaaaaaaaaaaaaaaaaaaaaaaaaaaaaaaaaaaaaaaaaaaaaaaaaaaaaaaaaaaaaaaaaaa

SEQ ID NO: 7152 - RNA, 5797 nt, synthetic construct
  source 1..5797: mol_type = other RNA
aggaaataagagagaaaagaagagtaagaagaaatataagagccaccatggcccctaagaagaagcgtaaagtgagccggatggaacgcctcgtctacgaggtgcggcagaagtgcagaaacatcgaggacatctgcatctcctgcggatctctgaacgtgaccctggagcacccactgttcatcggcggcatgtgccagaactgtaaaaactgttttctggagtgtgcctatcaatacgacgatgacggctaccagagctactgcaccatctgttgcggcggaagagaggtgctgatgtgtggaaataacaactgctgccggtgcttctgcgtggaatgcgtggacctgctggtgggccccggcgccgcccaggccgctattaaggaagatccttggaactgctacatgtgcggccacaagggcacatacggcctgctgagacggagagaggactggcctagcagactgcagatgttcttcgccaataaccacgaccaggagttcgacccccctaaggtgtaccctcccgtccccgccgagaagagaaagcccatccgggtcctgagcctgttcgatggcatcgccaccggtctgctggtgctgaaggacctgggcatccaggtggataggtacattgcctccgaggtgtgcgaggactccatcaccgtgggaatggtgcgtcatcagggcaagatcatgtacgtgggcgacgtgcggagcgtgacacagaagcatatccaggagtggggccctttcgacctggtgatcggcggcagcccttgcaatgacctgagcatcgtgaacccagcccggaagggcctgtacgagggaaccggcagactgttcttcgagttttacagactgctgcacgacgcccggcctaaggaaggcgacgaccggcccttcttttggctgttcgagaatgtggtggccatgggagtcagcgacaagcgggatattagccggttcctggagagcaaccccgtgatgatcgatgccaaggaagtgagcgccgcccaccgggccagatacttctggggcaatctgcctggcatgaacagacccctggccagcaccgtgaacgacaagctggagctgcaggagtgcctggagcacggccggatcgccaagttcagcaaggtgagaaccatcaccacccgaagcaacagcatcaaacaaggcaaggaccagcactttcctgtgttcatgaacgagaaggaggacatcctgtggtgtaccgagatggagagagtgttcgggttcccagtccactacacagatgtcagcaacatgtctagactggccagacagagactgctgggaagaagctggtccgtccctgtgatcagacacctgttcgcccctctgaaggagtacttcgcctgcgtgagcagcggcaacagcaacgccaacagccggggccccagcttctctagcggcctggtgccactgtccctgagagggagccacatgggccccatggagatctacaaaaccgtgagcgcctggaagcggcagcctgtgcgcgtgctgagcctgtttcggaatatcgataaagtcctgaaaagcctgggattcctggagagcggctctggctccggcggtggcaccctgaagtacgtggaggatgtgacaaacgtggtcagacgggatgtggagaagtggggccccttcgatctggtgtacggcagcacccaacccctgggcagctcttgtgaccggtgccctggctggtacatgtttcagttccaccggatcctgcagtacgccctgccgagacaggagtcccagcggccattcttttggattttcatggacaacttgctgctgaccgaggatgaccaggaaactaccactcggttcctgcagaccgaagccgtgaccctgcaggacgtgagaggccgggactaccagaacgccatgcgggtgtggtccaacatccctggactgaaaagcaagcacgcacctctgacccctaaagaagaggagtacctgcaggcccaggtgcggagcagaagcaagctggacgcccctaaggtggatctgctggtgaagaattgcctcctgcccctgagagagtacttcaagtatttcagccagaatagtctgcccctgggcggcccaagcagcggcgcccctcctcccagcggcggcagcccagccggctccccaacctctaccgaggagggcacctctgagtccgccacccccgagagcggccctggcacctccaccgagcccagcgagggcagcgcacccggcagccctgccggcagccccacctccacagaggagggaaccagcaccgagcccagcgaaggcagcgccccaggcaccagcaccgagcctagtgagggcggctctggcggcggcagcgcccaggagattaaacggatcaacaagatcagaagaagacttgtgaaagacagcaacaccaagaaggccggcaagacaggccccatgaaaaccctgctggttagagtgatgacacccgatctgagagagcggctggaaaacctgagaaagaagcctgaaaatatcccccagcccatcagcaatacatctagagccaacctgaataagctgctgaccgattacaccgaaatgaagaaggcgatcctgcatgtgtactgggaagagttccagaaggaccctgtgggcctgatgagccgggtggcccagcctgccagcaagaagatcgatcagaacaagctgaaacctgagatggacgagaagggcaacctgaccaccgccggctttgcctgctctcagtgtggccagcccctgttcgtgtacaagctggagcaggtgtctgagaagggcaaggcttacaccaactacttcggacggtgcaatgtggccgagcacgaaaagctgatcctgctggcccagctgaagcccgagaaggatagcgacgaagccgtgacatatagcctgggaaagtttgggcagagggccctggatttctacagcattcatgtgaccaaggagtccacccaccccgtgaagcccctggcccagatcgccggaaacagatacgcctccggacctgtgggaaaggccctgagcgacgcatgtatgggcacaatcgcctccttcctgtctaagtaccaggacatcatcatcgaacaccagaaggtggtgaagggcaaccagaagagactggagagcctgcgggagctggccggcaaggaaaacctggaataccctagcgtgaccctgccacctcagcctcacaccaaggagggcgttgatgcctacaacgaagtgatcgcccgggtgcgaatgtgggtgaacctgaacctgtggcagaagctgaagctaagcagagatgatgccaagcctctgctgagactgaagggattcccttcctttcctctggtcgagagacaggccaacgaagtggactggtgggacatggtgtgtaacgtgaagaagctgatcaacgagaaaaaggaggatggcaaggtgttttggcagaatctggctggctacaagagacaggaagccctgagaccatacctgagcagcgaggaagatcggaagaagggaaagaaattcgctcggtaccagctgggcgacctgctgctgcacctggaaaagaagcacggcgaggactggggaaaggtgtacgacgaggcctgggagcggattgacaagaaagtggaaggcctgagcaagcacatcaagctggaagaggaacggagaagcgaggacgcccagagcaaggccgccctgaccgactggctgcgggctaaggccagcttcgtgatcgagggcctgaaggaggccgacaaggacgagttctgcagatgcgagctgaagctgcagaagtggtacggggacctgcggggaaagcccttcgccatcgaagccgagaacagcatcctggacatcagcggcttcagcaagcagtacaactgtgccttcatctggcagaaggacggcgtgaagaagctgaacctgtacctgatcatcaactacttcaagggcggcaagctgcggttcaagaagatcaaacctgaagccttcgaagccaacagattctacaccgtgatcaacaaaaagagcggcgagatcgtgcccatggaggtgaacttcaacttcgacgaccccaacctgatcatcctgcctctggcctttggcaagagacagggcagagaattcatctggaacgacctgctgtccctggaaaccggcagcctgaagctggccaacggaagagtgatcgagaagacactgtacaacagaagaacccggcaggatgagcctgccctgttcgtggccctgaccttcgagcggcgggaggtcctggactcctccaatatcaaaccaatgaacctgatcggcgtggcaagaggcgaaaacatccccgccgtgatcgccctgaccgaccccgagggctgcccactgagccggtttaaggatagcctgggaaacccaacccacatcctgagaatcggcgagagctataaggagaagcagcggaccatccaggccaagaaggaggtggagcagcggagagccggcggctacagccggaagtacgccagcaaagccaagaatctggcagacgatatggtgagaaacaccgctagagatctgctgtactacgccgtgacccaggatgccatgctgatcttcgccaacctgagccggggcttcggccggcagggcaagcggaccttcatggccgagagacagtacacacggatggaggactggctgaccgccaagctggcctacgagggcctgagcaagacctacctgtccaagacactggcccagtacacctccaagacatgcagcaactgtgggtttaccatcaccagcgccgactacgacagggtgctggagaagctgaagaagacagcaacaggctggatgaccacaattaacggcaaggagctgaaggtggagggccagattacctactacaacagatacaagagacagaacgtagtcaaggacctgtccgtcgagctggatagactgagcgaagaatctgtgaacaacgacatctcctcctggacaaagggcagaagcggagaagctctgagcctcctgaagaaaagattctcccatagacccgtgcaggagaagttcgtgtgcctgaactgcggcttcgagacacacgcagccgagcaagccgccctgaacatcgccagatcctggctgttcctgcggagccaggagtacaagaaataccagacaaacaagacaaccggcaacaccgataagagagccttcgtcgagacctggcagtccttttaccggaagaagcttaaggaggtgtggaaacctgccgtgcggtctggcggatctggcggaggctccacaagcacccagggcagcctgagcttcagggacgtgaccgtgggcttcacccaggaggagtggcagcacctggaccccgcccagaggagcctgtacagggacgtgatgctggagaactacagccacctggtgagcctgggctacagcatcagcaagcccgaggtgatcctgaagctggagcagggcgaggagccctggatcctggaggaggagttccccagccagagcgacctggagctgatcaagagcaccagccccaagaaaaagagaaaagtctaagctgccttctgcggggcttgccttctggccatgcccttcttctctcccttgcacctgtacctcttggtctttgaataaagcctgagtaggaaggctagcaaaaaaaaaaaaaaaaaaaaaaaaaaaaaaaaaaaaaaaaaaaaaaaaaaaaaaaaaaaaaaaaaaaaaaaaaaaaaaaa

SEQ ID NO: 7153 - RNA, 5797 nt, synthetic construct
  source 1..5797: mol_type = other RNA
aggaaataagagagaaaagaagagtaagaagaaatataagagccaccatggcccctaagaagaagcgtaaagtgagccggatggaacgcctcgtctacgaggtgcggcagaagtgcagaaacatcgaggacatctgcatctcctgcggatctctgaacgtgaccctggagcacccactgttcatcggcggcatgtgccagaactgtaaaaactgttttctggagtgtgcctatcaatacgacgatgacggctaccagagctactgcaccatctgttgcggcggaagagaggtgctgatgtgtggaaataacaactgctgccggtgcttctgcgtggaatgcgtggacctgctggtgggccccggcgccgcccaggccgctattaaggaagatccttggaactgctacatgtgcggccacaagggcacatacggcctgctgagacggagagaggactggcctagcagactgcagatgttcttcgccaataaccacgaccaggagttcgacccccctaaggtgtaccctcccgtccccgccgagaagagaaagcccatccgggtcctgagcctgttcgatggcatcgccaccggtctgctggtgctgaaggacctgggcatccaggtggataggtacattgcctccgaggtgtgcgaggactccatcaccgtgggaatggtgcgtcatcagggcaagatcatgtacgtgggcgacgtgcggagcgtgacacagaagcatatccaggagtggggccctttcgacctggtgatcggcggcagcccttgcaatgacctgagcatcgtgaacccagcccggaagggcctgtacgagggaaccggcagactgttcttcgagttttacagactgctgcacgacgcccggcctaaggaaggcgacgaccggcccttcttttggctgttcgagaatgtggtggccatgggagtcagcgacaagcgggatattagccggttcctggagagcaaccccgtgatgatcgatgccaaggaagtgagcgccgcccaccgggccagatacttctggggcaatctgcctggcatgaacagacccctggccagcaccgtgaacgacaagctggagctgcaggagtgcctggagcacggccggatcgccaagttcagcaaggtgagaaccatcaccacccgaagcaacagcatcaaacaaggcaaggaccagcactttcctgtgttcatgaacgagaaggaggacatcctgtggtgtaccgagatggagagagtgttcgggttcccagtccactacacagatgtcagcaacatgtctagactggccagacagagactgctgggaagaagctggtccgtccctgtgatcagacacctgttcgcccctctgaaggagtacttcgcctgcgtgagcagcggcaacagcaacgccaacagccggggccccagcttctctagcggcctggtgccactgtccctgagagggagccacatgggccccatggagatctacaaaaccgtgagcgcctggaagcggcagcctgtgcgcgtgctgagcctgtttcggaatatcgataaagtcctgaaaagcctgggattcctggagagcggctctggctccggcggtggcaccctgaagtacgtggaggatgtgacaaacgtggtcagacgggatgtggagaagtggggccccttcgatctggtgtacggcagcacccaacccctgggcagctcttgtgaccggtgccctggctggtacatgtttcagttccaccggatcctgcagtacgccctgccgagacaggagtcccagcggccattcttttggattttcatggacaacttgctgctgaccgaggatgaccaggaaactaccactcggttcctgcagaccgaagccgtgaccctgcaggacgtgagaggccgggactaccagaacgccatgcgggtgtggtccaacatccctggactgaaaagcaagcacgcacctctgacccctaaagaagaggagtacctgcaggcccaggtgcggagcagaagcaagctggacgcccctaaggtggatctgctggtgaagaattgcctcctgcccctgagagagtacttcaagtatttcagccagaatagtctgcccctgggcggcccaagcagcggcgcccctcctcccagcggcggcagcccagccggctccccaacctctaccgaggagggcacctctgagtccgccacccccgagagcggccctggcacctccaccgagcccagcgagggcagcgcacccggcagccctgccggcagccccacctccacagaggagggaaccagcaccgagcccagcgaaggcagcgccccaggcaccagcaccgagcctagtgagggcggctctggcggcggcagcgcccaggagattaaacggatcaacaagatcagaagaagacttgtgaaagacagcaacaccaagaaggccggcaagacaggccccatgaaaaccctgctggttagagtgatgacacccgatctgagagagcggctggaaaacctgagaaagaagcctgaaaatatcccccagcccatcagcaatacatctagagccaacctgaataagctgctgaccgattacaccgaaatgaagaaggcgatcctgcatgtgtactgggaagagttccagaaggaccctgtgggcctgatgagccgggtggcccagcctgccagcaagaagatcgatcagaacaagctgaaacctgagatggacgagaagggcaacctgaccaccgccggctttgcctgctctcagtgtggccagcccctgttcgtgtacaagctggagcaggtgtctgagaagggcaaggcttacaccaactacttcggacggtgcaatgtggccgagcacgaaaagctgatcctgctggcccagctgaagcccgagaaggatagcgacgaagccgtgacatatagcctgggaaagtttgggcagagggccctggatttctacagcattcatgtgaccaaggagtccacccaccccgtgaagcccctggcccagatcgccggaaacagatacgcctccggacctgtgggaaaggccctgagcgacgcatgtatgggcacaatcgcctccttcctgtctaagtaccaggacatcatcatcgaacaccagaaggtggtgaagggcaaccagaagagactggagagcctgcgggagctggccggcaaggaaaacctggaataccctagcgtgaccctgccacctcagcctcacaccaaggagggcgttgatgcctacaacgaagtgatcgcccgggtgcgaatgtgggtgaacctgaacctgtggcagaagctgaagctaagcagagatgatgccaagcctctgctgagactgaagggattcccttcctttcctctggtcgagagacaggccaacgaagtggactggtgggacatggtgtgtaacgtgaagaagctgatcaacgagaaaaaggaggatggcaaggtgttttggcagaatctggctggctacaagagacaggaagccctgagaccatacctgagcagcgaggaagatcggaagaagggaaagaaattcgctcggtaccagctgggcgacctgctgctgcacctggaaaagaagcacggcgaggactggggaaaggtgtacgacgaggcctgggagcggattgacaagaaagtggaaggcctgagcaagcacatcaagctggaagaggaacggagaagcgaggacgcccagagcaaggccgccctgaccgactggctgcgggctaaggccagcttcgtgatcgagggcctgaaggaggccgacaaggacgagttctgcagatgcgagctgaagctgcagaagtggtacggggacctgcggggaaagcccttcgccatcgaagccgagaacagcatcctggacatcagcggcttcagcaagcagtacaactgtgccttcatctggcagaaggacggcgtgaagaagctgaacctgtacctgatcatcaactacttcaagggcggcaagctgcggttcaagaagatcaaacctgaagccttcgaagccaacagattctacaccgtgatcaacaaaaagagcggcgagatcgtgcccatggaggtgaacttcaacttcgacgaccccaacctgatcatcctgcctctggcctttggcaagagacagggcagagaattcatctggaacgacctgctgtccctggaaaccggcagcctgaagctggccaacggaagagtgatcgagaagacactgtacaacagaagaacccggcaggatgagcctgccctgttcgtggccctgaccttcgagcggcgggaggtcctggactcctccaatatcaaaccaatgaacctgatcggcgtggcaagaggcgaaaacatccccgccgtgatcgccctgaccgaccccgagggctgcccactgagccggtttaaggatagcctgggaaacccaacccacatcctgagaatcggcgagagctataaggagaagcagcggaccatccaggccaagaaggaggtggagcagcggagagccggcggctacagccggaagtacgccagcaaagccaagaatctggcagacgatatggtgagaaacaccgctagagatctgctgtactacgccgtgacccaggatgccatgctgatcttcgccaacctgagccggggcttcggccggcagggcaagcggaccttcatggccgagagacagtacacacggatggaggactggctgaccgccaagctggcctacgagggcctgagcaagacctacctgtccaagacactggcccagtacacctccaagacatgcagcaactgtgggtttaccatcaccagcgccgactacgacagggtgctggagaagctgaagaagacagcaacaggctggatgaccacaattaacggcaaggagctgaaggtggagggccagattacctactacaacagatacaagagacagaacgtagtcaaggacctgtccgtcgagctggatagactgagcgaagaatctgtgaacaacgacatctcctcctggacaaagggcagaagcggagaagctctgagcctcctgaagaaaagattctcccatagacccgtgcaggagaagttcgtgtgcctgaactgcggcttcgagacacacgcagccgagcaagccgccctgaacatcgccagatcctggctgttcctgcggagccaggagtacaagaaataccagacaaacaagacaaccggcaacaccgataagagagccttcgtcgagacctggcagtccttttaccggaagaagcttaaggaggtgtggaaacctgccgtgcggtctggcggatctggcggaggctccacaagccaggccgagctgaccttcgaggacgtggccgtgttcctgagccaggaggagtggggcaggctggaccccgcccagaggggcctgtacagggacgtgatgctggagacctacaggaacctggtgagcctgggcgccggccccgccggccccaagcccggcgtgatcacccagctggagaggggcgacgagccctgggtgctggacacccagggcgtggagggcagggagaggcagaaggtggacaccagccccaagaaaaagagaaaagtctaagctgccttctgcggggcttgccttctggccatgcccttcttctctcccttgcacctgtacctcttggtctttgaataaagcctgagtaggaaggctagcaaaaaaaaaaaaaaaaaaaaaaaaaaaaaaaaaaaaaaaaaaaaaaaaaaaaaaaaaaaaaaaaaaaaaaaaaaaaaaaa

SEQ ID NO: 7154 - RNA, 5797 nt, synthetic construct
  source 1..5797: mol_type = other RNA
aggaaataagagagaaaagaagagtaagaagaaatataagagccaccatggcccctaagaagaagcgtaaagtgagccggatggaacgcctcgtctacgaggtgcggcagaagtgcagaaacatcgaggacatctgcatctcctgcggatctctgaacgtgaccctggagcacccactgttcatcggcggcatgtgccagaactgtaaaaactgttttctggagtgtgcctatcaatacgacgatgacggctaccagagctactgcaccatctgttgcggcggaagagaggtgctgatgtgtggaaataacaactgctgccggtgcttctgcgtggaatgcgtggacctgctggtgggccccggcgccgcccaggccgctattaaggaagatccttggaactgctacatgtgcggccacaagggcacatacggcctgctgagacggagagaggactggcctagcagactgcagatgttcttcgccaataaccacgaccaggagttcgacccccctaaggtgtaccctcccgtccccgccgagaagagaaagcccatccgggtcctgagcctgttcgatggcatcgccaccggtctgctggtgctgaaggacctgggcatccaggtggataggtacattgcctccgaggtgtgcgaggactccatcaccgtgggaatggtgcgtcatcagggcaagatcatgtacgtgggcgacgtgcggagcgtgacacagaagcatatccaggagtggggccctttcgacctggtgatcggcggcagcccttgcaatgacctgagcatcgtgaacccagcccggaagggcctgtacgagggaaccggcagactgttcttcgagttttacagactgctgcacgacgcccggcctaaggaaggcgacgaccggcccttcttttggctgttcgagaatgtggtggccatgggagtcagcgacaagcgggatattagccggttcctggagagcaaccccgtgatgatcgatgccaaggaagtgagcgccgcccaccgggccagatacttctggggcaatctgcctggcatgaacagacccctggccagcaccgtgaacgacaagctggagctgcaggagtgcctggagcacggccggatcgccaagttcagcaaggtgagaaccatcaccacccgaagcaacagcatcaaacaaggcaaggaccagcactttcctgtgttcatgaacgagaaggaggacatcctgtggtgtaccgagatggagagagtgttcgggttcccagtccactacacagatgtcagcaacatgtctagactggccagacagagactgctgggaagaagctggtccgtccctgtgatcagacacctgttcgcccctctgaaggagtacttcgcctgcgtgagcagcggcaacagcaacgccaacagccggggccccagcttctctagcggcctggtgccactgtccctgagagggagccacatgggccccatggagatctacaaaaccgtgagcgcctggaagcggcagcctgtgcgcgtgctgagcctgtttcggaatatcgataaagtcctgaaaagcctgggattcctggagagcggctctggctccggcggtggcaccctgaagtacgtggaggatgtgacaaacgtggtcagacgggatgtggagaagtggggccccttcgatctggtgtacggcagcacccaacccctgggcagctcttgtgaccggtgccctggctggtacatgtttcagttccaccggatcctgcagtacgccctgccgagacaggagtcccagcggccattcttttggattttcatggacaacttgctgctgaccgaggatgaccaggaaactaccactcggttcctgcagaccgaagccgtgaccctgcaggacgtgagaggccgggactaccagaacgccatgcgggtgtggtccaacatccctggactgaaaagcaagcacgcacctctgacccctaaagaagaggagtacctgcaggcccaggtgcggagcagaagcaagctggacgcccctaaggtggatctgctggtgaagaattgcctcctgcccctgagagagtacttcaagtatttcagccagaatagtctgcccctgggcggcccaagcagcggcgcccctcctcccagcggcggcagcccagccggctccccaacctctaccgaggagggcacctctgagtccgccacccccgagagcggccctggcacctccaccgagcccagcgagggcagcgcacccggcagccctgccggcagccccacctccacagaggagggaaccagcaccgagcccagcgaaggcagcgccccaggcaccagcaccgagcctagtgagggcggctctggcggcggcagcgcccaggagattaaacggatcaacaagatcagaagaagacttgtgaaagacagcaacaccaagaaggccggcaagacaggccccatgaaaaccctgctggttagagtgatgacacccgatctgagagagcggctggaaaacctgagaaagaagcctgaaaatatcccccagcccatcagcaatacatctagagccaacctgaataagctgctgaccgattacaccgaaatgaagaaggcgatcctgcatgtgtactgggaagagttccagaaggaccctgtgggcctgatgagccgggtggcccagcctgccagcaagaagatcgatcagaacaagctgaaacctgagatggacgagaagggcaacctgaccaccgccggctttgcctgctctcagtgtggccagcccctgttcgtgtacaagctggagcaggtgtctgagaagggcaaggcttacaccaactacttcggacggtgcaatgtggccgagcacgaaaagctgatcctgctggcccagctgaagcccgagaaggatagcgacgaagccgtgacatatagcctgggaaagtttgggcagagggccctggatttctacagcattcatgtgaccaaggagtccacccaccccgtgaagcccctggcccagatcgccggaaacagatacgcctccggacctgtgggaaaggccctgagcgacgcatgtatgggcacaatcgcctccttcctgtctaagtaccaggacatcatcatcgaacaccagaaggtggtgaagggcaaccagaagagactggagagcctgcgggagctggccggcaaggaaaacctggaataccctagcgtgaccctgccacctcagcctcacaccaaggagggcgttgatgcctacaacgaagtgatcgcccgggtgcgaatgtgggtgaacctgaacctgtggcagaagctgaagctaagcagagatgatgccaagcctctgctgagactgaagggattcccttcctttcctctggtcgagagacaggccaacgaagtggactggtgggacatggtgtgtaacgtgaagaagctgatcaacgagaaaaaggaggatggcaaggtgttttggcagaatctggctggctacaagagacaggaagccctgagaccatacctgagcagcgaggaagatcggaagaagggaaagaaattcgctcggtaccagctgggcgacctgctgctgcacctggaaaagaagcacggcgaggactggggaaaggtgtacgacgaggcctgggagcggattgacaagaaagtggaaggcctgagcaagcacatcaagctggaagaggaacggagaagcgaggacgcccagagcaaggccgccctgaccgactggctgcgggctaaggccagcttcgtgatcgagggcctgaaggaggccgacaaggacgagttctgcagatgcgagctgaagctgcagaagtggtacggggacctgcggggaaagcccttcgccatcgaagccgagaacagcatcctggacatcagcggcttcagcaagcagtacaactgtgccttcatctggcagaaggacggcgtgaagaagctgaacctgtacctgatcatcaactacttcaagggcggcaagctgcggttcaagaagatcaaacctgaagccttcgaagccaacagattctacaccgtgatcaacaaaaagagcggcgagatcgtgcccatggaggtgaacttcaacttcgacgaccccaacctgatcatcctgcctctggcctttggcaagagacagggcagagaattcatctggaacgacctgctgtccctggaaaccggcagcctgaagctggccaacggaagagtgatcgagaagacactgtacaacagaagaacccggcaggatgagcctgccctgttcgtggccctgaccttcgagcggcgggaggtcctggactcctccaatatcaaaccaatgaacctgatcggcgtggcaagaggcgaaaacatccccgccgtgatcgccctgaccgaccccgagggctgcccactgagccggtttaaggatagcctgggaaacccaacccacatcctgagaatcggcgagagctataaggagaagcagcggaccatccaggccaagaaggaggtggagcagcggagagccggcggctacagccggaagtacgccagcaaagccaagaatctggcagacgatatggtgagaaacaccgctagagatctgctgtactacgccgtgacccaggatgccatgctgatcttcgccaacctgagccggggcttcggccggcagggcaagcggaccttcatggccgagagacagtacacacggatggaggactggctgaccgccaagctggcctacgagggcctgagcaagacctacctgtccaagacactggcccagtacacctccaagacatgcagcaactgtgggtttaccatcaccagcgccgactacgacagggtgctggagaagctgaagaagacagcaacaggctggatgaccacaattaacggcaaggagctgaaggtggagggccagattacctactacaacagatacaagagacagaacgtagtcaaggacctgtccgtcgagctggatagactgagcgaagaatctgtgaacaacgacatctcctcctggacaaagggcagaagcggagaagctctgagcctcctgaagaaaagattctcccatagacccgtgcaggagaagttcgtgtgcctgaactgcggcttcgagacacacgcagccgagcaagccgccctgaacatcgccagatcctggctgttcctgcggagccaggagtacaagaaataccagacaaacaagacaaccggcaacaccgataagagagccttcgtcgagacctggcagtccttttaccggaagaagcttaaggaggtgtggaaacctgccgtgcggtctggcggatctggcggaggctccacaagcgcccaggtgcccgtgaccttcgaggacatcgccatctacttcagccaggaggagtgggagtacctggacgagggccagaaggccctgtacagggaggtgatgaaggagaactacgagaccctgctgctgctgggctgccccggcctgaagcccgtgatcatcagcagcatcgagcagggcgaggagccctgcgtgaggaagctgcaggagagggccgagctgtaccccaccgccggcgacgagaccagccccaagaaaaagagaaaagtctaagctgccttctgcggggcttgccttctggccatgcccttcttctctcccttgcacctgtacctcttggtctttgaataaagcctgagtaggaaggctagcaaaaaaaaaaaaaaaaaaaaaaaaaaaaaaaaaaaaaaaaaaaaaaaaaaaaaaaaaaaaaaaaaaaaaaaaaaaaaaaa

SEQ ID NO: 7155 - RNA, 5797 nt, synthetic construct
  source 1..5797: mol_type = other RNA
aggaaataagagagaaaagaagagtaagaagaaatataagagccaccatggcccctaagaagaagcgtaaagtgagccggatggaacgcctcgtctacgaggtgcggcagaagtgcagaaacatcgaggacatctgcatctcctgcggatctctgaacgtgaccctggagcacccactgttcatcggcggcatgtgccagaactgtaaaaactgttttctggagtgtgcctatcaatacgacgatgacggctaccagagctactgcaccatctgttgcggcggaagagaggtgctgatgtgtggaaataacaactgctgccggtgcttctgcgtggaatgcgtggacctgctggtgggccccggcgccgcccaggccgctattaaggaagatccttggaactgctacatgtgcggccacaagggcacatacggcctgctgagacggagagaggactggcctagcagactgcagatgttcttcgccaataaccacgaccaggagttcgacccccctaaggtgtaccctcccgtccccgccgagaagagaaagcccatccgggtcctgagcctgttcgatggcatcgccaccggtctgctggtgctgaaggacctgggcatccaggtggataggtacattgcctccgaggtgtgcgaggactccatcaccgtgggaatggtgcgtcatcagggcaagatcatgtacgtgggcgacgtgcggagcgtgacacagaagcatatccaggagtggggccctttcgacctggtgatcggcggcagcccttgcaatgacctgagcatcgtgaacccagcccggaagggcctgtacgagggaaccggcagactgttcttcgagttttacagactgctgcacgacgcccggcctaaggaaggcgacgaccggcccttcttttggctgttcgagaatgtggtggccatgggagtcagcgacaagcgggatattagccggttcctggagagcaaccccgtgatgatcgatgccaaggaagtgagcgccgcccaccgggccagatacttctggggcaatctgcctggcatgaacagacccctggccagcaccgtgaacgacaagctggagctgcaggagtgcctggagcacggccggatcgccaagttcagcaaggtgagaaccatcaccacccgaagcaacagcatcaaacaaggcaaggaccagcactttcctgtgttcatgaacgagaaggaggacatcctgtggtgtaccgagatggagagagtgttcgggttcccagtccactacacagatgtcagcaacatgtctagactggccagacagagactgctgggaagaagctggtccgtccctgtgatcagacacctgttcgcccctctgaaggagtacttcgcctgcgtgagcagcggcaacagcaacgccaacagccggggccccagcttctctagcggcctggtgccactgtccctgagagggagccacatgggccccatggagatctacaaaaccgtgagcgcctggaagcggcagcctgtgcgcgtgctgagcctgtttcggaatatcgataaagtcctgaaaagcctgggattcctggagagcggctctggctccggcggtggcaccctgaagtacgtggaggatgtgacaaacgtggtcagacgggatgtggagaagtggggccccttcgatctggtgtacggcagcacccaacccctgggcagctcttgtgaccggtgccctggctggtacatgtttcagttccaccggatcctgcagtacgccctgccgagacaggagtcccagcggccattcttttggattttcatggacaacttgctgctgaccgaggatgaccaggaaactaccactcggttcctgcagaccgaagccgtgaccctgcaggacgtgagaggccgggactaccagaacgccatgcgggtgtggtccaacatccctggactgaaaagcaagcacgcacctctgacccctaaagaagaggagtacctgcaggcccaggtgcggagcagaagcaagctggacgcccctaaggtggatctgctggtgaagaattgcctcctgcccctgagagagtacttcaagtatttcagccagaatagtctgcccctgggcggcccaagcagcggcgcccctcctcccagcggcggcagcccagccggctccccaacctctaccgaggagggcacctctgagtccgccacccccgagagcggccctggcacctccaccgagcccagcgagggcagcgcacccggcagccctgccggcagccccacctccacagaggagggaaccagcaccgagcccagcgaaggcagcgccccaggcaccagcaccgagcctagtgagggcggctctggcggcggcagcgcccaggagattaaacggatcaacaagatcagaagaagacttgtgaaagacagcaacaccaagaaggccggcaagacaggccccatgaaaaccctgctggttagagtgatgacacccgatctgagagagcggctggaaaacctgagaaagaagcctgaaaatatcccccagcccatcagcaatacatctagagccaacctgaataagctgctgaccgattacaccgaaatgaagaaggcgatcctgcatgtgtactgggaagagttccagaaggaccctgtgggcctgatgagccgggtggcccagcctgccagcaagaagatcgatcagaacaagctgaaacctgagatggacgagaagggcaacctgaccaccgccggctttgcctgctctcagtgtggccagcccctgttcgtgtacaagctggagcaggtgtctgagaagggcaaggcttacaccaactacttcggacggtgcaatgtggccgagcacgaaaagctgatcctgctggcccagctgaagcccgagaaggatagcgacgaagccgtgacatatagcctgggaaagtttgggcagagggccctggatttctacagcattcatgtgaccaaggagtccacccaccccgtgaagcccctggcccagatcgccggaaacagatacgcctccggacctgtgggaaaggccctgagcgacgcatgtatgggcacaatcgcctccttcctgtctaagtaccaggacatcatcatcgaacaccagaaggtggtgaagggcaaccagaagagactggagagcctgcgggagctggccggcaaggaaaacctggaataccctagcgtgaccctgccacctcagcctcacaccaaggagggcgttgatgcctacaacgaagtgatcgcccgggtgcgaatgtgggtgaacctgaacctgtggcagaagctgaagctaagcagagatgatgccaagcctctgctgagactgaagggattcccttcctttcctctggtcgagagacaggccaacgaagtggactggtgggacatggtgtgtaacgtgaagaagctgatcaacgagaaaaaggaggatggcaaggtgttttggcagaatctggctggctacaagagacaggaagccctgagaccatacctgagcagcgaggaagatcggaagaagggaaagaaattcgctcggtaccagctgggcgacctgctgctgcacctggaaaagaagcacggcgaggactggggaaaggtgtacgacgaggcctgggagcggattgacaagaaagtggaaggcctgagcaagcacatcaagctggaagaggaacggagaagcgaggacgcccagagcaaggccgccctgaccgactggctgcgggctaaggccagcttcgtgatcgagggcctgaaggaggccgacaaggacgagttctgcagatgcgagctgaagctgcagaagtggtacggggacctgcggggaaagcccttcgccatcgaagccgagaacagcatcctggacatcagcggcttcagcaagcagtacaactgtgccttcatctggcagaaggacggcgtgaagaagctgaacctgtacctgatcatcaactacttcaagggcggcaagctgcggttcaagaagatcaaacctgaagccttcgaagccaacagattctacaccgtgatcaacaaaaagagcggcgagatcgtgcccatggaggtgaacttcaacttcgacgaccccaacctgatcatcctgcctctggcctttggcaagagacagggcagagaattcatctggaacgacctgctgtccctggaaaccggcagcctgaagctggccaacggaagagtgatcgagaagacactgtacaacagaagaacccggcaggatgagcctgccctgttcgtggccctgaccttcgagcggcgggaggtcctggactcctccaatatcaaaccaatgaacctgatcggcgtggcaagaggcgaaaacatccccgccgtgatcgccctgaccgaccccgagggctgcccactgagccggtttaaggatagcctgggaaacccaacccacatcctgagaatcggcgagagctataaggagaagcagcggaccatccaggccaagaaggaggtggagcagcggagagccggcggctacagccggaagtacgccagcaaagccaagaatctggcagacgatatggtgagaaacaccgctagagatctgctgtactacgccgtgacccaggatgccatgctgatcttcgccaacctgagccggggcttcggccggcagggcaagcggaccttcatggccgagagacagtacacacggatggaggactggctgaccgccaagctggcctacgagggcctgagcaagacctacctgtccaagacactggcccagtacacctccaagacatgcagcaactgtgggtttaccatcaccagcgccgactacgacagggtgctggagaagctgaagaagacagcaacaggctggatgaccacaattaacggcaaggagctgaaggtggagggccagattacctactacaacagatacaagagacagaacgtagtcaaggacctgtccgtcgagctggatagactgagcgaagaatctgtgaacaacgacatctcctcctggacaaagggcagaagcggagaagctctgagcctcctgaagaaaagattctcccatagacccgtgcaggagaagttcgtgtgcctgaactgcggcttcgagacacacgcagccgagcaagccgccctgaacatcgccagatcctggctgttcctgcggagccaggagtacaagaaataccagacaaacaagacaaccggcaacaccgataagagagccttcgtcgagacctggcagtccttttaccggaagaagcttaaggaggtgtggaaacctgccgtgcggtctggcggatctggcggaggctccacaagccccaaggtgcccgtgagcttcgaggacgtgagcgtgtacttcaccaagaccgagtggaagctgctggacgtgcagcagaggatcctgtacaagaccgtgatgctggagaactaccaccacctggtgagcctgggctgcctgagcaccaagccccacctggtgagctggctggagcagggcgagggcccctggaccaccgacatctggaggacccccgccaccgccaagacccagaccgagggcaccagccccaagaaaaagagaaaagtctaagctgccttctgcggggcttgccttctggccatgcccttcttctctcccttgcacctgtacctcttggtctttgaataaagcctgagtaggaaggctagcaaaaaaaaaaaaaaaaaaaaaaaaaaaaaaaaaaaaaaaaaaaaaaaaaaaaaaaaaaaaaaaaaaaaaaaaaaaaaaaa

SEQ ID NO: 7156 - RNA, 5797 nt, synthetic construct
  source 1..5797: mol_type = other RNA
aggaaataagagagaaaagaagagtaagaagaaatataagagccaccatggcccctaagaagaagcgtaaagtgagccggatggaacgcctcgtctacgaggtgcggcagaagtgcagaaacatcgaggacatctgcatctcctgcggatctctgaacgtgaccctggagcacccactgttcatcggcggcatgtgccagaactgtaaaaactgttttctggagtgtgcctatcaatacgacgatgacggctaccagagctactgcaccatctgttgcggcggaagagaggtgctgatgtgtggaaataacaactgctgccggtgcttctgcgtggaatgcgtggacctgctggtgggccccggcgccgcccaggccgctattaaggaagatccttggaactgctacatgtgcggccacaagggcacatacggcctgctgagacggagagaggactggcctagcagactgcagatgttcttcgccaataaccacgaccaggagttcgacccccctaaggtgtaccctcccgtccccgccgagaagagaaagcccatccgggtcctgagcctgttcgatggcatcgccaccggtctgctggtgctgaaggacctgggcatccaggtggataggtacattgcctccgaggtgtgcgaggactccatcaccgtgggaatggtgcgtcatcagggcaagatcatgtacgtgggcgacgtgcggagcgtgacacagaagcatatccaggagtggggccctttcgacctggtgatcggcggcagcccttgcaatgacctgagcatcgtgaacccagcccggaagggcctgtacgagggaaccggcagactgttcttcgagttttacagactgctgcacgacgcccggcctaaggaaggcgacgaccggcccttcttttggctgttcgagaatgtggtggccatgggagtcagcgacaagcgggatattagccggttcctggagagcaaccccgtgatgatcgatgccaaggaagtgagcgccgcccaccgggccagatacttctggggcaatctgcctggcatgaacagacccctggccagcaccgtgaacgacaagctggagctgcaggagtgcctggagcacggccggatcgccaagttcagcaaggtgagaaccatcaccacccgaagcaacagcatcaaacaaggcaaggaccagcactttcctgtgttcatgaacgagaaggaggacatcctgtggtgtaccgagatggagagagtgttcgggttcccagtccactacacagatgtcagcaacatgtctagactggccagacagagactgctgggaagaagctggtccgtccctgtgatcagacacctgttcgcccctctgaaggagtacttcgcctgcgtgagcagcggcaacagcaacgccaacagccggggccccagcttctctagcggcctggtgccactgtccctgagagggagccacatgggccccatggagatctacaaaaccgtgagcgcctggaagcggcagcctgtgcgcgtgctgagcctgtttcggaatatcgataaagtcctgaaaagcctgggattcctggagagcggctctggctccggcggtggcaccctgaagtacgtggaggatgtgacaaacgtggtcagacgggatgtggagaagtggggccccttcgatctggtgtacggcagcacccaacccctgggcagctcttgtgaccggtgccctggctggtacatgtttcagttccaccggatcctgcagtacgccctgccgagacaggagtcccagcggccattcttttggattttcatggacaacttgctgctgaccgaggatgaccaggaaactaccactcggttcctgcagaccgaagccgtgaccctgcaggacgtgagaggccgggactaccagaacgccatgcgggtgtggtccaacatccctggactgaaaagcaagcacgcacctctgacccctaaagaagaggagtacctgcaggcccaggtgcggagcagaagcaagctggacgcccctaaggtggatctgctggtgaagaattgcctcctgcccctgagagagtacttcaagtatttcagccagaatagtctgcccctgggcggcccaagcagcggcgcccctcctcccagcggcggcagcccagccggctccccaacctctaccgaggagggcacctctgagtccgccacccccgagagcggccctggcacctccaccgagcccagcgagggcagcgcacccggcagccctgccggcagccccacctccacagaggagggaaccagcaccgagcccagcgaaggcagcgccccaggcaccagcaccgagcctagtgagggcggctctggcggcggcagcgcccaggagattaaacggatcaacaagatcagaagaagacttgtgaaagacagcaacaccaagaaggccggcaagacaggccccatgaaaaccctgctggttagagtgatgacacccgatctgagagagcggctggaaaacctgagaaagaagcctgaaaatatcccccagcccatcagcaatacatctagagccaacctgaataagctgctgaccgattacaccgaaatgaagaaggcgatcctgcatgtgtactgggaagagttccagaaggaccctgtgggcctgatgagccgggtggcccagcctgccagcaagaagatcgatcagaacaagctgaaacctgagatggacgagaagggcaacctgaccaccgccggctttgcctgctctcagtgtggccagcccctgttcgtgtacaagctggagcaggtgtctgagaagggcaaggcttacaccaactacttcggacggtgcaatgtggccgagcacgaaaagctgatcctgctggcccagctgaagcccgagaaggatagcgacgaagccgtgacatatagcctgggaaagtttgggcagagggccctggatttctacagcattcatgtgaccaaggagtccacccaccccgtgaagcccctggcccagatcgccggaaacagatacgcctccggacctgtgggaaaggccctgagcgacgcatgtatgggcacaatcgcctccttcctgtctaagtaccaggacatcatcatcgaacaccagaaggtggtgaagggcaaccagaagagactggagagcctgcgggagctggccggcaaggaaaacctggaataccctagcgtgaccctgccacctcagcctcacaccaaggagggcgttgatgcctacaacgaagtgatcgcccgggtgcgaatgtgggtgaacctgaacctgtggcagaagctgaagctaagcagagatgatgccaagcctctgctgagactgaagggattcccttcctttcctctggtcgagagacaggccaacgaagtggactggtgggacatggtgtgtaacgtgaagaagctgatcaacgagaaaaaggaggatggcaaggtgttttggcagaatctggctggctacaagagacaggaagccctgagaccatacctgagcagcgaggaagatcggaagaagggaaagaaattcgctcggtaccagctgggcgacctgctgctgcacctggaaaagaagcacggcgaggactggggaaaggtgtacgacgaggcctgggagcggattgacaagaaagtggaaggcctgagcaagcacatcaagctggaagaggaacggagaagcgaggacgcccagagcaaggccgccctgaccgactggctgcgggctaaggccagcttcgtgatcgagggcctgaaggaggccgacaaggacgagttctgcagatgcgagctgaagctgcagaagtggtacggggacctgcggggaaagcccttcgccatcgaagccgagaacagcatcctggacatcagcggcttcagcaagcagtacaactgtgccttcatctggcagaaggacggcgtgaagaagctgaacctgtacctgatcatcaactacttcaagggcggcaagctgcggttcaagaagatcaaacctgaagccttcgaagccaacagattctacaccgtgatcaacaaaaagagcggcgagatcgtgcccatggaggtgaacttcaacttcgacgaccccaacctgatcatcctgcctctggcctttggcaagagacagggcagagaattcatctggaacgacctgctgtccctggaaaccggcagcctgaagctggccaacggaagagtgatcgagaagacactgtacaacagaagaacccggcaggatgagcctgccctgttcgtggccctgaccttcgagcggcgggaggtcctggactcctccaatatcaaaccaatgaacctgatcggcgtggcaagaggcgaaaacatccccgccgtgatcgccctgaccgaccccgagggctgcccactgagccggtttaaggatagcctgggaaacccaacccacatcctgagaatcggcgagagctataaggagaagcagcggaccatccaggccaagaaggaggtggagcagcggagagccggcggctacagccggaagtacgccagcaaagccaagaatctggcagacgatatggtgagaaacaccgctagagatctgctgtactacgccgtgacccaggatgccatgctgatcttcgccaacctgagccggggcttcggccggcagggcaagcggaccttcatggccgagagacagtacacacggatggaggactggctgaccgccaagctggcctacgagggcctgagcaagacctacctgtccaagacactggcccagtacacctccaagacatgcagcaactgtgggtttaccatcaccagcgccgactacgacagggtgctggagaagctgaagaagacagcaacaggctggatgaccacaattaacggcaaggagctgaaggtggagggccagattacctactacaacagatacaagagacagaacgtagtcaaggacctgtccgtcgagctggatagactgagcgaagaatctgtgaacaacgacatctcctcctggacaaagggcagaagcggagaagctctgagcctcctgaagaaaagattctcccatagacccgtgcaggagaagttcgtgtgcctgaactgcggcttcgagacacacgcagccgagcaagccgccctgaacatcgccagatcctggctgttcctgcggagccaggagtacaagaaataccagacaaacaagacaaccggcaacaccgataagagagccttcgtcgagacctggcagtccttttaccggaagaagcttaaggaggtgtggaaacctgccgtgcggtctggcggatctggcggaggctccacaagcacccaggtgagcgtgaccttcgacgacgtggccgtgaccttcacccaggaggagtggaggcagctggaccccgcccagaggaccctgtaccaggaggtgatgctggagaactgcaggctgctggtgagcctgggctgccccgtgcccaggctggagctgatcttccagctggagcagggccagaagctgtggaccgtgaagaaggacctgagcaggagcacctgccccggcaagaggtgcaggaccagccccaagaaaaagagaaaagtctaagctgccttctgcggggcttgccttctggccatgcccttcttctctcccttgcacctgtacctcttggtctttgaataaagcctgagtaggaaggctagcaaaaaaaaaaaaaaaaaaaaaaaaaaaaaaaaaaaaaaaaaaaaaaaaaaaaaaaaaaaaaaaaaaaaaaaaaaaaaaaa

SEQ ID NO: 7157 - RNA, 5797 nt, synthetic construct
  source 1..5797: mol_type = other RNA
aggaaataagagagaaaagaagagtaagaagaaatataagagccaccatggcccctaagaagaagcgtaaagtgagccggatggaacgcctcgtctacgaggtgcggcagaagtgcagaaacatcgaggacatctgcatctcctgcggatctctgaacgtgaccctggagcacccactgttcatcggcggcatgtgccagaactgtaaaaactgttttctggagtgtgcctatcaatacgacgatgacggctaccagagctactgcaccatctgttgcggcggaagagaggtgctgatgtgtggaaataacaactgctgccggtgcttctgcgtggaatgcgtggacctgctggtgggccccggcgccgcccaggccgctattaaggaagatccttggaactgctacatgtgcggccacaagggcacatacggcctgctgagacggagagaggactggcctagcagactgcagatgttcttcgccaataaccacgaccaggagttcgacccccctaaggtgtaccctcccgtccccgccgagaagagaaagcccatccgggtcctgagcctgttcgatggcatcgccaccggtctgctggtgctgaaggacctgggcatccaggtggataggtacattgcctccgaggtgtgcgaggactccatcaccgtgggaatggtgcgtcatcagggcaagatcatgtacgtgggcgacgtgcggagcgtgacacagaagcatatccaggagtggggccctttcgacctggtgatcggcggcagcccttgcaatgacctgagcatcgtgaacccagcccggaagggcctgtacgagggaaccggcagactgttcttcgagttttacagactgctgcacgacgcccggcctaaggaaggcgacgaccggcccttcttttggctgttcgagaatgtggtggccatgggagtcagcgacaagcgggatattagccggttcctggagagcaaccccgtgatgatcgatgccaaggaagtgagcgccgcccaccgggccagatacttctggggcaatctgcctggcatgaacagacccctggccagcaccgtgaacgacaagctggagctgcaggagtgcctggagcacggccggatcgccaagttcagcaaggtgagaaccatcaccacccgaagcaacagcatcaaacaaggcaaggaccagcactttcctgtgttcatgaacgagaaggaggacatcctgtggtgtaccgagatggagagagtgttcgggttcccagtccactacacagatgtcagcaacatgtctagactggccagacagagactgctgggaagaagctggtccgtccctgtgatcagacacctgttcgcccctctgaaggagtacttcgcctgcgtgagcagcggcaacagcaacgccaacagccggggccccagcttctctagcggcctggtgccactgtccctgagagggagccacatgggccccatggagatctacaaaaccgtgagcgcctggaagcggcagcctgtgcgcgtgctgagcctgtttcggaatatcgataaagtcctgaaaagcctgggattcctggagagcggctctggctccggcggtggcaccctgaagtacgtggaggatgtgacaaacgtggtcagacgggatgtggagaagtggggccccttcgatctggtgtacggcagcacccaacccctgggcagctcttgtgaccggtgccctggctggtacatgtttcagttccaccggatcctgcagtacgccctgccgagacaggagtcccagcggccattcttttggattttcatggacaacttgctgctgaccgaggatgaccaggaaactaccactcggttcctgcagaccgaagccgtgaccctgcaggacgtgagaggccgggactaccagaacgccatgcgggtgtggtccaacatccctggactgaaaagcaagcacgcacctctgacccctaaagaagaggagtacctgcaggcccaggtgcggagcagaagcaagctggacgcccctaaggtggatctgctggtgaagaattgcctcctgcccctgagagagtacttcaagtatttcagccagaatagtctgcccctgggcggcccaagcagcggcgcccctcctcccagcggcggcagcccagccggctccccaacctctaccgaggagggcacctctgagtccgccacccccgagagcggccctggcacctccaccgagcccagcgagggcagcgcacccggcagccctgccggcagccccacctccacagaggagggaaccagcaccgagcccagcgaaggcagcgccccaggcaccagcaccgagcctagtgagggcggctctggcggcggcagcgcccaggagattaaacggatcaacaagatcagaagaagacttgtgaaagacagcaacaccaagaaggccggcaagacaggccccatgaaaaccctgctggttagagtgatgacacccgatctgagagagcggctggaaaacctgagaaagaagcctgaaaatatcccccagcccatcagcaatacatctagagccaacctgaataagctgctgaccgattacaccgaaatgaagaaggcgatcctgcatgtgtactgggaagagttccagaaggaccctgtgggcctgatgagccgggtggcccagcctgccagcaagaagatcgatcagaacaagctgaaacctgagatggacgagaagggcaacctgaccaccgccggctttgcctgctctcagtgtggccagcccctgttcgtgtacaagctggagcaggtgtctgagaagggcaaggcttacaccaactacttcggacggtgcaatgtggccgagcacgaaaagctgatcctgctggcccagctgaagcccgagaaggatagcgacgaagccgtgacatatagcctgggaaagtttgggcagagggccctggatttctacagcattcatgtgaccaaggagtccacccaccccgtgaagcccctggcccagatcgccggaaacagatacgcctccggacctgtgggaaaggccctgagcgacgcatgtatgggcacaatcgcctccttcctgtctaagtaccaggacatcatcatcgaacaccagaaggtggtgaagggcaaccagaagagactggagagcctgcgggagctggccggcaaggaaaacctggaataccctagcgtgaccctgccacctcagcctcacaccaaggagggcgttgatgcctacaacgaagtgatcgcccgggtgcgaatgtgggtgaacctgaacctgtggcagaagctgaagctaagcagagatgatgccaagcctctgctgagactgaagggattcccttcctttcctctggtcgagagacaggccaacgaagtggactggtgggacatggtgtgtaacgtgaagaagctgatcaacgagaaaaaggaggatggcaaggtgttttggcagaatctggctggctacaagagacaggaagccctgagaccatacctgagcagcgaggaagatcggaagaagggaaagaaattcgctcggtaccagctgggcgacctgctgctgcacctggaaaagaagcacggcgaggactggggaaaggtgtacgacgaggcctgggagcggattgacaagaaagtggaaggcctgagcaagcacatcaagctggaagaggaacggagaagcgaggacgcccagagcaaggccgccctgaccgactggctgcgggctaaggccagcttcgtgatcgagggcctgaaggaggccgacaaggacgagttctgcagatgcgagctgaagctgcagaagtggtacggggacctgcggggaaagcccttcgccatcgaagccgagaacagcatcctggacatcagcggcttcagcaagcagtacaactgtgccttcatctggcagaaggacggcgtgaagaagctgaacctgtacctgatcatcaactacttcaagggcggcaagctgcggttcaagaagatcaaacctgaagccttcgaagccaacagattctacaccgtgatcaacaaaaagagcggcgagatcgtgcccatggaggtgaacttcaacttcgacgaccccaacctgatcatcctgcctctggcctttggcaagagacagggcagagaattcatctggaacgacctgctgtccctggaaaccggcagcctgaagctggccaacggaagagtgatcgagaagacactgtacaacagaagaacccggcaggatgagcctgccctgttcgtggccctgaccttcgagcggcgggaggtcctggactcctccaatatcaaaccaatgaacctgatcggcgtggcaagaggcgaaaacatccccgccgtgatcgccctgaccgaccccgagggctgcccactgagccggtttaaggatagcctgggaaacccaacccacatcctgagaatcggcgagagctataaggagaagcagcggaccatccaggccaagaaggaggtggagcagcggagagccggcggctacagccggaagtacgccagcaaagccaagaatctggcagacgatatggtgagaaacaccgctagagatctgctgtactacgccgtgacccaggatgccatgctgatcttcgccaacctgagccggggcttcggccggcagggcaagcggaccttcatggccgagagacagtacacacggatggaggactggctgaccgccaagctggcctacgagggcctgagcaagacctacctgtccaagacactggcccagtacacctccaagacatgcagcaactgtgggtttaccatcaccagcgccgactacgacagggtgctggagaagctgaagaagacagcaacaggctggatgaccacaattaacggcaaggagctgaaggtggagggccagattacctactacaacagatacaagagacagaacgtagtcaaggacctgtccgtcgagctggatagactgagcgaagaatctgtgaacaacgacatctcctcctggacaaagggcagaagcggagaagctctgagcctcctgaagaaaagattctcccatagacccgtgcaggagaagttcgtgtgcctgaactgcggcttcgagacacacgcagccgagcaagccgccctgaacatcgccagatcctggctgttcctgcggagccaggagtacaagaaataccagacaaacaagacaaccggcaacaccgataagagagccttcgtcgagacctggcagtccttttaccggaagaagcttaaggaggtgtggaaacctgccgtgcggtctggcggatctggcggaggctccacaagccaggcccaggagaccctgaccttcgaggacgtggccgtggacttcacctgggaggagtggcagctgctggcccccccccagaaggacctgtacagggacgtgatgctggagaactacagcaacctgctgagcgtgggcttccaggccagcaagcccaacgtgctgagcaagctgggccagggcgagccctggaccatggaggacgagatccactgccagaccaggagcgagatctggaaggtgaccagccccaagaaaaagagaaaagtctaagctgccttctgcggggcttgccttctggccatgcccttcttctctcccttgcacctgtacctcttggtctttgaataaagcctgagtaggaaggctagcaaaaaaaaaaaaaaaaaaaaaaaaaaaaaaaaaaaaaaaaaaaaaaaaaaaaaaaaaaaaaaaaaaaaaaaaaaaaaaaa

SEQ ID NO: 7158 - RNA, 5797 nt, synthetic construct
  source 1..5797: mol_type = other RNA
aggaaataagagagaaaagaagagtaagaagaaatataagagccaccatggcccctaagaagaagcgtaaagtgagccggatggaacgcctcgtctacgaggtgcggcagaagtgcagaaacatcgaggacatctgcatctcctgcggatctctgaacgtgaccctggagcacccactgttcatcggcggcatgtgccagaactgtaaaaactgttttctggagtgtgcctatcaatacgacgatgacggctaccagagctactgcaccatctgttgcggcggaagagaggtgctgatgtgtggaaataacaactgctgccggtgcttctgcgtggaatgcgtggacctgctggtgggccccggcgccgcccaggccgctattaaggaagatccttggaactgctacatgtgcggccacaagggcacatacggcctgctgagacggagagaggactggcctagcagactgcagatgttcttcgccaataaccacgaccaggagttcgacccccctaaggtgtaccctcccgtccccgccgagaagagaaagcccatccgggtcctgagcctgttcgatggcatcgccaccggtctgctggtgctgaaggacctgggcatccaggtggataggtacattgcctccgaggtgtgcgaggactccatcaccgtgggaatggtgcgtcatcagggcaagatcatgtacgtgggcgacgtgcggagcgtgacacagaagcatatccaggagtggggccctttcgacctggtgatcggcggcagcccttgcaatgacctgagcatcgtgaacccagcccggaagggcctgtacgagggaaccggcagactgttcttcgagttttacagactgctgcacgacgcccggcctaaggaaggcgacgaccggcccttcttttggctgttcgagaatgtggtggccatgggagtcagcgacaagcgggatattagccggttcctggagagcaaccccgtgatgatcgatgccaaggaagtgagcgccgcccaccgggccagatacttctggggcaatctgcctggcatgaacagacccctggccagcaccgtgaacgacaagctggagctgcaggagtgcctggagcacggccggatcgccaagttcagcaaggtgagaaccatcaccacccgaagcaacagcatcaaacaaggcaaggaccagcactttcctgtgttcatgaacgagaaggaggacatcctgtggtgtaccgagatggagagagtgttcgggttcccagtccactacacagatgtcagcaacatgtctagactggccagacagagactgctgggaagaagctggtccgtccctgtgatcagacacctgttcgcccctctgaaggagtacttcgcctgcgtgagcagcggcaacagcaacgccaacagccggggccccagcttctctagcggcctggtgccactgtccctgagagggagccacatgggccccatggagatctacaaaaccgtgagcgcctggaagcggcagcctgtgcgcgtgctgagcctgtttcggaatatcgataaagtcctgaaaagcctgggattcctggagagcggctctggctccggcggtggcaccctgaagtacgtggaggatgtgacaaacgtggtcagacgggatgtggagaagtggggccccttcgatctggtgtacggcagcacccaacccctgggcagctcttgtgaccggtgccctggctggtacatgtttcagttccaccggatcctgcagtacgccctgccgagacaggagtcccagcggccattcttttggattttcatggacaacttgctgctgaccgaggatgaccaggaaactaccactcggttcctgcagaccgaagccgtgaccctgcaggacgtgagaggccgggactaccagaacgccatgcgggtgtggtccaacatccctggactgaaaagcaagcacgcacctctgacccctaaagaagaggagtacctgcaggcccaggtgcggagcagaagcaagctggacgcccctaaggtggatctgctggtgaagaattgcctcctgcccctgagagagtacttcaagtatttcagccagaatagtctgcccctgggcggcccaagcagcggcgcccctcctcccagcggcggcagcccagccggctccccaacctctaccgaggagggcacctctgagtccgccacccccgagagcggccctggcacctccaccgagcccagcgagggcagcgcacccggcagccctgccggcagccccacctccacagaggagggaaccagcaccgagcccagcgaaggcagcgccccaggcaccagcaccgagcctagtgagggcggctctggcggcggcagcgcccaggagattaaacggatcaacaagatcagaagaagacttgtgaaagacagcaacaccaagaaggccggcaagacaggccccatgaaaaccctgctggttagagtgatgacacccgatctgagagagcggctggaaaacctgagaaagaagcctgaaaatatcccccagcccatcagcaatacatctagagccaacctgaataagctgctgaccgattacaccgaaatgaagaaggcgatcctgcatgtgtactgggaagagttccagaaggaccctgtgggcctgatgagccgggtggcccagcctgccagcaagaagatcgatcagaacaagctgaaacctgagatggacgagaagggcaacctgaccaccgccggctttgcctgctctcagtgtggccagcccctgttcgtgtacaagctggagcaggtgtctgagaagggcaaggcttacaccaactacttcggacggtgcaatgtggccgagcacgaaaagctgatcctgctggcccagctgaagcccgagaaggatagcgacgaagccgtgacatatagcctgggaaagtttgggcagagggccctggatttctacagcattcatgtgaccaaggagtccacccaccccgtgaagcccctggcccagatcgccggaaacagatacgcctccggacctgtgggaaaggccctgagcgacgcatgtatgggcacaatcgcctccttcctgtctaagtaccaggacatcatcatcgaacaccagaaggtggtgaagggcaaccagaagagactggagagcctgcgggagctggccggcaaggaaaacctggaataccctagcgtgaccctgccacctcagcctcacaccaaggagggcgttgatgcctacaacgaagtgatcgcccgggtgcgaatgtgggtgaacctgaacctgtggcagaagctgaagctaagcagagatgatgccaagcctctgctgagactgaagggattcccttcctttcctctggtcgagagacaggccaacgaagtggactggtgggacatggtgtgtaacgtgaagaagctgatcaacgagaaaaaggaggatggcaaggtgttttggcagaatctggctggctacaagagacaggaagccctgagaccatacctgagcagcgaggaagatcggaagaagggaaagaaattcgctcggtaccagctgggcgacctgctgctgcacctggaaaagaagcacggcgaggactggggaaaggtgtacgacgaggcctgggagcggattgacaagaaagtggaaggcctgagcaagcacatcaagctggaagaggaacggagaagcgaggacgcccagagcaaggccgccctgaccgactggctgcgggctaaggccagcttcgtgatcgagggcctgaaggaggccgacaaggacgagttctgcagatgcgagctgaagctgcagaagtggtacggggacctgcggggaaagcccttcgccatcgaagccgagaacagcatcctggacatcagcggcttcagcaagcagtacaactgtgccttcatctggcagaaggacggcgtgaagaagctgaacctgtacctgatcatcaactacttcaagggcggcaagctgcggttcaagaagatcaaacctgaagccttcgaagccaacagattctacaccgtgatcaacaaaaagagcggcgagatcgtgcccatggaggtgaacttcaacttcgacgaccccaacctgatcatcctgcctctggcctttggcaagagacagggcagagaattcatctggaacgacctgctgtccctggaaaccggcagcctgaagctggccaacggaagagtgatcgagaagacactgtacaacagaagaacccggcaggatgagcctgccctgttcgtggccctgaccttcgagcggcgggaggtcctggactcctccaatatcaaaccaatgaacctgatcggcgtggcaagaggcgaaaacatccccgccgtgatcgccctgaccgaccccgagggctgcccactgagccggtttaaggatagcctgggaaacccaacccacatcctgagaatcggcgagagctataaggagaagcagcggaccatccaggccaagaaggaggtggagcagcggagagccggcggctacagccggaagtacgccagcaaagccaagaatctggcagacgatatggtgagaaacaccgctagagatctgctgtactacgccgtgacccaggatgccatgctgatcttcgccaacctgagccggggcttcggccggcagggcaagcggaccttcatggccgagagacagtacacacggatggaggactggctgaccgccaagctggcctacgagggcctgagcaagacctacctgtccaagacactggcccagtacacctccaagacatgcagcaactgtgggtttaccatcaccagcgccgactacgacagggtgctggagaagctgaagaagacagcaacaggctggatgaccacaattaacggcaaggagctgaaggtggagggccagattacctactacaacagatacaagagacagaacgtagtcaaggacctgtccgtcgagctggatagactgagcgaagaatctgtgaacaacgacatctcctcctggacaaagggcagaagcggagaagctctgagcctcctgaagaaaagattctcccatagacccgtgcaggagaagttcgtgtgcctgaactgcggcttcgagacacacgcagccgagcaagccgccctgaacatcgccagatcctggctgttcctgcggagccaggagtacaagaaataccagacaaacaagacaaccggcaacaccgataagagagccttcgtcgagacctggcagtccttttaccggaagaagcttaaggaggtgtggaaacctgccgtgcggtctggcggatctggcggaggctccacaagcccccagggcagcctgaccttcagggacgtggccatcgagttcagccaggaggagtggaagtgcctggaccccatccagaaggccctgtacagggacgtgatgctggagaactacaggaacctgggcttcctgggcctgtgcctgcccgacctgaacatcatcagcatgctggaggagggcaaggagccctggaccgtggtgagccaggtgaagatcgccaggaaccccaactggggcgagtgcaccagccccaagaaaaagagaaaagtctaagctgccttctgcggggcttgccttctggccatgcccttcttctctcccttgcacctgtacctcttggtctttgaataaagcctgagtaggaaggctagcaaaaaaaaaaaaaaaaaaaaaaaaaaaaaaaaaaaaaaaaaaaaaaaaaaaaaaaaaaaaaaaaaaaaaaaaaaaaaaaa

SEQ ID NO: 7159 - RNA, 5806 nt, synthetic construct
  source 1..5806: mol_type = other RNA
aggaaataagagagaaaagaagagtaagaagaaatataagagccaccatggcccctaagaagaagcgtaaagtgagccggatggaacgcctcgtctacgaggtgcggcagaagtgcagaaacatcgaggacatctgcatctcctgcggatctctgaacgtgaccctggagcacccactgttcatcggcggcatgtgccagaactgtaaaaactgttttctggagtgtgcctatcaatacgacgatgacggctaccagagctactgcaccatctgttgcggcggaagagaggtgctgatgtgtggaaataacaactgctgccggtgcttctgcgtggaatgcgtggacctgctggtgggccccggcgccgcccaggccgctattaaggaagatccttggaactgctacatgtgcggccacaagggcacatacggcctgctgagacggagagaggactggcctagcagactgcagatgttcttcgccaataaccacgaccaggagttcgacccccctaaggtgtaccctcccgtccccgccgagaagagaaagcccatccgggtcctgagcctgttcgatggcatcgccaccggtctgctggtgctgaaggacctgggcatccaggtggataggtacattgcctccgaggtgtgcgaggactccatcaccgtgggaatggtgcgtcatcagggcaagatcatgtacgtgggcgacgtgcggagcgtgacacagaagcatatccaggagtggggccctttcgacctggtgatcggcggcagcccttgcaatgacctgagcatcgtgaacccagcccggaagggcctgtacgagggaaccggcagactgttcttcgagttttacagactgctgcacgacgcccggcctaaggaaggcgacgaccggcccttcttttggctgttcgagaatgtggtggccatgggagtcagcgacaagcgggatattagccggttcctggagagcaaccccgtgatgatcgatgccaaggaagtgagcgccgcccaccgggccagatacttctggggcaatctgcctggcatgaacagacccctggccagcaccgtgaacgacaagctggagctgcaggagtgcctggagcacggccggatcgccaagttcagcaaggtgagaaccatcaccacccgaagcaacagcatcaaacaaggcaaggaccagcactttcctgtgttcatgaacgagaaggaggacatcctgtggtgtaccgagatggagagagtgttcgggttcccagtccactacacagatgtcagcaacatgtctagactggccagacagagactgctgggaagaagctggtccgtccctgtgatcagacacctgttcgcccctctgaaggagtacttcgcctgcgtgagcagcggcaacagcaacgccaacagccggggccccagcttctctagcggcctggtgccactgtccctgagagggagccacatgggccccatggagatctacaaaaccgtgagcgcctggaagcggcagcctgtgcgcgtgctgagcctgtttcggaatatcgataaagtcctgaaaagcctgggattcctggagagcggctctggctccggcggtggcaccctgaagtacgtggaggatgtgacaaacgtggtcagacgggatgtggagaagtggggccccttcgatctggtgtacggcagcacccaacccctgggcagctcttgtgaccggtgccctggctggtacatgtttcagttccaccggatcctgcagtacgccctgccgagacaggagtcccagcggccattcttttggattttcatggacaacttgctgctgaccgaggatgaccaggaaactaccactcggttcctgcagaccgaagccgtgaccctgcaggacgtgagaggccgggactaccagaacgccatgcgggtgtggtccaacatccctggactgaaaagcaagcacgcacctctgacccctaaagaagaggagtacctgcaggcccaggtgcggagcagaagcaagctggacgcccctaaggtggatctgctggtgaagaattgcctcctgcccctgagagagtacttcaagtatttcagccagaatagtctgcccctgggcggcccaagcagcggcgcccctcctcccagcggcggcagcccagccggctccccaacctctaccgaggagggcacctctgagtccgccacccccgagagcggccctggcacctccaccgagcccagcgagggcagcgcacccggcagccctgccggcagccccacctccacagaggagggaaccagcaccgagcccagcgaaggcagcgccccaggcaccagcaccgagcctagtgagggcggctctggcggcggcagcgcccaggagattaaacggatcaacaagatcagaagaagacttgtgaaagacagcaacaccaagaaggccggcaagacaggccccatgaaaaccctgctggttagagtgatgacacccgatctgagagagcggctggaaaacctgagaaagaagcctgaaaatatcccccagcccatcagcaatacatctagagccaacctgaataagctgctgaccgattacaccgaaatgaagaaggcgatcctgcatgtgtactgggaagagttccagaaggaccctgtgggcctgatgagccgggtggcccagcctgccagcaagaagatcgatcagaacaagctgaaacctgagatggacgagaagggcaacctgaccaccgccggctttgcctgctctcagtgtggccagcccctgttcgtgtacaagctggagcaggtgtctgagaagggcaaggcttacaccaactacttcggacggtgcaatgtggccgagcacgaaaagctgatcctgctggcccagctgaagcccgagaaggatagcgacgaagccgtgacatatagcctgggaaagtttgggcagagggccctggatttctacagcattcatgtgaccaaggagtccacccaccccgtgaagcccctggcccagatcgccggaaacagatacgcctccggacctgtgggaaaggccctgagcgacgcatgtatgggcacaatcgcctccttcctgtctaagtaccaggacatcatcatcgaacaccagaaggtggtgaagggcaaccagaagagactggagagcctgcgggagctggccggcaaggaaaacctggaataccctagcgtgaccctgccacctcagcctcacaccaaggagggcgttgatgcctacaacgaagtgatcgcccgggtgcgaatgtgggtgaacctgaacctgtggcagaagctgaagctaagcagagatgatgccaagcctctgctgagactgaagggattcccttcctttcctctggtcgagagacaggccaacgaagtggactggtgggacatggtgtgtaacgtgaagaagctgatcaacgagaaaaaggaggatggcaaggtgttttggcagaatctggctggctacaagagacaggaagccctgagaccatacctgagcagcgaggaagatcggaagaagggaaagaaattcgctcggtaccagctgggcgacctgctgctgcacctggaaaagaagcacggcgaggactggggaaaggtgtacgacgaggcctgggagcggattgacaagaaagtggaaggcctgagcaagcacatcaagctggaagaggaacggagaagcgaggacgcccagagcaaggccgccctgaccgactggctgcgggctaaggccagcttcgtgatcgagggcctgaaggaggccgacaaggacgagttctgcagatgcgagctgaagctgcagaagtggtacggggacctgcggggaaagcccttcgccatcgaagccgagaacagcatcctggacatcagcggcttcagcaagcagtacaactgtgccttcatctggcagaaggacggcgtgaagaagctgaacctgtacctgatcatcaactacttcaagggcggcaagctgcggttcaagaagatcaaacctgaagccttcgaagccaacagattctacaccgtgatcaacaaaaagagcggcgagatcgtgcccatggaggtgaacttcaacttcgacgaccccaacctgatcatcctgcctctggcctttggcaagagacagggcagagaattcatctggaacgacctgctgtccctggaaaccggcagcctgaagctggccaacggaagagtgatcgagaagacactgtacaacagaagaacccggcaggatgagcctgccctgttcgtggccctgaccttcgagcggcgggaggtcctggactcctccaatatcaaaccaatgaacctgatcggcgtggcaagaggcgaaaacatccccgccgtgatcgccctgaccgaccccgagggctgcccactgagccggtttaaggatagcctgggaaacccaacccacatcctgagaatcggcgagagctataaggagaagcagcggaccatccaggccaagaaggaggtggagcagcggagagccggcggctacagccggaagtacgccagcaaagccaagaatctggcagacgatatggtgagaaacaccgctagagatctgctgtactacgccgtgacccaggatgccatgctgatcttcgccaacctgagccggggcttcggccggcagggcaagcggaccttcatggccgagagacagtacacacggatggaggactggctgaccgccaagctggcctacgagggcctgagcaagacctacctgtccaagacactggcccagtacacctccaagacatgcagcaactgtgggtttaccatcaccagcgccgactacgacagggtgctggagaagctgaagaagacagcaacaggctggatgaccacaattaacggcaaggagctgaaggtggagggccagattacctactacaacagatacaagagacagaacgtagtcaaggacctgtccgtcgagctggatagactgagcgaagaatctgtgaacaacgacatctcctcctggacaaagggcagaagcggagaagctctgagcctcctgaagaaaagattctcccatagacccgtgcaggagaagttcgtgtgcctgaactgcggcttcgagacacacgcagccgagcaagccgccctgaacatcgccagatcctggctgttcctgcggagccaggagtacaagaaataccagacaaacaagacaaccggcaacaccgataagagagccttcgtcgagacctggcagtccttttaccggaagaagcttaaggaggtgtggaaacctgccgtgcggtctggcggatctggcggaggctccacaagcgtgacctacaacgacgtgcacatcgacttcacctgggaggagtggaccctgctggacctgagccagaagaacctgtacaaggacgtgatgctggagacctactggaacctgctgaccatcggctacagctgggaggaccacaacatcgaggagcactgccagagcagcaggaggtacgagaggcacgagaggagccaggccggcgagaagcccagcatctacacccagtgcatcaaggccttcgagcacctgaccagccccaagaaaaagagaaaagtctaagctgccttctgcggggcttgccttctggccatgcccttcttctctcccttgcacctgtacctcttggtctttgaataaagcctgagtaggaaggctagcaaaaaaaaaaaaaaaaaaaaaaaaaaaaaaaaaaaaaaaaaaaaaaaaaaaaaaaaaaaaaaaaaaaaaaaaaaaaaaaa

SEQ ID NO: 7160 - RNA, 5797 nt, synthetic construct
  source 1..5797: mol_type = other RNA
aggaaataagagagaaaagaagagtaagaagaaatataagagccaccatggcccctaagaagaagcgtaaagtgagccggatggaacgcctcgtctacgaggtgcggcagaagtgcagaaacatcgaggacatctgcatctcctgcggatctctgaacgtgaccctggagcacccactgttcatcggcggcatgtgccagaactgtaaaaactgttttctggagtgtgcctatcaatacgacgatgacggctaccagagctactgcaccatctgttgcggcggaagagaggtgctgatgtgtggaaataacaactgctgccggtgcttctgcgtggaatgcgtggacctgctggtgggccccggcgccgcccaggccgctattaaggaagatccttggaactgctacatgtgcggccacaagggcacatacggcctgctgagacggagagaggactggcctagcagactgcagatgttcttcgccaataaccacgaccaggagttcgacccccctaaggtgtaccctcccgtccccgccgagaagagaaagcccatccgggtcctgagcctgttcgatggcatcgccaccggtctgctggtgctgaaggacctgggcatccaggtggataggtacattgcctccgaggtgtgcgaggactccatcaccgtgggaatggtgcgtcatcagggcaagatcatgtacgtgggcgacgtgcggagcgtgacacagaagcatatccaggagtggggccctttcgacctggtgatcggcggcagcccttgcaatgacctgagcatcgtgaacccagcccggaagggcctgtacgagggaaccggcagactgttcttcgagttttacagactgctgcacgacgcccggcctaaggaaggcgacgaccggcccttcttttggctgttcgagaatgtggtggccatgggagtcagcgacaagcgggatattagccggttcctggagagcaaccccgtgatgatcgatgccaaggaagtgagcgccgcccaccgggccagatacttctggggcaatctgcctggcatgaacagacccctggccagcaccgtgaacgacaagctggagctgcaggagtgcctggagcacggccggatcgccaagttcagcaaggtgagaaccatcaccacccgaagcaacagcatcaaacaaggcaaggaccagcactttcctgtgttcatgaacgagaaggaggacatcctgtggtgtaccgagatggagagagtgttcgggttcccagtccactacacagatgtcagcaacatgtctagactggccagacagagactgctgggaagaagctggtccgtccctgtgatcagacacctgttcgcccctctgaaggagtacttcgcctgcgtgagcagcggcaacagcaacgccaacagccggggccccagcttctctagcggcctggtgccactgtccctgagagggagccacatgggccccatggagatctacaaaaccgtgagcgcctggaagcggcagcctgtgcgcgtgctgagcctgtttcggaatatcgataaagtcctgaaaagcctgggattcctggagagcggctctggctccggcggtggcaccctgaagtacgtggaggatgtgacaaacgtggtcagacgggatgtggagaagtggggccccttcgatctggtgtacggcagcacccaacccctgggcagctcttgtgaccggtgccctggctggtacatgtttcagttccaccggatcctgcagtacgccctgccgagacaggagtcccagcggccattcttttggattttcatggacaacttgctgctgaccgaggatgaccaggaaactaccactcggttcctgcagaccgaagccgtgaccctgcaggacgtgagaggccgggactaccagaacgccatgcgggtgtggtccaacatccctggactgaaaagcaagcacgcacctctgacccctaaagaagaggagtacctgcaggcccaggtgcggagcagaagcaagctggacgcccctaaggtggatctgctggtgaagaattgcctcctgcccctgagagagtacttcaagtatttcagccagaatagtctgcccctgggcggcccaagcagcggcgcccctcctcccagcggcggcagcccagccggctccccaacctctaccgaggagggcacctctgagtccgccacccccgagagcggccctggcacctccaccgagcccagcgagggcagcgcacccggcagccctgccggcagccccacctccacagaggagggaaccagcaccgagcccagcgaaggcagcgccccaggcaccagcaccgagcctagtgagggcggctctggcggcggcagcgcccaggagattaaacggatcaacaagatcagaagaagacttgtgaaagacagcaacaccaagaaggccggcaagacaggccccatgaaaaccctgctggttagagtgatgacacccgatctgagagagcggctggaaaacctgagaaagaagcctgaaaatatcccccagcccatcagcaatacatctagagccaacctgaataagctgctgaccgattacaccgaaatgaagaaggcgatcctgcatgtgtactgggaagagttccagaaggaccctgtgggcctgatgagccgggtggcccagcctgccagcaagaagatcgatcagaacaagctgaaacctgagatggacgagaagggcaacctgaccaccgccggctttgcctgctctcagtgtggccagcccctgttcgtgtacaagctggagcaggtgtctgagaagggcaaggcttacaccaactacttcggacggtgcaatgtggccgagcacgaaaagctgatcctgctggcccagctgaagcccgagaaggatagcgacgaagccgtgacatatagcctgggaaagtttgggcagagggccctggatttctacagcattcatgtgaccaaggagtccacccaccccgtgaagcccctggcccagatcgccggaaacagatacgcctccggacctgtgggaaaggccctgagcgacgcatgtatgggcacaatcgcctccttcctgtctaagtaccaggacatcatcatcgaacaccagaaggtggtgaagggcaaccagaagagactggagagcctgcgggagctggccggcaaggaaaacctggaataccctagcgtgaccctgccacctcagcctcacaccaaggagggcgttgatgcctacaacgaagtgatcgcccgggtgcgaatgtgggtgaacctgaacctgtggcagaagctgaagctaagcagagatgatgccaagcctctgctgagactgaagggattcccttcctttcctctggtcgagagacaggccaacgaagtggactggtgggacatggtgtgtaacgtgaagaagctgatcaacgagaaaaaggaggatggcaaggtgttttggcagaatctggctggctacaagagacaggaagccctgagaccatacctgagcagcgaggaagatcggaagaagggaaagaaattcgctcggtaccagctgggcgacctgctgctgcacctggaaaagaagcacggcgaggactggggaaaggtgtacgacgaggcctgggagcggattgacaagaaagtggaaggcctgagcaagcacatcaagctggaagaggaacggagaagcgaggacgcccagagcaaggccgccctgaccgactggctgcgggctaaggccagcttcgtgatcgagggcctgaaggaggccgacaaggacgagttctgcagatgcgagctgaagctgcagaagtggtacggggacctgcggggaaagcccttcgccatcgaagccgagaacagcatcctggacatcagcggcttcagcaagcagtacaactgtgccttcatctggcagaaggacggcgtgaagaagctgaacctgtacctgatcatcaactacttcaagggcggcaagctgcggttcaagaagatcaaacctgaagccttcgaagccaacagattctacaccgtgatcaacaaaaagagcggcgagatcgtgcccatggaggtgaacttcaacttcgacgaccccaacctgatcatcctgcctctggcctttggcaagagacagggcagagaattcatctggaacgacctgctgtccctggaaaccggcagcctgaagctggccaacggaagagtgatcgagaagacactgtacaacagaagaacccggcaggatgagcctgccctgttcgtggccctgaccttcgagcggcgggaggtcctggactcctccaatatcaaaccaatgaacctgatcggcgtggcaagaggcgaaaacatccccgccgtgatcgccctgaccgaccccgagggctgcccactgagccggtttaaggatagcctgggaaacccaacccacatcctgagaatcggcgagagctataaggagaagcagcggaccatccaggccaagaaggaggtggagcagcggagagccggcggctacagccggaagtacgccagcaaagccaagaatctggcagacgatatggtgagaaacaccgctagagatctgctgtactacgccgtgacccaggatgccatgctgatcttcgccaacctgagccggggcttcggccggcagggcaagcggaccttcatggccgagagacagtacacacggatggaggactggctgaccgccaagctggcctacgagggcctgagcaagacctacctgtccaagacactggcccagtacacctccaagacatgcagcaactgtgggtttaccatcaccagcgccgactacgacagggtgctggagaagctgaagaagacagcaacaggctggatgaccacaattaacggcaaggagctgaaggtggagggccagattacctactacaacagatacaagagacagaacgtagtcaaggacctgtccgtcgagctggatagactgagcgaagaatctgtgaacaacgacatctcctcctggacaaagggcagaagcggagaagctctgagcctcctgaagaaaagattctcccatagacccgtgcaggagaagttcgtgtgcctgaactgcggcttcgagacacacgcagccgagcaagccgccctgaacatcgccagatcctggctgttcctgcggagccaggagtacaagaaataccagacaaacaagacaaccggcaacaccgataagagagccttcgtcgagacctggcagtccttttaccggaagaagcttaaggaggtgtggaaacctgccgtgcggtctggcggatctggcggaggctccacaagcctggccagcatcagcttcgaggacctggccgtgaccttcaccgaggaggagtgggagcacctggacctgggccagaggaacctgtaccaggaggtgatgctggagacctaccagctgctggtgagcctgggcgaccaggtgaggctggccccccccacccccggcacccccctgcccgccctgcccgcccagcccaggctgctgggcctgcccagccagcccctggacaggaggggcacccccaccagccccaagaaaaagagaaaagtctaagctgccttctgcggggcttgccttctggccatgcccttcttctctcccttgcacctgtacctcttggtctttgaataaagcctgagtaggaaggctagcaaaaaaaaaaaaaaaaaaaaaaaaaaaaaaaaaaaaaaaaaaaaaaaaaaaaaaaaaaaaaaaaaaaaaaaaaaaaaaaa

SEQ ID NO: 7161 - RNA, 5797 nt, synthetic construct
  source 1..5797: mol_type = other RNA
aggaaataagagagaaaagaagagtaagaagaaatataagagccaccatggcccctaagaagaagcgtaaagtgagccggatggaacgcctcgtctacgaggtgcggcagaagtgcagaaacatcgaggacatctgcatctcctgcggatctctgaacgtgaccctggagcacccactgttcatcggcggcatgtgccagaactgtaaaaactgttttctggagtgtgcctatcaatacgacgatgacggctaccagagctactgcaccatctgttgcggcggaagagaggtgctgatgtgtggaaataacaactgctgccggtgcttctgcgtggaatgcgtggacctgctggtgggccccggcgccgcccaggccgctattaaggaagatccttggaactgctacatgtgcggccacaagggcacatacggcctgctgagacggagagaggactggcctagcagactgcagatgttcttcgccaataaccacgaccaggagttcgacccccctaaggtgtaccctcccgtccccgccgagaagagaaagcccatccgggtcctgagcctgttcgatggcatcgccaccggtctgctggtgctgaaggacctgggcatccaggtggataggtacattgcctccgaggtgtgcgaggactccatcaccgtgggaatggtgcgtcatcagggcaagatcatgtacgtgggcgacgtgcggagcgtgacacagaagcatatccaggagtggggccctttcgacctggtgatcggcggcagcccttgcaatgacctgagcatcgtgaacccagcccggaagggcctgtacgagggaaccggcagactgttcttcgagttttacagactgctgcacgacgcccggcctaaggaaggcgacgaccggcccttcttttggctgttcgagaatgtggtggccatgggagtcagcgacaagcgggatattagccggttcctggagagcaaccccgtgatgatcgatgccaaggaagtgagcgccgcccaccgggccagatacttctggggcaatctgcctggcatgaacagacccctggccagcaccgtgaacgacaagctggagctgcaggagtgcctggagcacggccggatcgccaagttcagcaaggtgagaaccatcaccacccgaagcaacagcatcaaacaaggcaaggaccagcactttcctgtgttcatgaacgagaaggaggacatcctgtggtgtaccgagatggagagagtgttcgggttcccagtccactacacagatgtcagcaacatgtctagactggccagacagagactgctgggaagaagctggtccgtccctgtgatcagacacctgttcgcccctctgaaggagtacttcgcctgcgtgagcagcggcaacagcaacgccaacagccggggccccagcttctctagcggcctggtgccactgtccctgagagggagccacatgggccccatggagatctacaaaaccgtgagcgcctggaagcggcagcctgtgcgcgtgctgagcctgtttcggaatatcgataaagtcctgaaaagcctgggattcctggagagcggctctggctccggcggtggcaccctgaagtacgtggaggatgtgacaaacgtggtcagacgggatgtggagaagtggggccccttcgatctggtgtacggcagcacccaacccctgggcagctcttgtgaccggtgccctggctggtacatgtttcagttccaccggatcctgcagtacgccctgccgagacaggagtcccagcggccattcttttggattttcatggacaacttgctgctgaccgaggatgaccaggaaactaccactcggttcctgcagaccgaagccgtgaccctgcaggacgtgagaggccgggactaccagaacgccatgcgggtgtggtccaacatccctggactgaaaagcaagcacgcacctctgacccctaaagaagaggagtacctgcaggcccaggtgcggagcagaagcaagctggacgcccctaaggtggatctgctggtgaagaattgcctcctgcccctgagagagtacttcaagtatttcagccagaatagtctgcccctgggcggcccaagcagcggcgcccctcctcccagcggcggcagcccagccggctccccaacctctaccgaggagggcacctctgagtccgccacccccgagagcggccctggcacctccaccgagcccagcgagggcagcgcacccggcagccctgccggcagccccacctccacagaggagggaaccagcaccgagcccagcgaaggcagcgccccaggcaccagcaccgagcctagtgagggcggctctggcggcggcagcgcccaggagattaaacggatcaacaagatcagaagaagacttgtgaaagacagcaacaccaagaaggccggcaagacaggccccatgaaaaccctgctggttagagtgatgacacccgatctgagagagcggctggaaaacctgagaaagaagcctgaaaatatcccccagcccatcagcaatacatctagagccaacctgaataagctgctgaccgattacaccgaaatgaagaaggcgatcctgcatgtgtactgggaagagttccagaaggaccctgtgggcctgatgagccgggtggcccagcctgccagcaagaagatcgatcagaacaagctgaaacctgagatggacgagaagggcaacctgaccaccgccggctttgcctgctctcagtgtggccagcccctgttcgtgtacaagctggagcaggtgtctgagaagggcaaggcttacaccaactacttcggacggtgcaatgtggccgagcacgaaaagctgatcctgctggcccagctgaagcccgagaaggatagcgacgaagccgtgacatatagcctgggaaagtttgggcagagggccctggatttctacagcattcatgtgaccaaggagtccacccaccccgtgaagcccctggcccagatcgccggaaacagatacgcctccggacctgtgggaaaggccctgagcgacgcatgtatgggcacaatcgcctccttcctgtctaagtaccaggacatcatcatcgaacaccagaaggtggtgaagggcaaccagaagagactggagagcctgcgggagctggccggcaaggaaaacctggaataccctagcgtgaccctgccacctcagcctcacaccaaggagggcgttgatgcctacaacgaagtgatcgcccgggtgcgaatgtgggtgaacctgaacctgtggcagaagctgaagctaagcagagatgatgccaagcctctgctgagactgaagggattcccttcctttcctctggtcgagagacaggccaacgaagtggactggtgggacatggtgtgtaacgtgaagaagctgatcaacgagaaaaaggaggatggcaaggtgttttggcagaatctggctggctacaagagacaggaagccctgagaccatacctgagcagcgaggaagatcggaagaagggaaagaaattcgctcggtaccagctgggcgacctgctgctgcacctggaaaagaagcacggcgaggactggggaaaggtgtacgacgaggcctgggagcggattgacaagaaagtggaaggcctgagcaagcacatcaagctggaagaggaacggagaagcgaggacgcccagagcaaggccgccctgaccgactggctgcgggctaaggccagcttcgtgatcgagggcctgaaggaggccgacaaggacgagttctgcagatgcgagctgaagctgcagaagtggtacggggacctgcggggaaagcccttcgccatcgaagccgagaacagcatcctggacatcagcggcttcagcaagcagtacaactgtgccttcatctggcagaaggacggcgtgaagaagctgaacctgtacctgatcatcaactacttcaagggcggcaagctgcggttcaagaagatcaaacctgaagccttcgaagccaacagattctacaccgtgatcaacaaaaagagcggcgagatcgtgcccatggaggtgaacttcaacttcgacgaccccaacctgatcatcctgcctctggcctttggcaagagacagggcagagaattcatctggaacgacctgctgtccctggaaaccggcagcctgaagctggccaacggaagagtgatcgagaagacactgtacaacagaagaacccggcaggatgagcctgccctgttcgtggccctgaccttcgagcggcgggaggtcctggactcctccaatatcaaaccaatgaacctgatcggcgtggcaagaggcgaaaacatccccgccgtgatcgccctgaccgaccccgagggctgcccactgagccggtttaaggatagcctgggaaacccaacccacatcctgagaatcggcgagagctataaggagaagcagcggaccatccaggccaagaaggaggtggagcagcggagagccggcggctacagccggaagtacgccagcaaagccaagaatctggcagacgatatggtgagaaacaccgctagagatctgctgtactacgccgtgacccaggatgccatgctgatcttcgccaacctgagccggggcttcggccggcagggcaagcggaccttcatggccgagagacagtacacacggatggaggactggctgaccgccaagctggcctacgagggcctgagcaagacctacctgtccaagacactggcccagtacacctccaagacatgcagcaactgtgggtttaccatcaccagcgccgactacgacagggtgctggagaagctgaagaagacagcaacaggctggatgaccacaattaacggcaaggagctgaaggtggagggccagattacctactacaacagatacaagagacagaacgtagtcaaggacctgtccgtcgagctggatagactgagcgaagaatctgtgaacaacgacatctcctcctggacaaagggcagaagcggagaagctctgagcctcctgaagaaaagattctcccatagacccgtgcaggagaagttcgtgtgcctgaactgcggcttcgagacacacgcagccgagcaagccgccctgaacatcgccagatcctggctgttcctgcggagccaggagtacaagaaataccagacaaacaagacaaccggcaacaccgataagagagccttcgtcgagacctggcagtccttttaccggaagaagcttaaggaggtgtggaaacctgccgtgcggtctggcggatctggcggaggctccacaagccagatgcaggtgaccttcgaggaggtggccatcagcttcagccaggaggagtgggagtacctggacgaggagcagaaggagctgtacagggaggtgatgaaggagaactaccagaccctgatcagcctggccaccggcagccccaccgtgacccccaagatcatcgcccacatcgagaggggcgaggagccctacatcaggggcgagcccggcagcgaggagagggagaccggcaacagcagcaccagccccaagaaaaagagaaaagtctaagctgccttctgcggggcttgccttctggccatgcccttcttctctcccttgcacctgtacctcttggtctttgaataaagcctgagtaggaaggctagcaaaaaaaaaaaaaaaaaaaaaaaaaaaaaaaaaaaaaaaaaaaaaaaaaaaaaaaaaaaaaaaaaaaaaaaaaaaaaaaa

SEQ ID NO: 7162 - RNA, 5797 nt, synthetic construct
  source 1..5797: mol_type = other RNA
aggaaataagagagaaaagaagagtaagaagaaatataagagccaccatggcccctaagaagaagcgtaaagtgagccggatggaacgcctcgtctacgaggtgcggcagaagtgcagaaacatcgaggacatctgcatctcctgcggatctctgaacgtgaccctggagcacccactgttcatcggcggcatgtgccagaactgtaaaaactgttttctggagtgtgcctatcaatacgacgatgacggctaccagagctactgcaccatctgttgcggcggaagagaggtgctgatgtgtggaaataacaactgctgccggtgcttctgcgtggaatgcgtggacctgctggtgggccccggcgccgcccaggccgctattaaggaagatccttggaactgctacatgtgcggccacaagggcacatacggcctgctgagacggagagaggactggcctagcagactgcagatgttcttcgccaataaccacgaccaggagttcgacccccctaaggtgtaccctcccgtccccgccgagaagagaaagcccatccgggtcctgagcctgttcgatggcatcgccaccggtctgctggtgctgaaggacctgggcatccaggtggataggtacattgcctccgaggtgtgcgaggactccatcaccgtgggaatggtgcgtcatcagggcaagatcatgtacgtgggcgacgtgcggagcgtgacacagaagcatatccaggagtggggccctttcgacctggtgatcggcggcagcccttgcaatgacctgagcatcgtgaacccagcccggaagggcctgtacgagggaaccggcagactgttcttcgagttttacagactgctgcacgacgcccggcctaaggaaggcgacgaccggcccttcttttggctgttcgagaatgtggtggccatgggagtcagcgacaagcgggatattagccggttcctggagagcaaccccgtgatgatcgatgccaaggaagtgagcgccgcccaccgggccagatacttctggggcaatctgcctggcatgaacagacccctggccagcaccgtgaacgacaagctggagctgcaggagtgcctggagcacggccggatcgccaagttcagcaaggtgagaaccatcaccacccgaagcaacagcatcaaacaaggcaaggaccagcactttcctgtgttcatgaacgagaaggaggacatcctgtggtgtaccgagatggagagagtgttcgggttcccagtccactacacagatgtcagcaacatgtctagactggccagacagagactgctgggaagaagctggtccgtccctgtgatcagacacctgttcgcccctctgaaggagtacttcgcctgcgtgagcagcggcaacagcaacgccaacagccggggccccagcttctctagcggcctggtgccactgtccctgagagggagccacatgggccccatggagatctacaaaaccgtgagcgcctggaagcggcagcctgtgcgcgtgctgagcctgtttcggaatatcgataaagtcctgaaaagcctgggattcctggagagcggctctggctccggcggtggcaccctgaagtacgtggaggatgtgacaaacgtggtcagacgggatgtggagaagtggggccccttcgatctggtgtacggcagcacccaacccctgggcagctcttgtgaccggtgccctggctggtacatgtttcagttccaccggatcctgcagtacgccctgccgagacaggagtcccagcggccattcttttggattttcatggacaacttgctgctgaccgaggatgaccaggaaactaccactcggttcctgcagaccgaagccgtgaccctgcaggacgtgagaggccgggactaccagaacgccatgcgggtgtggtccaacatccctggactgaaaagcaagcacgcacctctgacccctaaagaagaggagtacctgcaggcccaggtgcggagcagaagcaagctggacgcccctaaggtggatctgctggtgaagaattgcctcctgcccctgagagagtacttcaagtatttcagccagaatagtctgcccctgggcggcccaagcagcggcgcccctcctcccagcggcggcagcccagccggctccccaacctctaccgaggagggcacctctgagtccgccacccccgagagcggccctggcacctccaccgagcccagcgagggcagcgcacccggcagccctgccggcagccccacctccacagaggagggaaccagcaccgagcccagcgaaggcagcgccccaggcaccagcaccgagcctagtgagggcggctctggcggcggcagcgcccaggagattaaacggatcaacaagatcagaagaagacttgtgaaagacagcaacaccaagaaggccggcaagacaggccccatgaaaaccctgctggttagagtgatgacacccgatctgagagagcggctggaaaacctgagaaagaagcctgaaaatatcccccagcccatcagcaatacatctagagccaacctgaataagctgctgaccgattacaccgaaatgaagaaggcgatcctgcatgtgtactgggaagagttccagaaggaccctgtgggcctgatgagccgggtggcccagcctgccagcaagaagatcgatcagaacaagctgaaacctgagatggacgagaagggcaacctgaccaccgccggctttgcctgctctcagtgtggccagcccctgttcgtgtacaagctggagcaggtgtctgagaagggcaaggcttacaccaactacttcggacggtgcaatgtggccgagcacgaaaagctgatcctgctggcccagctgaagcccgagaaggatagcgacgaagccgtgacatatagcctgggaaagtttgggcagagggccctggatttctacagcattcatgtgaccaaggagtccacccaccccgtgaagcccctggcccagatcgccggaaacagatacgcctccggacctgtgggaaaggccctgagcgacgcatgtatgggcacaatcgcctccttcctgtctaagtaccaggacatcatcatcgaacaccagaaggtggtgaagggcaaccagaagagactggagagcctgcgggagctggccggcaaggaaaacctggaataccctagcgtgaccctgccacctcagcctcacaccaaggagggcgttgatgcctacaacgaagtgatcgcccgggtgcgaatgtgggtgaacctgaacctgtggcagaagctgaagctaagcagagatgatgccaagcctctgctgagactgaagggattcccttcctttcctctggtcgagagacaggccaacgaagtggactggtgggacatggtgtgtaacgtgaagaagctgatcaacgagaaaaaggaggatggcaaggtgttttggcagaatctggctggctacaagagacaggaagccctgagaccatacctgagcagcgaggaagatcggaagaagggaaagaaattcgctcggtaccagctgggcgacctgctgctgcacctggaaaagaagcacggcgaggactggggaaaggtgtacgacgaggcctgggagcggattgacaagaaagtggaaggcctgagcaagcacatcaagctggaagaggaacggagaagcgaggacgcccagagcaaggccgccctgaccgactggctgcgggctaaggccagcttcgtgatcgagggcctgaaggaggccgacaaggacgagttctgcagatgcgagctgaagctgcagaagtggtacggggacctgcggggaaagcccttcgccatcgaagccgagaacagcatcctggacatcagcggcttcagcaagcagtacaactgtgccttcatctggcagaaggacggcgtgaagaagctgaacctgtacctgatcatcaactacttcaagggcggcaagctgcggttcaagaagatcaaacctgaagccttcgaagccaacagattctacaccgtgatcaacaaaaagagcggcgagatcgtgcccatggaggtgaacttcaacttcgacgaccccaacctgatcatcctgcctctggcctttggcaagagacagggcagagaattcatctggaacgacctgctgtccctggaaaccggcagcctgaagctggccaacggaagagtgatcgagaagacactgtacaacagaagaacccggcaggatgagcctgccctgttcgtggccctgaccttcgagcggcgggaggtcctggactcctccaatatcaaaccaatgaacctgatcggcgtggcaagaggcgaaaacatccccgccgtgatcgccctgaccgaccccgagggctgcccactgagccggtttaaggatagcctgggaaacccaacccacatcctgagaatcggcgagagctataaggagaagcagcggaccatccaggccaagaaggaggtggagcagcggagagccggcggctacagccggaagtacgccagcaaagccaagaatctggcagacgatatggtgagaaacaccgctagagatctgctgtactacgccgtgacccaggatgccatgctgatcttcgccaacctgagccggggcttcggccggcagggcaagcggaccttcatggccgagagacagtacacacggatggaggactggctgaccgccaagctggcctacgagggcctgagcaagacctacctgtccaagacactggcccagtacacctccaagacatgcagcaactgtgggtttaccatcaccagcgccgactacgacagggtgctggagaagctgaagaagacagcaacaggctggatgaccacaattaacggcaaggagctgaaggtggagggccagattacctactacaacagatacaagagacagaacgtagtcaaggacctgtccgtcgagctggatagactgagcgaagaatctgtgaacaacgacatctcctcctggacaaagggcagaagcggagaagctctgagcctcctgaagaaaagattctcccatagacccgtgcaggagaagttcgtgtgcctgaactgcggcttcgagacacacgcagccgagcaagccgccctgaacatcgccagatcctggctgttcctgcggagccaggagtacaagaaataccagacaaacaagacaaccggcaacaccgataagagagccttcgtcgagacctggcagtccttttaccggaagaagcttaaggaggtgtggaaacctgccgtgcggtctggcggatctggcggaggctccacaagcgcccaggagagcgtgaccttcgaggacgtggccgtgaacttcaccaacagggagtggcagtgcctgacctacgcccagaggcacctgtacaaggacgtgatgctggagaactacggcaacatggtgagcctgggcttccccttccccaagccccccctgatcagccacctggagagggaggtggacccctgcgtgcaggacccccaggacagggagagcctgagctgcagctaccccgtgagcaccagccccaagaaaaagagaaaagtctaagctgccttctgcggggcttgccttctggccatgcccttcttctctcccttgcacctgtacctcttggtctttgaataaagcctgagtaggaaggctagcaaaaaaaaaaaaaaaaaaaaaaaaaaaaaaaaaaaaaaaaaaaaaaaaaaaaaaaaaaaaaaaaaaaaaaaaaaaaaaaa

SEQ ID NO: 7163 - RNA, 5797 nt, synthetic construct
  source 1..5797: mol_type = other RNA
aggaaataagagagaaaagaagagtaagaagaaatataagagccaccatggcccctaagaagaagcgtaaagtgagccggatggaacgcctcgtctacgaggtgcggcagaagtgcagaaacatcgaggacatctgcatctcctgcggatctctgaacgtgaccctggagcacccactgttcatcggcggcatgtgccagaactgtaaaaactgttttctggagtgtgcctatcaatacgacgatgacggctaccagagctactgcaccatctgttgcggcggaagagaggtgctgatgtgtggaaataacaactgctgccggtgcttctgcgtggaatgcgtggacctgctggtgggccccggcgccgcccaggccgctattaaggaagatccttggaactgctacatgtgcggccacaagggcacatacggcctgctgagacggagagaggactggcctagcagactgcagatgttcttcgccaataaccacgaccaggagttcgacccccctaaggtgtaccctcccgtccccgccgagaagagaaagcccatccgggtcctgagcctgttcgatggcatcgccaccggtctgctggtgctgaaggacctgggcatccaggtggataggtacattgcctccgaggtgtgcgaggactccatcaccgtgggaatggtgcgtcatcagggcaagatcatgtacgtgggcgacgtgcggagcgtgacacagaagcatatccaggagtggggccctttcgacctggtgatcggcggcagcccttgcaatgacctgagcatcgtgaacccagcccggaagggcctgtacgagggaaccggcagactgttcttcgagttttacagactgctgcacgacgcccggcctaaggaaggcgacgaccggcccttcttttggctgttcgagaatgtggtggccatgggagtcagcgacaagcgggatattagccggttcctggagagcaaccccgtgatgatcgatgccaaggaagtgagcgccgcccaccgggccagatacttctggggcaatctgcctggcatgaacagacccctggccagcaccgtgaacgacaagctggagctgcaggagtgcctggagcacggccggatcgccaagttcagcaaggtgagaaccatcaccacccgaagcaacagcatcaaacaaggcaaggaccagcactttcctgtgttcatgaacgagaaggaggacatcctgtggtgtaccgagatggagagagtgttcgggttcccagtccactacacagatgtcagcaacatgtctagactggccagacagagactgctgggaagaagctggtccgtccctgtgatcagacacctgttcgcccctctgaaggagtacttcgcctgcgtgagcagcggcaacagcaacgccaacagccggggccccagcttctctagcggcctggtgccactgtccctgagagggagccacatgggccccatggagatctacaaaaccgtgagcgcctggaagcggcagcctgtgcgcgtgctgagcctgtttcggaatatcgataaagtcctgaaaagcctgggattcctggagagcggctctggctccggcggtggcaccctgaagtacgtggaggatgtgacaaacgtggtcagacgggatgtggagaagtggggccccttcgatctggtgtacggcagcacccaacccctgggcagctcttgtgaccggtgccctggctggtacatgtttcagttccaccggatcctgcagtacgccctgccgagacaggagtcccagcggccattcttttggattttcatggacaacttgctgctgaccgaggatgaccaggaaactaccactcggttcctgcagaccgaagccgtgaccctgcaggacgtgagaggccgggactaccagaacgccatgcgggtgtggtccaacatccctggactgaaaagcaagcacgcacctctgacccctaaagaagaggagtacctgcaggcccaggtgcggagcagaagcaagctggacgcccctaaggtggatctgctggtgaagaattgcctcctgcccctgagagagtacttcaagtatttcagccagaatagtctgcccctgggcggcccaagcagcggcgcccctcctcccagcggcggcagcccagccggctccccaacctctaccgaggagggcacctctgagtccgccacccccgagagcggccctggcacctccaccgagcccagcgagggcagcgcacccggcagccctgccggcagccccacctccacagaggagggaaccagcaccgagcccagcgaaggcagcgccccaggcaccagcaccgagcctagtgagggcggctctggcggcggcagcgcccaggagattaaacggatcaacaagatcagaagaagacttgtgaaagacagcaacaccaagaaggccggcaagacaggccccatgaaaaccctgctggttagagtgatgacacccgatctgagagagcggctggaaaacctgagaaagaagcctgaaaatatcccccagcccatcagcaatacatctagagccaacctgaataagctgctgaccgattacaccgaaatgaagaaggcgatcctgcatgtgtactgggaagagttccagaaggaccctgtgggcctgatgagccgggtggcccagcctgccagcaagaagatcgatcagaacaagctgaaacctgagatggacgagaagggcaacctgaccaccgccggctttgcctgctctcagtgtggccagcccctgttcgtgtacaagctggagcaggtgtctgagaagggcaaggcttacaccaactacttcggacggtgcaatgtggccgagcacgaaaagctgatcctgctggcccagctgaagcccgagaaggatagcgacgaagccgtgacatatagcctgggaaagtttgggcagagggccctggatttctacagcattcatgtgaccaaggagtccacccaccccgtgaagcccctggcccagatcgccggaaacagatacgcctccggacctgtgggaaaggccctgagcgacgcatgtatgggcacaatcgcctccttcctgtctaagtaccaggacatcatcatcgaacaccagaaggtggtgaagggcaaccagaagagactggagagcctgcgggagctggccggcaaggaaaacctggaataccctagcgtgaccctgccacctcagcctcacaccaaggagggcgttgatgcctacaacgaagtgatcgcccgggtgcgaatgtgggtgaacctgaacctgtggcagaagctgaagctaagcagagatgatgccaagcctctgctgagactgaagggattcccttcctttcctctggtcgagagacaggccaacgaagtggactggtgggacatggtgtgtaacgtgaagaagctgatcaacgagaaaaaggaggatggcaaggtgttttggcagaatctggctggctacaagagacaggaagccctgagaccatacctgagcagcgaggaagatcggaagaagggaaagaaattcgctcggtaccagctgggcgacctgctgctgcacctggaaaagaagcacggcgaggactggggaaaggtgtacgacgaggcctgggagcggattgacaagaaagtggaaggcctgagcaagcacatcaagctggaagaggaacggagaagcgaggacgcccagagcaaggccgccctgaccgactggctgcgggctaaggccagcttcgtgatcgagggcctgaaggaggccgacaaggacgagttctgcagatgcgagctgaagctgcagaagtggtacggggacctgcggggaaagcccttcgccatcgaagccgagaacagcatcctggacatcagcggcttcagcaagcagtacaactgtgccttcatctggcagaaggacggcgtgaagaagctgaacctgtacctgatcatcaactacttcaagggcggcaagctgcggttcaagaagatcaaacctgaagccttcgaagccaacagattctacaccgtgatcaacaaaaagagcggcgagatcgtgcccatggaggtgaacttcaacttcgacgaccccaacctgatcatcctgcctctggcctttggcaagagacagggcagagaattcatctggaacgacctgctgtccctggaaaccggcagcctgaagctggccaacggaagagtgatcgagaagacactgtacaacagaagaacccggcaggatgagcctgccctgttcgtggccctgaccttcgagcggcgggaggtcctggactcctccaatatcaaaccaatgaacctgatcggcgtggcaagaggcgaaaacatccccgccgtgatcgccctgaccgaccccgagggctgcccactgagccggtttaaggatagcctgggaaacccaacccacatcctgagaatcggcgagagctataaggagaagcagcggaccatccaggccaagaaggaggtggagcagcggagagccggcggctacagccggaagtacgccagcaaagccaagaatctggcagacgatatggtgagaaacaccgctagagatctgctgtactacgccgtgacccaggatgccatgctgatcttcgccaacctgagccggggcttcggccggcagggcaagcggaccttcatggccgagagacagtacacacggatggaggactggctgaccgccaagctggcctacgagggcctgagcaagacctacctgtccaagacactggcccagtacacctccaagacatgcagcaactgtgggtttaccatcaccagcgccgactacgacagggtgctggagaagctgaagaagacagcaacaggctggatgaccacaattaacggcaaggagctgaaggtggagggccagattacctactacaacagatacaagagacagaacgtagtcaaggacctgtccgtcgagctggatagactgagcgaagaatctgtgaacaacgacatctcctcctggacaaagggcagaagcggagaagctctgagcctcctgaagaaaagattctcccatagacccgtgcaggagaagttcgtgtgcctgaactgcggcttcgagacacacgcagccgagcaagccgccctgaacatcgccagatcctggctgttcctgcggagccaggagtacaagaaataccagacaaacaagacaaccggcaacaccgataagagagccttcgtcgagacctggcagtccttttaccggaagaagcttaaggaggtgtggaaacctgccgtgcggtctggcggatctggcggaggctccacaagcgcccagggcagcgtgatgttcaccgacgtgagcatcgacttcagccaggaggagtgggagttcctgaaccccgaccagagggacctgtacaaggacgtgatgctggagaactacagcaacctggtgagcatgggcctgtacatccccaagccccaggtgatcagcctgctggagcagggcaaggagccctggatgatcggcagggagctgaccaggggcctgtgcagcgccctggagagcatgaccagccccaagaaaaagagaaaagtctaagctgccttctgcggggcttgccttctggccatgcccttcttctctcccttgcacctgtacctcttggtctttgaataaagcctgagtaggaaggctagcaaaaaaaaaaaaaaaaaaaaaaaaaaaaaaaaaaaaaaaaaaaaaaaaaaaaaaaaaaaaaaaaaaaaaaaaaaaaaaaa

SEQ ID NO: 7164 - RNA, 5797 nt, synthetic construct
  source 1..5797: mol_type = other RNA
aggaaataagagagaaaagaagagtaagaagaaatataagagccaccatggcccctaagaagaagcgtaaagtgagccggatggaacgcctcgtctacgaggtgcggcagaagtgcagaaacatcgaggacatctgcatctcctgcggatctctgaacgtgaccctggagcacccactgttcatcggcggcatgtgccagaactgtaaaaactgttttctggagtgtgcctatcaatacgacgatgacggctaccagagctactgcaccatctgttgcggcggaagagaggtgctgatgtgtggaaataacaactgctgccggtgcttctgcgtggaatgcgtggacctgctggtgggccccggcgccgcccaggccgctattaaggaagatccttggaactgctacatgtgcggccacaagggcacatacggcctgctgagacggagagaggactggcctagcagactgcagatgttcttcgccaataaccacgaccaggagttcgacccccctaaggtgtaccctcccgtccccgccgagaagagaaagcccatccgggtcctgagcctgttcgatggcatcgccaccggtctgctggtgctgaaggacctgggcatccaggtggataggtacattgcctccgaggtgtgcgaggactccatcaccgtgggaatggtgcgtcatcagggcaagatcatgtacgtgggcgacgtgcggagcgtgacacagaagcatatccaggagtggggccctttcgacctggtgatcggcggcagcccttgcaatgacctgagcatcgtgaacccagcccggaagggcctgtacgagggaaccggcagactgttcttcgagttttacagactgctgcacgacgcccggcctaaggaaggcgacgaccggcccttcttttggctgttcgagaatgtggtggccatgggagtcagcgacaagcgggatattagccggttcctggagagcaaccccgtgatgatcgatgccaaggaagtgagcgccgcccaccgggccagatacttctggggcaatctgcctggcatgaacagacccctggccagcaccgtgaacgacaagctggagctgcaggagtgcctggagcacggccggatcgccaagttcagcaaggtgagaaccatcaccacccgaagcaacagcatcaaacaaggcaaggaccagcactttcctgtgttcatgaacgagaaggaggacatcctgtggtgtaccgagatggagagagtgttcgggttcccagtccactacacagatgtcagcaacatgtctagactggccagacagagactgctgggaagaagctggtccgtccctgtgatcagacacctgttcgcccctctgaaggagtacttcgcctgcgtgagcagcggcaacagcaacgccaacagccggggccccagcttctctagcggcctggtgccactgtccctgagagggagccacatgggccccatggagatctacaaaaccgtgagcgcctggaagcggcagcctgtgcgcgtgctgagcctgtttcggaatatcgataaagtcctgaaaagcctgggattcctggagagcggctctggctccggcggtggcaccctgaagtacgtggaggatgtgacaaacgtggtcagacgggatgtggagaagtggggccccttcgatctggtgtacggcagcacccaacccctgggcagctcttgtgaccggtgccctggctggtacatgtttcagttccaccggatcctgcagtacgccctgccgagacaggagtcccagcggccattcttttggattttcatggacaacttgctgctgaccgaggatgaccaggaaactaccactcggttcctgcagaccgaagccgtgaccctgcaggacgtgagaggccgggactaccagaacgccatgcgggtgtggtccaacatccctggactgaaaagcaagcacgcacctctgacccctaaagaagaggagtacctgcaggcccaggtgcggagcagaagcaagctggacgcccctaaggtggatctgctggtgaagaattgcctcctgcccctgagagagtacttcaagtatttcagccagaatagtctgcccctgggcggcccaagcagcggcgcccctcctcccagcggcggcagcccagccggctccccaacctctaccgaggagggcacctctgagtccgccacccccgagagcggccctggcacctccaccgagcccagcgagggcagcgcacccggcagccctgccggcagccccacctccacagaggagggaaccagcaccgagcccagcgaaggcagcgccccaggcaccagcaccgagcctagtgagggcggctctggcggcggcagcgcccaggagattaaacggatcaacaagatcagaagaagacttgtgaaagacagcaacaccaagaaggccggcaagacaggccccatgaaaaccctgctggttagagtgatgacacccgatctgagagagcggctggaaaacctgagaaagaagcctgaaaatatcccccagcccatcagcaatacatctagagccaacctgaataagctgctgaccgattacaccgaaatgaagaaggcgatcctgcatgtgtactgggaagagttccagaaggaccctgtgggcctgatgagccgggtggcccagcctgccagcaagaagatcgatcagaacaagctgaaacctgagatggacgagaagggcaacctgaccaccgccggctttgcctgctctcagtgtggccagcccctgttcgtgtacaagctggagcaggtgtctgagaagggcaaggcttacaccaactacttcggacggtgcaatgtggccgagcacgaaaagctgatcctgctggcccagctgaagcccgagaaggatagcgacgaagccgtgacatatagcctgggaaagtttgggcagagggccctggatttctacagcattcatgtgaccaaggagtccacccaccccgtgaagcccctggcccagatcgccggaaacagatacgcctccggacctgtgggaaaggccctgagcgacgcatgtatgggcacaatcgcctccttcctgtctaagtaccaggacatcatcatcgaacaccagaaggtggtgaagggcaaccagaagagactggagagcctgcgggagctggccggcaaggaaaacctggaataccctagcgtgaccctgccacctcagcctcacaccaaggagggcgttgatgcctacaacgaagtgatcgcccgggtgcgaatgtgggtgaacctgaacctgtggcagaagctgaagctaagcagagatgatgccaagcctctgctgagactgaagggattcccttcctttcctctggtcgagagacaggccaacgaagtggactggtgggacatggtgtgtaacgtgaagaagctgatcaacgagaaaaaggaggatggcaaggtgttttggcagaatctggctggctacaagagacaggaagccctgagaccatacctgagcagcgaggaagatcggaagaagggaaagaaattcgctcggtaccagctgggcgacctgctgctgcacctggaaaagaagcacggcgaggactggggaaaggtgtacgacgaggcctgggagcggattgacaagaaagtggaaggcctgagcaagcacatcaagctggaagaggaacggagaagcgaggacgcccagagcaaggccgccctgaccgactggctgcgggctaaggccagcttcgtgatcgagggcctgaaggaggccgacaaggacgagttctgcagatgcgagctgaagctgcagaagtggtacggggacctgcggggaaagcccttcgccatcgaagccgagaacagcatcctggacatcagcggcttcagcaagcagtacaactgtgccttcatctggcagaaggacggcgtgaagaagctgaacctgtacctgatcatcaactacttcaagggcggcaagctgcggttcaagaagatcaaacctgaagccttcgaagccaacagattctacaccgtgatcaacaaaaagagcggcgagatcgtgcccatggaggtgaacttcaacttcgacgaccccaacctgatcatcctgcctctggcctttggcaagagacagggcagagaattcatctggaacgacctgctgtccctggaaaccggcagcctgaagctggccaacggaagagtgatcgagaagacactgtacaacagaagaacccggcaggatgagcctgccctgttcgtggccctgaccttcgagcggcgggaggtcctggactcctccaatatcaaaccaatgaacctgatcggcgtggcaagaggcgaaaacatccccgccgtgatcgccctgaccgaccccgagggctgcccactgagccggtttaaggatagcctgggaaacccaacccacatcctgagaatcggcgagagctataaggagaagcagcggaccatccaggccaagaaggaggtggagcagcggagagccggcggctacagccggaagtacgccagcaaagccaagaatctggcagacgatatggtgagaaacaccgctagagatctgctgtactacgccgtgacccaggatgccatgctgatcttcgccaacctgagccggggcttcggccggcagggcaagcggaccttcatggccgagagacagtacacacggatggaggactggctgaccgccaagctggcctacgagggcctgagcaagacctacctgtccaagacactggcccagtacacctccaagacatgcagcaactgtgggtttaccatcaccagcgccgactacgacagggtgctggagaagctgaagaagacagcaacaggctggatgaccacaattaacggcaaggagctgaaggtggagggccagattacctactacaacagatacaagagacagaacgtagtcaaggacctgtccgtcgagctggatagactgagcgaagaatctgtgaacaacgacatctcctcctggacaaagggcagaagcggagaagctctgagcctcctgaagaaaagattctcccatagacccgtgcaggagaagttcgtgtgcctgaactgcggcttcgagacacacgcagccgagcaagccgccctgaacatcgccagatcctggctgttcctgcggagccaggagtacaagaaataccagacaaacaagacaaccggcaacaccgataagagagccttcgtcgagacctggcagtccttttaccggaagaagcttaaggaggtgtggaaacctgccgtgcggtctggcggatctggcggaggctccacaagcccccaggacctgatgaccttcgacgacgtggccgtggagttcacccagtgggagtggggccagctgaaccccgcccagaaggacctgtacagggaggtgatgctggagaacttcaggaacctgaccctgctgggcctgctggtgagcaagccctacatgatctgccagctggaggagggcggcgagcccttcatggtgaacaccgagatcagcgtgggcgcccacagcgactgggagaggaggaccagccccaagaaaaagagaaaagtctaagctgccttctgcggggcttgccttctggccatgcccttcttctctcccttgcacctgtacctcttggtctttgaataaagcctgagtaggaaggctagcaaaaaaaaaaaaaaaaaaaaaaaaaaaaaaaaaaaaaaaaaaaaaaaaaaaaaaaaaaaaaaaaaaaaaaaaaaaaaaaa

SEQ ID NO: 7165 - RNA, 5797 nt, synthetic construct
  source 1..5797: mol_type = other RNA
aggaaataagagagaaaagaagagtaagaagaaatataagagccaccatggcccctaagaagaagcgtaaagtgagccggatggaacgcctcgtctacgaggtgcggcagaagtgcagaaacatcgaggacatctgcatctcctgcggatctctgaacgtgaccctggagcacccactgttcatcggcggcatgtgccagaactgtaaaaactgttttctggagtgtgcctatcaatacgacgatgacggctaccagagctactgcaccatctgttgcggcggaagagaggtgctgatgtgtggaaataacaactgctgccggtgcttctgcgtggaatgcgtggacctgctggtgggccccggcgccgcccaggccgctattaaggaagatccttggaactgctacatgtgcggccacaagggcacatacggcctgctgagacggagagaggactggcctagcagactgcagatgttcttcgccaataaccacgaccaggagttcgacccccctaaggtgtaccctcccgtccccgccgagaagagaaagcccatccgggtcctgagcctgttcgatggcatcgccaccggtctgctggtgctgaaggacctgggcatccaggtggataggtacattgcctccgaggtgtgcgaggactccatcaccgtgggaatggtgcgtcatcagggcaagatcatgtacgtgggcgacgtgcggagcgtgacacagaagcatatccaggagtggggccctttcgacctggtgatcggcggcagcccttgcaatgacctgagcatcgtgaacccagcccggaagggcctgtacgagggaaccggcagactgttcttcgagttttacagactgctgcacgacgcccggcctaaggaaggcgacgaccggcccttcttttggctgttcgagaatgtggtggccatgggagtcagcgacaagcgggatattagccggttcctggagagcaaccccgtgatgatcgatgccaaggaagtgagcgccgcccaccgggccagatacttctggggcaatctgcctggcatgaacagacccctggccagcaccgtgaacgacaagctggagctgcaggagtgcctggagcacggccggatcgccaagttcagcaaggtgagaaccatcaccacccgaagcaacagcatcaaacaaggcaaggaccagcactttcctgtgttcatgaacgagaaggaggacatcctgtggtgtaccgagatggagagagtgttcgggttcccagtccactacacagatgtcagcaacatgtctagactggccagacagagactgctgggaagaagctggtccgtccctgtgatcagacacctgttcgcccctctgaaggagtacttcgcctgcgtgagcagcggcaacagcaacgccaacagccggggccccagcttctctagcggcctggtgccactgtccctgagagggagccacatgggccccatggagatctacaaaaccgtgagcgcctggaagcggcagcctgtgcgcgtgctgagcctgtttcggaatatcgataaagtcctgaaaagcctgggattcctggagagcggctctggctccggcggtggcaccctgaagtacgtggaggatgtgacaaacgtggtcagacgggatgtggagaagtggggccccttcgatctggtgtacggcagcacccaacccctgggcagctcttgtgaccggtgccctggctggtacatgtttcagttccaccggatcctgcagtacgccctgccgagacaggagtcccagcggccattcttttggattttcatggacaacttgctgctgaccgaggatgaccaggaaactaccactcggttcctgcagaccgaagccgtgaccctgcaggacgtgagaggccgggactaccagaacgccatgcgggtgtggtccaacatccctggactgaaaagcaagcacgcacctctgacccctaaagaagaggagtacctgcaggcccaggtgcggagcagaagcaagctggacgcccctaaggtggatctgctggtgaagaattgcctcctgcccctgagagagtacttcaagtatttcagccagaatagtctgcccctgggcggcccaagcagcggcgcccctcctcccagcggcggcagcccagccggctccccaacctctaccgaggagggcacctctgagtccgccacccccgagagcggccctggcacctccaccgagcccagcgagggcagcgcacccggcagccctgccggcagccccacctccacagaggagggaaccagcaccgagcccagcgaaggcagcgccccaggcaccagcaccgagcctagtgagggcggctctggcggcggcagcgcccaggagattaaacggatcaacaagatcagaagaagacttgtgaaagacagcaacaccaagaaggccggcaagacaggccccatgaaaaccctgctggttagagtgatgacacccgatctgagagagcggctggaaaacctgagaaagaagcctgaaaatatcccccagcccatcagcaatacatctagagccaacctgaataagctgctgaccgattacaccgaaatgaagaaggcgatcctgcatgtgtactgggaagagttccagaaggaccctgtgggcctgatgagccgggtggcccagcctgccagcaagaagatcgatcagaacaagctgaaacctgagatggacgagaagggcaacctgaccaccgccggctttgcctgctctcagtgtggccagcccctgttcgtgtacaagctggagcaggtgtctgagaagggcaaggcttacaccaactacttcggacggtgcaatgtggccgagcacgaaaagctgatcctgctggcccagctgaagcccgagaaggatagcgacgaagccgtgacatatagcctgggaaagtttgggcagagggccctggatttctacagcattcatgtgaccaaggagtccacccaccccgtgaagcccctggcccagatcgccggaaacagatacgcctccggacctgtgggaaaggccctgagcgacgcatgtatgggcacaatcgcctccttcctgtctaagtaccaggacatcatcatcgaacaccagaaggtggtgaagggcaaccagaagagactggagagcctgcgggagctggccggcaaggaaaacctggaataccctagcgtgaccctgccacctcagcctcacaccaaggagggcgttgatgcctacaacgaagtgatcgcccgggtgcgaatgtgggtgaacctgaacctgtggcagaagctgaagctaagcagagatgatgccaagcctctgctgagactgaagggattcccttcctttcctctggtcgagagacaggccaacgaagtggactggtgggacatggtgtgtaacgtgaagaagctgatcaacgagaaaaaggaggatggcaaggtgttttggcagaatctggctggctacaagagacaggaagccctgagaccatacctgagcagcgaggaagatcggaagaagggaaagaaattcgctcggtaccagctgggcgacctgctgctgcacctggaaaagaagcacggcgaggactggggaaaggtgtacgacgaggcctgggagcggattgacaagaaagtggaaggcctgagcaagcacatcaagctggaagaggaacggagaagcgaggacgcccagagcaaggccgccctgaccgactggctgcgggctaaggccagcttcgtgatcgagggcctgaaggaggccgacaaggacgagttctgcagatgcgagctgaagctgcagaagtggtacggggacctgcggggaaagcccttcgccatcgaagccgagaacagcatcctggacatcagcggcttcagcaagcagtacaactgtgccttcatctggcagaaggacggcgtgaagaagctgaacctgtacctgatcatcaactacttcaagggcggcaagctgcggttcaagaagatcaaacctgaagccttcgaagccaacagattctacaccgtgatcaacaaaaagagcggcgagatcgtgcccatggaggtgaacttcaacttcgacgaccccaacctgatcatcctgcctctggcctttggcaagagacagggcagagaattcatctggaacgacctgctgtccctggaaaccggcagcctgaagctggccaacggaagagtgatcgagaagacactgtacaacagaagaacccggcaggatgagcctgccctgttcgtggccctgaccttcgagcggcgggaggtcctggactcctccaatatcaaaccaatgaacctgatcggcgtggcaagaggcgaaaacatccccgccgtgatcgccctgaccgaccccgagggctgcccactgagccggtttaaggatagcctgggaaacccaacccacatcctgagaatcggcgagagctataaggagaagcagcggaccatccaggccaagaaggaggtggagcagcggagagccggcggctacagccggaagtacgccagcaaagccaagaatctggcagacgatatggtgagaaacaccgctagagatctgctgtactacgccgtgacccaggatgccatgctgatcttcgccaacctgagccggggcttcggccggcagggcaagcggaccttcatggccgagagacagtacacacggatggaggactggctgaccgccaagctggcctacgagggcctgagcaagacctacctgtccaagacactggcccagtacacctccaagacatgcagcaactgtgggtttaccatcaccagcgccgactacgacagggtgctggagaagctgaagaagacagcaacaggctggatgaccacaattaacggcaaggagctgaaggtggagggccagattacctactacaacagatacaagagacagaacgtagtcaaggacctgtccgtcgagctggatagactgagcgaagaatctgtgaacaacgacatctcctcctggacaaagggcagaagcggagaagctctgagcctcctgaagaaaagattctcccatagacccgtgcaggagaagttcgtgtgcctgaactgcggcttcgagacacacgcagccgagcaagccgccctgaacatcgccagatcctggctgttcctgcggagccaggagtacaagaaataccagacaaacaagacaaccggcaacaccgataagagagccttcgtcgagacctggcagtccttttaccggaagaagcttaaggaggtgtggaaacctgccgtgcggtctggcggatctggcggaggctccacaagcaggagggagagcgtgaccttcgaggacgtggccgtgtacttcagcgagaacgagtggatcggcctgggccccgcccagagggccctgtacagggacgtgatgctggagaactacggcgccgtggccagcctggccttccccttccccaagcccgccctgatcagccagctggagaggggcgagaccccctggtgcagcgtgccccagggcgccctggacggcgaggcccccaggggcatcagcaccagccccaagaaaaagagaaaagtctaagctgccttctgcggggcttgccttctggccatgcccttcttctctcccttgcacctgtacctcttggtctttgaataaagcctgagtaggaaggctagcaaaaaaaaaaaaaaaaaaaaaaaaaaaaaaaaaaaaaaaaaaaaaaaaaaaaaaaaaaaaaaaaaaaaaaaaaaaaaaaa

SEQ ID NO: 7166 - RNA, 5797 nt, synthetic construct
  source 1..5797: mol_type = other RNA
aggaaataagagagaaaagaagagtaagaagaaatataagagccaccatggcccctaagaagaagcgtaaagtgagccggatggaacgcctcgtctacgaggtgcggcagaagtgcagaaacatcgaggacatctgcatctcctgcggatctctgaacgtgaccctggagcacccactgttcatcggcggcatgtgccagaactgtaaaaactgttttctggagtgtgcctatcaatacgacgatgacggctaccagagctactgcaccatctgttgcggcggaagagaggtgctgatgtgtggaaataacaactgctgccggtgcttctgcgtggaatgcgtggacctgctggtgggccccggcgccgcccaggccgctattaaggaagatccttggaactgctacatgtgcggccacaagggcacatacggcctgctgagacggagagaggactggcctagcagactgcagatgttcttcgccaataaccacgaccaggagttcgacccccctaaggtgtaccctcccgtccccgccgagaagagaaagcccatccgggtcctgagcctgttcgatggcatcgccaccggtctgctggtgctgaaggacctgggcatccaggtggataggtacattgcctccgaggtgtgcgaggactccatcaccgtgggaatggtgcgtcatcagggcaagatcatgtacgtgggcgacgtgcggagcgtgacacagaagcatatccaggagtggggccctttcgacctggtgatcggcggcagcccttgcaatgacctgagcatcgtgaacccagcccggaagggcctgtacgagggaaccggcagactgttcttcgagttttacagactgctgcacgacgcccggcctaaggaaggcgacgaccggcccttcttttggctgttcgagaatgtggtggccatgggagtcagcgacaagcgggatattagccggttcctggagagcaaccccgtgatgatcgatgccaaggaagtgagcgccgcccaccgggccagatacttctggggcaatctgcctggcatgaacagacccctggccagcaccgtgaacgacaagctggagctgcaggagtgcctggagcacggccggatcgccaagttcagcaaggtgagaaccatcaccacccgaagcaacagcatcaaacaaggcaaggaccagcactttcctgtgttcatgaacgagaaggaggacatcctgtggtgtaccgagatggagagagtgttcgggttcccagtccactacacagatgtcagcaacatgtctagactggccagacagagactgctgggaagaagctggtccgtccctgtgatcagacacctgttcgcccctctgaaggagtacttcgcctgcgtgagcagcggcaacagcaacgccaacagccggggccccagcttctctagcggcctggtgccactgtccctgagagggagccacatgggccccatggagatctacaaaaccgtgagcgcctggaagcggcagcctgtgcgcgtgctgagcctgtttcggaatatcgataaagtcctgaaaagcctgggattcctggagagcggctctggctccggcggtggcaccctgaagtacgtggaggatgtgacaaacgtggtcagacgggatgtggagaagtggggccccttcgatctggtgtacggcagcacccaacccctgggcagctcttgtgaccggtgccctggctggtacatgtttcagttccaccggatcctgcagtacgccctgccgagacaggagtcccagcggccattcttttggattttcatggacaacttgctgctgaccgaggatgaccaggaaactaccactcggttcctgcagaccgaagccgtgaccctgcaggacgtgagaggccgggactaccagaacgccatgcgggtgtggtccaacatccctggactgaaaagcaagcacgcacctctgacccctaaagaagaggagtacctgcaggcccaggtgcggagcagaagcaagctggacgcccctaaggtggatctgctggtgaagaattgcctcctgcccctgagagagtacttcaagtatttcagccagaatagtctgcccctgggcggcccaagcagcggcgcccctcctcccagcggcggcagcccagccggctccccaacctctaccgaggagggcacctctgagtccgccacccccgagagcggccctggcacctccaccgagcccagcgagggcagcgcacccggcagccctgccggcagccccacctccacagaggagggaaccagcaccgagcccagcgaaggcagcgccccaggcaccagcaccgagcctagtgagggcggctctggcggcggcagcgcccaggagattaaacggatcaacaagatcagaagaagacttgtgaaagacagcaacaccaagaaggccggcaagacaggccccatgaaaaccctgctggttagagtgatgacacccgatctgagagagcggctggaaaacctgagaaagaagcctgaaaatatcccccagcccatcagcaatacatctagagccaacctgaataagctgctgaccgattacaccgaaatgaagaaggcgatcctgcatgtgtactgggaagagttccagaaggaccctgtgggcctgatgagccgggtggcccagcctgccagcaagaagatcgatcagaacaagctgaaacctgagatggacgagaagggcaacctgaccaccgccggctttgcctgctctcagtgtggccagcccctgttcgtgtacaagctggagcaggtgtctgagaagggcaaggcttacaccaactacttcggacggtgcaatgtggccgagcacgaaaagctgatcctgctggcccagctgaagcccgagaaggatagcgacgaagccgtgacatatagcctgggaaagtttgggcagagggccctggatttctacagcattcatgtgaccaaggagtccacccaccccgtgaagcccctggcccagatcgccggaaacagatacgcctccggacctgtgggaaaggccctgagcgacgcatgtatgggcacaatcgcctccttcctgtctaagtaccaggacatcatcatcgaacaccagaaggtggtgaagggcaaccagaagagactggagagcctgcgggagctggccggcaaggaaaacctggaataccctagcgtgaccctgccacctcagcctcacaccaaggagggcgttgatgcctacaacgaagtgatcgcccgggtgcgaatgtgggtgaacctgaacctgtggcagaagctgaagctaagcagagatgatgccaagcctctgctgagactgaagggattcccttcctttcctctggtcgagagacaggccaacgaagtggactggtgggacatggtgtgtaacgtgaagaagctgatcaacgagaaaaaggaggatggcaaggtgttttggcagaatctggctggctacaagagacaggaagccctgagaccatacctgagcagcgaggaagatcggaagaagggaaagaaattcgctcggtaccagctgggcgacctgctgctgcacctggaaaagaagcacggcgaggactggggaaaggtgtacgacgaggcctgggagcggattgacaagaaagtggaaggcctgagcaagcacatcaagctggaagaggaacggagaagcgaggacgcccagagcaaggccgccctgaccgactggctgcgggctaaggccagcttcgtgatcgagggcctgaaggaggccgacaaggacgagttctgcagatgcgagctgaagctgcagaagtggtacggggacctgcggggaaagcccttcgccatcgaagccgagaacagcatcctggacatcagcggcttcagcaagcagtacaactgtgccttcatctggcagaaggacggcgtgaagaagctgaacctgtacctgatcatcaactacttcaagggcggcaagctgcggttcaagaagatcaaacctgaagccttcgaagccaacagattctacaccgtgatcaacaaaaagagcggcgagatcgtgcccatggaggtgaacttcaacttcgacgaccccaacctgatcatcctgcctctggcctttggcaagagacagggcagagaattcatctggaacgacctgctgtccctggaaaccggcagcctgaagctggccaacggaagagtgatcgagaagacactgtacaacagaagaacccggcaggatgagcctgccctgttcgtggccctgaccttcgagcggcgggaggtcctggactcctccaatatcaaaccaatgaacctgatcggcgtggcaagaggcgaaaacatccccgccgtgatcgccctgaccgaccccgagggctgcccactgagccggtttaaggatagcctgggaaacccaacccacatcctgagaatcggcgagagctataaggagaagcagcggaccatccaggccaagaaggaggtggagcagcggagagccggcggctacagccggaagtacgccagcaaagccaagaatctggcagacgatatggtgagaaacaccgctagagatctgctgtactacgccgtgacccaggatgccatgctgatcttcgccaacctgagccggggcttcggccggcagggcaagcggaccttcatggccgagagacagtacacacggatggaggactggctgaccgccaagctggcctacgagggcctgagcaagacctacctgtccaagacactggcccagtacacctccaagacatgcagcaactgtgggtttaccatcaccagcgccgactacgacagggtgctggagaagctgaagaagacagcaacaggctggatgaccacaattaacggcaaggagctgaaggtggagggccagattacctactacaacagatacaagagacagaacgtagtcaaggacctgtccgtcgagctggatagactgagcgaagaatctgtgaacaacgacatctcctcctggacaaagggcagaagcggagaagctctgagcctcctgaagaaaagattctcccatagacccgtgcaggagaagttcgtgtgcctgaactgcggcttcgagacacacgcagccgagcaagccgccctgaacatcgccagatcctggctgttcctgcggagccaggagtacaagaaataccagacaaacaagacaaccggcaacaccgataagagagccttcgtcgagacctggcagtccttttaccggaagaagcttaaggaggtgtggaaacctgccgtgcggtctggcggatctggcggaggctccacaagccaggccgaggtgaccttcgaggacgtggccgtgtacctgagcagggaggagtggggcaggctgggccccgcccagaggggcctgtacagggacgtgatgctggagacctacggcaacctggtgagcctgggcgtgggccccgccggccccaagcccggcgtgatcagccagctggagaggggcgacgagccctgggtgctggacgtgcagggcaccagcggcaaggagcacctgagggtgaacaccagccccaagaaaaagagaaaagtctaagctgccttctgcggggcttgccttctggccatgcccttcttctctcccttgcacctgtacctcttggtctttgaataaagcctgagtaggaaggctagcaaaaaaaaaaaaaaaaaaaaaaaaaaaaaaaaaaaaaaaaaaaaaaaaaaaaaaaaaaaaaaaaaaaaaaaaaaaaaaaa

SEQ ID NO: 7167 - RNA, 5797 nt, synthetic construct
  source 1..5797: mol_type = other RNA
aggaaataagagagaaaagaagagtaagaagaaatataagagccaccatggcccctaagaagaagcgtaaagtgagccggatggaacgcctcgtctacgaggtgcggcagaagtgcagaaacatcgaggacatctgcatctcctgcggatctctgaacgtgaccctggagcacccactgttcatcggcggcatgtgccagaactgtaaaaactgttttctggagtgtgcctatcaatacgacgatgacggctaccagagctactgcaccatctgttgcggcggaagagaggtgctgatgtgtggaaataacaactgctgccggtgcttctgcgtggaatgcgtggacctgctggtgggccccggcgccgcccaggccgctattaaggaagatccttggaactgctacatgtgcggccacaagggcacatacggcctgctgagacggagagaggactggcctagcagactgcagatgttcttcgccaataaccacgaccaggagttcgacccccctaaggtgtaccctcccgtccccgccgagaagagaaagcccatccgggtcctgagcctgttcgatggcatcgccaccggtctgctggtgctgaaggacctgggcatccaggtggataggtacattgcctccgaggtgtgcgaggactccatcaccgtgggaatggtgcgtcatcagggcaagatcatgtacgtgggcgacgtgcggagcgtgacacagaagcatatccaggagtggggccctttcgacctggtgatcggcggcagcccttgcaatgacctgagcatcgtgaacccagcccggaagggcctgtacgagggaaccggcagactgttcttcgagttttacagactgctgcacgacgcccggcctaaggaaggcgacgaccggcccttcttttggctgttcgagaatgtggtggccatgggagtcagcgacaagcgggatattagccggttcctggagagcaaccccgtgatgatcgatgccaaggaagtgagcgccgcccaccgggccagatacttctggggcaatctgcctggcatgaacagacccctggccagcaccgtgaacgacaagctggagctgcaggagtgcctggagcacggccggatcgccaagttcagcaaggtgagaaccatcaccacccgaagcaacagcatcaaacaaggcaaggaccagcactttcctgtgttcatgaacgagaaggaggacatcctgtggtgtaccgagatggagagagtgttcgggttcccagtccactacacagatgtcagcaacatgtctagactggccagacagagactgctgggaagaagctggtccgtccctgtgatcagacacctgttcgcccctctgaaggagtacttcgcctgcgtgagcagcggcaacagcaacgccaacagccggggccccagcttctctagcggcctggtgccactgtccctgagagggagccacatgggccccatggagatctacaaaaccgtgagcgcctggaagcggcagcctgtgcgcgtgctgagcctgtttcggaatatcgataaagtcctgaaaagcctgggattcctggagagcggctctggctccggcggtggcaccctgaagtacgtggaggatgtgacaaacgtggtcagacgggatgtggagaagtggggccccttcgatctggtgtacggcagcacccaacccctgggcagctcttgtgaccggtgccctggctggtacatgtttcagttccaccggatcctgcagtacgccctgccgagacaggagtcccagcggccattcttttggattttcatggacaacttgctgctgaccgaggatgaccaggaaactaccactcggttcctgcagaccgaagccgtgaccctgcaggacgtgagaggccgggactaccagaacgccatgcgggtgtggtccaacatccctggactgaaaagcaagcacgcacctctgacccctaaagaagaggagtacctgcaggcccaggtgcggagcagaagcaagctggacgcccctaaggtggatctgctggtgaagaattgcctcctgcccctgagagagtacttcaagtatttcagccagaatagtctgcccctgggcggcccaagcagcggcgcccctcctcccagcggcggcagcccagccggctccccaacctctaccgaggagggcacctctgagtccgccacccccgagagcggccctggcacctccaccgagcccagcgagggcagcgcacccggcagccctgccggcagccccacctccacagaggagggaaccagcaccgagcccagcgaaggcagcgccccaggcaccagcaccgagcctagtgagggcggctctggcggcggcagcgcccaggagattaaacggatcaacaagatcagaagaagacttgtgaaagacagcaacaccaagaaggccggcaagacaggccccatgaaaaccctgctggttagagtgatgacacccgatctgagagagcggctggaaaacctgagaaagaagcctgaaaatatcccccagcccatcagcaatacatctagagccaacctgaataagctgctgaccgattacaccgaaatgaagaaggcgatcctgcatgtgtactgggaagagttccagaaggaccctgtgggcctgatgagccgggtggcccagcctgccagcaagaagatcgatcagaacaagctgaaacctgagatggacgagaagggcaacctgaccaccgccggctttgcctgctctcagtgtggccagcccctgttcgtgtacaagctggagcaggtgtctgagaagggcaaggcttacaccaactacttcggacggtgcaatgtggccgagcacgaaaagctgatcctgctggcccagctgaagcccgagaaggatagcgacgaagccgtgacatatagcctgggaaagtttgggcagagggccctggatttctacagcattcatgtgaccaaggagtccacccaccccgtgaagcccctggcccagatcgccggaaacagatacgcctccggacctgtgggaaaggccctgagcgacgcatgtatgggcacaatcgcctccttcctgtctaagtaccaggacatcatcatcgaacaccagaaggtggtgaagggcaaccagaagagactggagagcctgcgggagctggccggcaaggaaaacctggaataccctagcgtgaccctgccacctcagcctcacaccaaggagggcgttgatgcctacaacgaagtgatcgcccgggtgcgaatgtgggtgaacctgaacctgtggcagaagctgaagctaagcagagatgatgccaagcctctgctgagactgaagggattcccttcctttcctctggtcgagagacaggccaacgaagtggactggtgggacatggtgtgtaacgtgaagaagctgatcaacgagaaaaaggaggatggcaaggtgttttggcagaatctggctggctacaagagacaggaagccctgagaccatacctgagcagcgaggaagatcggaagaagggaaagaaattcgctcggtaccagctgggcgacctgctgctgcacctggaaaagaagcacggcgaggactggggaaaggtgtacgacgaggcctgggagcggattgacaagaaagtggaaggcctgagcaagcacatcaagctggaagaggaacggagaagcgaggacgcccagagcaaggccgccctgaccgactggctgcgggctaaggccagcttcgtgatcgagggcctgaaggaggccgacaaggacgagttctgcagatgcgagctgaagctgcagaagtggtacggggacctgcggggaaagcccttcgccatcgaagccgagaacagcatcctggacatcagcggcttcagcaagcagtacaactgtgccttcatctggcagaaggacggcgtgaagaagctgaacctgtacctgatcatcaactacttcaagggcggcaagctgcggttcaagaagatcaaacctgaagccttcgaagccaacagattctacaccgtgatcaacaaaaagagcggcgagatcgtgcccatggaggtgaacttcaacttcgacgaccccaacctgatcatcctgcctctggcctttggcaagagacagggcagagaattcatctggaacgacctgctgtccctggaaaccggcagcctgaagctggccaacggaagagtgatcgagaagacactgtacaacagaagaacccggcaggatgagcctgccctgttcgtggccctgaccttcgagcggcgggaggtcctggactcctccaatatcaaaccaatgaacctgatcggcgtggcaagaggcgaaaacatccccgccgtgatcgccctgaccgaccccgagggctgcccactgagccggtttaaggatagcctgggaaacccaacccacatcctgagaatcggcgagagctataaggagaagcagcggaccatccaggccaagaaggaggtggagcagcggagagccggcggctacagccggaagtacgccagcaaagccaagaatctggcagacgatatggtgagaaacaccgctagagatctgctgtactacgccgtgacccaggatgccatgctgatcttcgccaacctgagccggggcttcggccggcagggcaagcggaccttcatggccgagagacagtacacacggatggaggactggctgaccgccaagctggcctacgagggcctgagcaagacctacctgtccaagacactggcccagtacacctccaagacatgcagcaactgtgggtttaccatcaccagcgccgactacgacagggtgctggagaagctgaagaagacagcaacaggctggatgaccacaattaacggcaaggagctgaaggtggagggccagattacctactacaacagatacaagagacagaacgtagtcaaggacctgtccgtcgagctggatagactgagcgaagaatctgtgaacaacgacatctcctcctggacaaagggcagaagcggagaagctctgagcctcctgaagaaaagattctcccatagacccgtgcaggagaagttcgtgtgcctgaactgcggcttcgagacacacgcagccgagcaagccgccctgaacatcgccagatcctggctgttcctgcggagccaggagtacaagaaataccagacaaacaagacaaccggcaacaccgataagagagccttcgtcgagacctggcagtccttttaccggaagaagcttaaggaggtgtggaaacctgccgtgcggtctggcggatctggcggaggctccacaagcgcccagggccaggtgaacttcgaggacgtggccgtgtacttcagccccgaggagtggggcctgctggacgaggcccagaggctgctgtacagggacgtgatgctggagaacctggccctgatggccagcctgggctacgagagcagcatgagccacggcttcgccagcctggagctgggcagcaagccctggggcagcgactgggccgacgtgacccccgccaggaccagggacacccagggcaccagccccaagaaaaagagaaaagtctaagctgccttctgcggggcttgccttctggccatgcccttcttctctcccttgcacctgtacctcttggtctttgaataaagcctgagtaggaaggctagcaaaaaaaaaaaaaaaaaaaaaaaaaaaaaaaaaaaaaaaaaaaaaaaaaaaaaaaaaaaaaaaaaaaaaaaaaaaaaaaa

SEQ ID NO: 7168 - RNA, 5797 nt, synthetic construct
  source 1..5797: mol_type = other RNA
aggaaataagagagaaaagaagagtaagaagaaatataagagccaccatggcccctaagaagaagcgtaaagtgagccggatggaacgcctcgtctacgaggtgcggcagaagtgcagaaacatcgaggacatctgcatctcctgcggatctctgaacgtgaccctggagcacccactgttcatcggcggcatgtgccagaactgtaaaaactgttttctggagtgtgcctatcaatacgacgatgacggctaccagagctactgcaccatctgttgcggcggaagagaggtgctgatgtgtggaaataacaactgctgccggtgcttctgcgtggaatgcgtggacctgctggtgggccccggcgccgcccaggccgctattaaggaagatccttggaactgctacatgtgcggccacaagggcacatacggcctgctgagacggagagaggactggcctagcagactgcagatgttcttcgccaataaccacgaccaggagttcgacccccctaaggtgtaccctcccgtccccgccgagaagagaaagcccatccgggtcctgagcctgttcgatggcatcgccaccggtctgctggtgctgaaggacctgggcatccaggtggataggtacattgcctccgaggtgtgcgaggactccatcaccgtgggaatggtgcgtcatcagggcaagatcatgtacgtgggcgacgtgcggagcgtgacacagaagcatatccaggagtggggccctttcgacctggtgatcggcggcagcccttgcaatgacctgagcatcgtgaacccagcccggaagggcctgtacgagggaaccggcagactgttcttcgagttttacagactgctgcacgacgcccggcctaaggaaggcgacgaccggcccttcttttggctgttcgagaatgtggtggccatgggagtcagcgacaagcgggatattagccggttcctggagagcaaccccgtgatgatcgatgccaaggaagtgagcgccgcccaccgggccagatacttctggggcaatctgcctggcatgaacagacccctggccagcaccgtgaacgacaagctggagctgcaggagtgcctggagcacggccggatcgccaagttcagcaaggtgagaaccatcaccacccgaagcaacagcatcaaacaaggcaaggaccagcactttcctgtgttcatgaacgagaaggaggacatcctgtggtgtaccgagatggagagagtgttcgggttcccagtccactacacagatgtcagcaacatgtctagactggccagacagagactgctgggaagaagctggtccgtccctgtgatcagacacctgttcgcccctctgaaggagtacttcgcctgcgtgagcagcggcaacagcaacgccaacagccggggccccagcttctctagcggcctggtgccactgtccctgagagggagccacatgggccccatggagatctacaaaaccgtgagcgcctggaagcggcagcctgtgcgcgtgctgagcctgtttcggaatatcgataaagtcctgaaaagcctgggattcctggagagcggctctggctccggcggtggcaccctgaagtacgtggaggatgtgacaaacgtggtcagacgggatgtggagaagtggggccccttcgatctggtgtacggcagcacccaacccctgggcagctcttgtgaccggtgccctggctggtacatgtttcagttccaccggatcctgcagtacgccctgccgagacaggagtcccagcggccattcttttggattttcatggacaacttgctgctgaccgaggatgaccaggaaactaccactcggttcctgcagaccgaagccgtgaccctgcaggacgtgagaggccgggactaccagaacgccatgcgggtgtggtccaacatccctggactgaaaagcaagcacgcacctctgacccctaaagaagaggagtacctgcaggcccaggtgcggagcagaagcaagctggacgcccctaaggtggatctgctggtgaagaattgcctcctgcccctgagagagtacttcaagtatttcagccagaatagtctgcccctgggcggcccaagcagcggcgcccctcctcccagcggcggcagcccagccggctccccaacctctaccgaggagggcacctctgagtccgccacccccgagagcggccctggcacctccaccgagcccagcgagggcagcgcacccggcagccctgccggcagccccacctccacagaggagggaaccagcaccgagcccagcgaaggcagcgccccaggcaccagcaccgagcctagtgagggcggctctggcggcggcagcgcccaggagattaaacggatcaacaagatcagaagaagacttgtgaaagacagcaacaccaagaaggccggcaagacaggccccatgaaaaccctgctggttagagtgatgacacccgatctgagagagcggctggaaaacctgagaaagaagcctgaaaatatcccccagcccatcagcaatacatctagagccaacctgaataagctgctgaccgattacaccgaaatgaagaaggcgatcctgcatgtgtactgggaagagttccagaaggaccctgtgggcctgatgagccgggtggcccagcctgccagcaagaagatcgatcagaacaagctgaaacctgagatggacgagaagggcaacctgaccaccgccggctttgcctgctctcagtgtggccagcccctgttcgtgtacaagctggagcaggtgtctgagaagggcaaggcttacaccaactacttcggacggtgcaatgtggccgagcacgaaaagctgatcctgctggcccagctgaagcccgagaaggatagcgacgaagccgtgacatatagcctgggaaagtttgggcagagggccctggatttctacagcattcatgtgaccaaggagtccacccaccccgtgaagcccctggcccagatcgccggaaacagatacgcctccggacctgtgggaaaggccctgagcgacgcatgtatgggcacaatcgcctccttcctgtctaagtaccaggacatcatcatcgaacaccagaaggtggtgaagggcaaccagaagagactggagagcctgcgggagctggccggcaaggaaaacctggaataccctagcgtgaccctgccacctcagcctcacaccaaggagggcgttgatgcctacaacgaagtgatcgcccgggtgcgaatgtgggtgaacctgaacctgtggcagaagctgaagctaagcagagatgatgccaagcctctgctgagactgaagggattcccttcctttcctctggtcgagagacaggccaacgaagtggactggtgggacatggtgtgtaacgtgaagaagctgatcaacgagaaaaaggaggatggcaaggtgttttggcagaatctggctggctacaagagacaggaagccctgagaccatacctgagcagcgaggaagatcggaagaagggaaagaaattcgctcggtaccagctgggcgacctgctgctgcacctggaaaagaagcacggcgaggactggggaaaggtgtacgacgaggcctgggagcggattgacaagaaagtggaaggcctgagcaagcacatcaagctggaagaggaacggagaagcgaggacgcccagagcaaggccgccctgaccgactggctgcgggctaaggccagcttcgtgatcgagggcctgaaggaggccgacaaggacgagttctgcagatgcgagctgaagctgcagaagtggtacggggacctgcggggaaagcccttcgccatcgaagccgagaacagcatcctggacatcagcggcttcagcaagcagtacaactgtgccttcatctggcagaaggacggcgtgaagaagctgaacctgtacctgatcatcaactacttcaagggcggcaagctgcggttcaagaagatcaaacctgaagccttcgaagccaacagattctacaccgtgatcaacaaaaagagcggcgagatcgtgcccatggaggtgaacttcaacttcgacgaccccaacctgatcatcctgcctctggcctttggcaagagacagggcagagaattcatctggaacgacctgctgtccctggaaaccggcagcctgaagctggccaacggaagagtgatcgagaagacactgtacaacagaagaacccggcaggatgagcctgccctgttcgtggccctgaccttcgagcggcgggaggtcctggactcctccaatatcaaaccaatgaacctgatcggcgtggcaagaggcgaaaacatccccgccgtgatcgccctgaccgaccccgagggctgcccactgagccggtttaaggatagcctgggaaacccaacccacatcctgagaatcggcgagagctataaggagaagcagcggaccatccaggccaagaaggaggtggagcagcggagagccggcggctacagccggaagtacgccagcaaagccaagaatctggcagacgatatggtgagaaacaccgctagagatctgctgtactacgccgtgacccaggatgccatgctgatcttcgccaacctgagccggggcttcggccggcagggcaagcggaccttcatggccgagagacagtacacacggatggaggactggctgaccgccaagctggcctacgagggcctgagcaagacctacctgtccaagacactggcccagtacacctccaagacatgcagcaactgtgggtttaccatcaccagcgccgactacgacagggtgctggagaagctgaagaagacagcaacaggctggatgaccacaattaacggcaaggagctgaaggtggagggccagattacctactacaacagatacaagagacagaacgtagtcaaggacctgtccgtcgagctggatagactgagcgaagaatctgtgaacaacgacatctcctcctggacaaagggcagaagcggagaagctctgagcctcctgaagaaaagattctcccatagacccgtgcaggagaagttcgtgtgcctgaactgcggcttcgagacacacgcagccgagcaagccgccctgaacatcgccagatcctggctgttcctgcggagccaggagtacaagaaataccagacaaacaagacaaccggcaacaccgataagagagccttcgtcgagacctggcagtccttttaccggaagaagcttaaggaggtgtggaaacctgccgtgcggtctggcggatctggcggaggctccacaagccaggccgaggtgaccttcgaggacgtggccgtgctgctgagccaggaggagtggggcctgctgggccccagccagaagggcctgtacagggaggtgatgctggagacctacaggaacctgctgagcctgggcgccggcctggccgaccccaagcccgaggtgatcgtgcagctggagaggggcgacgagctgtgggtgctggacatgcacggcgccgagcagcccagcgtggacggcagcgccaccagccccaagaaaaagagaaaagtctaagctgccttctgcggggcttgccttctggccatgcccttcttctctcccttgcacctgtacctcttggtctttgaataaagcctgagtaggaaggctagcaaaaaaaaaaaaaaaaaaaaaaaaaaaaaaaaaaaaaaaaaaaaaaaaaaaaaaaaaaaaaaaaaaaaaaaaaaaaaaaa

SEQ ID NO: 7169 - RNA, 5797 nt, synthetic construct
  source 1..5797: mol_type = other RNA
aggaaataagagagaaaagaagagtaagaagaaatataagagccaccatggcccctaagaagaagcgtaaagtgagccggatggaacgcctcgtctacgaggtgcggcagaagtgcagaaacatcgaggacatctgcatctcctgcggatctctgaacgtgaccctggagcacccactgttcatcggcggcatgtgccagaactgtaaaaactgttttctggagtgtgcctatcaatacgacgatgacggctaccagagctactgcaccatctgttgcggcggaagagaggtgctgatgtgtggaaataacaactgctgccggtgcttctgcgtggaatgcgtggacctgctggtgggccccggcgccgcccaggccgctattaaggaagatccttggaactgctacatgtgcggccacaagggcacatacggcctgctgagacggagagaggactggcctagcagactgcagatgttcttcgccaataaccacgaccaggagttcgacccccctaaggtgtaccctcccgtccccgccgagaagagaaagcccatccgggtcctgagcctgttcgatggcatcgccaccggtctgctggtgctgaaggacctgggcatccaggtggataggtacattgcctccgaggtgtgcgaggactccatcaccgtgggaatggtgcgtcatcagggcaagatcatgtacgtgggcgacgtgcggagcgtgacacagaagcatatccaggagtggggccctttcgacctggtgatcggcggcagcccttgcaatgacctgagcatcgtgaacccagcccggaagggcctgtacgagggaaccggcagactgttcttcgagttttacagactgctgcacgacgcccggcctaaggaaggcgacgaccggcccttcttttggctgttcgagaatgtggtggccatgggagtcagcgacaagcgggatattagccggttcctggagagcaaccccgtgatgatcgatgccaaggaagtgagcgccgcccaccgggccagatacttctggggcaatctgcctggcatgaacagacccctggccagcaccgtgaacgacaagctggagctgcaggagtgcctggagcacggccggatcgccaagttcagcaaggtgagaaccatcaccacccgaagcaacagcatcaaacaaggcaaggaccagcactttcctgtgttcatgaacgagaaggaggacatcctgtggtgtaccgagatggagagagtgttcgggttcccagtccactacacagatgtcagcaacatgtctagactggccagacagagactgctgggaagaagctggtccgtccctgtgatcagacacctgttcgcccctctgaaggagtacttcgcctgcgtgagcagcggcaacagcaacgccaacagccggggccccagcttctctagcggcctggtgccactgtccctgagagggagccacatgggccccatggagatctacaaaaccgtgagcgcctggaagcggcagcctgtgcgcgtgctgagcctgtttcggaatatcgataaagtcctgaaaagcctgggattcctggagagcggctctggctccggcggtggcaccctgaagtacgtggaggatgtgacaaacgtggtcagacgggatgtggagaagtggggccccttcgatctggtgtacggcagcacccaacccctgggcagctcttgtgaccggtgccctggctggtacatgtttcagttccaccggatcctgcagtacgccctgccgagacaggagtcccagcggccattcttttggattttcatggacaacttgctgctgaccgaggatgaccaggaaactaccactcggttcctgcagaccgaagccgtgaccctgcaggacgtgagaggccgggactaccagaacgccatgcgggtgtggtccaacatccctggactgaaaagcaagcacgcacctctgacccctaaagaagaggagtacctgcaggcccaggtgcggagcagaagcaagctggacgcccctaaggtggatctgctggtgaagaattgcctcctgcccctgagagagtacttcaagtatttcagccagaatagtctgcccctgggcggcccaagcagcggcgcccctcctcccagcggcggcagcccagccggctccccaacctctaccgaggagggcacctctgagtccgccacccccgagagcggccctggcacctccaccgagcccagcgagggcagcgcacccggcagccctgccggcagccccacctccacagaggagggaaccagcaccgagcccagcgaaggcagcgccccaggcaccagcaccgagcctagtgagggcggctctggcggcggcagcgcccaggagattaaacggatcaacaagatcagaagaagacttgtgaaagacagcaacaccaagaaggccggcaagacaggccccatgaaaaccctgctggttagagtgatgacacccgatctgagagagcggctggaaaacctgagaaagaagcctgaaaatatcccccagcccatcagcaatacatctagagccaacctgaataagctgctgaccgattacaccgaaatgaagaaggcgatcctgcatgtgtactgggaagagttccagaaggaccctgtgggcctgatgagccgggtggcccagcctgccagcaagaagatcgatcagaacaagctgaaacctgagatggacgagaagggcaacctgaccaccgccggctttgcctgctctcagtgtggccagcccctgttcgtgtacaagctggagcaggtgtctgagaagggcaaggcttacaccaactacttcggacggtgcaatgtggccgagcacgaaaagctgatcctgctggcccagctgaagcccgagaaggatagcgacgaagccgtgacatatagcctgggaaagtttgggcagagggccctggatttctacagcattcatgtgaccaaggagtccacccaccccgtgaagcccctggcccagatcgccggaaacagatacgcctccggacctgtgggaaaggccctgagcgacgcatgtatgggcacaatcgcctccttcctgtctaagtaccaggacatcatcatcgaacaccagaaggtggtgaagggcaaccagaagagactggagagcctgcgggagctggccggcaaggaaaacctggaataccctagcgtgaccctgccacctcagcctcacaccaaggagggcgttgatgcctacaacgaagtgatcgcccgggtgcgaatgtgggtgaacctgaacctgtggcagaagctgaagctaagcagagatgatgccaagcctctgctgagactgaagggattcccttcctttcctctggtcgagagacaggccaacgaagtggactggtgggacatggtgtgtaacgtgaagaagctgatcaacgagaaaaaggaggatggcaaggtgttttggcagaatctggctggctacaagagacaggaagccctgagaccatacctgagcagcgaggaagatcggaagaagggaaagaaattcgctcggtaccagctgggcgacctgctgctgcacctggaaaagaagcacggcgaggactggggaaaggtgtacgacgaggcctgggagcggattgacaagaaagtggaaggcctgagcaagcacatcaagctggaagaggaacggagaagcgaggacgcccagagcaaggccgccctgaccgactggctgcgggctaaggccagcttcgtgatcgagggcctgaaggaggccgacaaggacgagttctgcagatgcgagctgaagctgcagaagtggtacggggacctgcggggaaagcccttcgccatcgaagccgagaacagcatcctggacatcagcggcttcagcaagcagtacaactgtgccttcatctggcagaaggacggcgtgaagaagctgaacctgtacctgatcatcaactacttcaagggcggcaagctgcggttcaagaagatcaaacctgaagccttcgaagccaacagattctacaccgtgatcaacaaaaagagcggcgagatcgtgcccatggaggtgaacttcaacttcgacgaccccaacctgatcatcctgcctctggcctttggcaagagacagggcagagaattcatctggaacgacctgctgtccctggaaaccggcagcctgaagctggccaacggaagagtgatcgagaagacactgtacaacagaagaacccggcaggatgagcctgccctgttcgtggccctgaccttcgagcggcgggaggtcctggactcctccaatatcaaaccaatgaacctgatcggcgtggcaagaggcgaaaacatccccgccgtgatcgccctgaccgaccccgagggctgcccactgagccggtttaaggatagcctgggaaacccaacccacatcctgagaatcggcgagagctataaggagaagcagcggaccatccaggccaagaaggaggtggagcagcggagagccggcggctacagccggaagtacgccagcaaagccaagaatctggcagacgatatggtgagaaacaccgctagagatctgctgtactacgccgtgacccaggatgccatgctgatcttcgccaacctgagccggggcttcggccggcagggcaagcggaccttcatggccgagagacagtacacacggatggaggactggctgaccgccaagctggcctacgagggcctgagcaagacctacctgtccaagacactggcccagtacacctccaagacatgcagcaactgtgggtttaccatcaccagcgccgactacgacagggtgctggagaagctgaagaagacagcaacaggctggatgaccacaattaacggcaaggagctgaaggtggagggccagattacctactacaacagatacaagagacagaacgtagtcaaggacctgtccgtcgagctggatagactgagcgaagaatctgtgaacaacgacatctcctcctggacaaagggcagaagcggagaagctctgagcctcctgaagaaaagattctcccatagacccgtgcaggagaagttcgtgtgcctgaactgcggcttcgagacacacgcagccgagcaagccgccctgaacatcgccagatcctggctgttcctgcggagccaggagtacaagaaataccagacaaacaagacaaccggcaacaccgataagagagccttcgtcgagacctggcagtccttttaccggaagaagcttaaggaggtgtggaaacctgccgtgcggtctggcggatctggcggaggctccacaagcttcgaggagctggtgaccttcgaggacgtggccgtgtacttcagcgagaacgagtggaccagcctggcccccacccagagggtgctgtacagggacgtgatgctggagaactacggcgccgtggccagcctggccgccttccccttccccaagcccgccctgatcagccagctggagaggggcgaggccccctggtgcaaggccccccagggcgccctggacggcgagggccccaggggcatcaccagccccaagaaaaagagaaaagtctaagctgccttctgcggggcttgccttctggccatgcccttcttctctcccttgcacctgtacctcttggtctttgaataaagcctgagtaggaaggctagcaaaaaaaaaaaaaaaaaaaaaaaaaaaaaaaaaaaaaaaaaaaaaaaaaaaaaaaaaaaaaaaaaaaaaaaaaaaaaaaa

SEQ ID NO: 7170 - RNA, 5797 nt, synthetic construct
  source 1..5797: mol_type = other RNA
aggaaataagagagaaaagaagagtaagaagaaatataagagccaccatggcccctaagaagaagcgtaaagtgagccggatggaacgcctcgtctacgaggtgcggcagaagtgcagaaacatcgaggacatctgcatctcctgcggatctctgaacgtgaccctggagcacccactgttcatcggcggcatgtgccagaactgtaaaaactgttttctggagtgtgcctatcaatacgacgatgacggctaccagagctactgcaccatctgttgcggcggaagagaggtgctgatgtgtggaaataacaactgctgccggtgcttctgcgtggaatgcgtggacctgctggtgggccccggcgccgcccaggccgctattaaggaagatccttggaactgctacatgtgcggccacaagggcacatacggcctgctgagacggagagaggactggcctagcagactgcagatgttcttcgccaataaccacgaccaggagttcgacccccctaaggtgtaccctcccgtccccgccgagaagagaaagcccatccgggtcctgagcctgttcgatggcatcgccaccggtctgctggtgctgaaggacctgggcatccaggtggataggtacattgcctccgaggtgtgcgaggactccatcaccgtgggaatggtgcgtcatcagggcaagatcatgtacgtgggcgacgtgcggagcgtgacacagaagcatatccaggagtggggccctttcgacctggtgatcggcggcagcccttgcaatgacctgagcatcgtgaacccagcccggaagggcctgtacgagggaaccggcagactgttcttcgagttttacagactgctgcacgacgcccggcctaaggaaggcgacgaccggcccttcttttggctgttcgagaatgtggtggccatgggagtcagcgacaagcgggatattagccggttcctggagagcaaccccgtgatgatcgatgccaaggaagtgagcgccgcccaccgggccagatacttctggggcaatctgcctggcatgaacagacccctggccagcaccgtgaacgacaagctggagctgcaggagtgcctggagcacggccggatcgccaagttcagcaaggtgagaaccatcaccacccgaagcaacagcatcaaacaaggcaaggaccagcactttcctgtgttcatgaacgagaaggaggacatcctgtggtgtaccgagatggagagagtgttcgggttcccagtccactacacagatgtcagcaacatgtctagactggccagacagagactgctgggaagaagctggtccgtccctgtgatcagacacctgttcgcccctctgaaggagtacttcgcctgcgtgagcagcggcaacagcaacgccaacagccggggccccagcttctctagcggcctggtgccactgtccctgagagggagccacatgggccccatggagatctacaaaaccgtgagcgcctggaagcggcagcctgtgcgcgtgctgagcctgtttcggaatatcgataaagtcctgaaaagcctgggattcctggagagcggctctggctccggcggtggcaccctgaagtacgtggaggatgtgacaaacgtggtcagacgggatgtggagaagtggggccccttcgatctggtgtacggcagcacccaacccctgggcagctcttgtgaccggtgccctggctggtacatgtttcagttccaccggatcctgcagtacgccctgccgagacaggagtcccagcggccattcttttggattttcatggacaacttgctgctgaccgaggatgaccaggaaactaccactcggttcctgcagaccgaagccgtgaccctgcaggacgtgagaggccgggactaccagaacgccatgcgggtgtggtccaacatccctggactgaaaagcaagcacgcacctctgacccctaaagaagaggagtacctgcaggcccaggtgcggagcagaagcaagctggacgcccctaaggtggatctgctggtgaagaattgcctcctgcccctgagagagtacttcaagtatttcagccagaatagtctgcccctgggcggcccaagcagcggcgcccctcctcccagcggcggcagcccagccggctccccaacctctaccgaggagggcacctctgagtccgccacccccgagagcggccctggcacctccaccgagcccagcgagggcagcgcacccggcagccctgccggcagccccacctccacagaggagggaaccagcaccgagcccagcgaaggcagcgccccaggcaccagcaccgagcctagtgagggcggctctggcggcggcagcgcccaggagattaaacggatcaacaagatcagaagaagacttgtgaaagacagcaacaccaagaaggccggcaagacaggccccatgaaaaccctgctggttagagtgatgacacccgatctgagagagcggctggaaaacctgagaaagaagcctgaaaatatcccccagcccatcagcaatacatctagagccaacctgaataagctgctgaccgattacaccgaaatgaagaaggcgatcctgcatgtgtactgggaagagttccagaaggaccctgtgggcctgatgagccgggtggcccagcctgccagcaagaagatcgatcagaacaagctgaaacctgagatggacgagaagggcaacctgaccaccgccggctttgcctgctctcagtgtggccagcccctgttcgtgtacaagctggagcaggtgtctgagaagggcaaggcttacaccaactacttcggacggtgcaatgtggccgagcacgaaaagctgatcctgctggcccagctgaagcccgagaaggatagcgacgaagccgtgacatatagcctgggaaagtttgggcagagggccctggatttctacagcattcatgtgaccaaggagtccacccaccccgtgaagcccctggcccagatcgccggaaacagatacgcctccggacctgtgggaaaggccctgagcgacgcatgtatgggcacaatcgcctccttcctgtctaagtaccaggacatcatcatcgaacaccagaaggtggtgaagggcaaccagaagagactggagagcctgcgggagctggccggcaaggaaaacctggaataccctagcgtgaccctgccacctcagcctcacaccaaggagggcgttgatgcctacaacgaagtgatcgcccgggtgcgaatgtgggtgaacctgaacctgtggcagaagctgaagctaagcagagatgatgccaagcctctgctgagactgaagggattcccttcctttcctctggtcgagagacaggccaacgaagtggactggtgggacatggtgtgtaacgtgaagaagctgatcaacgagaaaaaggaggatggcaaggtgttttggcagaatctggctggctacaagagacaggaagccctgagaccatacctgagcagcgaggaagatcggaagaagggaaagaaattcgctcggtaccagctgggcgacctgctgctgcacctggaaaagaagcacggcgaggactggggaaaggtgtacgacgaggcctgggagcggattgacaagaaagtggaaggcctgagcaagcacatcaagctggaagaggaacggagaagcgaggacgcccagagcaaggccgccctgaccgactggctgcgggctaaggccagcttcgtgatcgagggcctgaaggaggccgacaaggacgagttctgcagatgcgagctgaagctgcagaagtggtacggggacctgcggggaaagcccttcgccatcgaagccgagaacagcatcctggacatcagcggcttcagcaagcagtacaactgtgccttcatctggcagaaggacggcgtgaagaagctgaacctgtacctgatcatcaactacttcaagggcggcaagctgcggttcaagaagatcaaacctgaagccttcgaagccaacagattctacaccgtgatcaacaaaaagagcggcgagatcgtgcccatggaggtgaacttcaacttcgacgaccccaacctgatcatcctgcctctggcctttggcaagagacagggcagagaattcatctggaacgacctgctgtccctggaaaccggcagcctgaagctggccaacggaagagtgatcgagaagacactgtacaacagaagaacccggcaggatgagcctgccctgttcgtggccctgaccttcgagcggcgggaggtcctggactcctccaatatcaaaccaatgaacctgatcggcgtggcaagaggcgaaaacatccccgccgtgatcgccctgaccgaccccgagggctgcccactgagccggtttaaggatagcctgggaaacccaacccacatcctgagaatcggcgagagctataaggagaagcagcggaccatccaggccaagaaggaggtggagcagcggagagccggcggctacagccggaagtacgccagcaaagccaagaatctggcagacgatatggtgagaaacaccgctagagatctgctgtactacgccgtgacccaggatgccatgctgatcttcgccaacctgagccggggcttcggccggcagggcaagcggaccttcatggccgagagacagtacacacggatggaggactggctgaccgccaagctggcctacgagggcctgagcaagacctacctgtccaagacactggcccagtacacctccaagacatgcagcaactgtgggtttaccatcaccagcgccgactacgacagggtgctggagaagctgaagaagacagcaacaggctggatgaccacaattaacggcaaggagctgaaggtggagggccagattacctactacaacagatacaagagacagaacgtagtcaaggacctgtccgtcgagctggatagactgagcgaagaatctgtgaacaacgacatctcctcctggacaaagggcagaagcggagaagctctgagcctcctgaagaaaagattctcccatagacccgtgcaggagaagttcgtgtgcctgaactgcggcttcgagacacacgcagccgagcaagccgccctgaacatcgccagatcctggctgttcctgcggagccaggagtacaagaaataccagacaaacaagacaaccggcaacaccgataagagagccttcgtcgagacctggcagtccttttaccggaagaagcttaaggaggtgtggaaacctgccgtgcggtctggcggatctggcggaggctccacaagcccccaggagagcgtggccttcgacgacgtggccgtgtacttcaccaagaaggagtgggccatcatggtgcccgaccagagggccctgtacagggacgtgatgctggagaactacgaggccgtggccttcgtggccgtgccccccaccagcaagcccgccctggtgagccacctggagcagggcaaggagccctgcttcacccagccccagggcgtgctgagcaggagggactggagggccggcaccagccccaagaaaaagagaaaagtctaagctgccttctgcggggcttgccttctggccatgcccttcttctctcccttgcacctgtacctcttggtctttgaataaagcctgagtaggaaggctagcaaaaaaaaaaaaaaaaaaaaaaaaaaaaaaaaaaaaaaaaaaaaaaaaaaaaaaaaaaaaaaaaaaaaaaaaaaaaaaaa

SEQ ID NO: 7171 - RNA, 5797 nt, synthetic construct
  source 1..5797: mol_type = other RNA
aggaaataagagagaaaagaagagtaagaagaaatataagagccaccatggcccctaagaagaagcgtaaagtgagccggatggaacgcctcgtctacgaggtgcggcagaagtgcagaaacatcgaggacatctgcatctcctgcggatctctgaacgtgaccctggagcacccactgttcatcggcggcatgtgccagaactgtaaaaactgttttctggagtgtgcctatcaatacgacgatgacggctaccagagctactgcaccatctgttgcggcggaagagaggtgctgatgtgtggaaataacaactgctgccggtgcttctgcgtggaatgcgtggacctgctggtgggccccggcgccgcccaggccgctattaaggaagatccttggaactgctacatgtgcggccacaagggcacatacggcctgctgagacggagagaggactggcctagcagactgcagatgttcttcgccaataaccacgaccaggagttcgacccccctaaggtgtaccctcccgtccccgccgagaagagaaagcccatccgggtcctgagcctgttcgatggcatcgccaccggtctgctggtgctgaaggacctgggcatccaggtggataggtacattgcctccgaggtgtgcgaggactccatcaccgtgggaatggtgcgtcatcagggcaagatcatgtacgtgggcgacgtgcggagcgtgacacagaagcatatccaggagtggggccctttcgacctggtgatcggcggcagcccttgcaatgacctgagcatcgtgaacccagcccggaagggcctgtacgagggaaccggcagactgttcttcgagttttacagactgctgcacgacgcccggcctaaggaaggcgacgaccggcccttcttttggctgttcgagaatgtggtggccatgggagtcagcgacaagcgggatattagccggttcctggagagcaaccccgtgatgatcgatgccaaggaagtgagcgccgcccaccgggccagatacttctggggcaatctgcctggcatgaacagacccctggccagcaccgtgaacgacaagctggagctgcaggagtgcctggagcacggccggatcgccaagttcagcaaggtgagaaccatcaccacccgaagcaacagcatcaaacaaggcaaggaccagcactttcctgtgttcatgaacgagaaggaggacatcctgtggtgtaccgagatggagagagtgttcgggttcccagtccactacacagatgtcagcaacatgtctagactggccagacagagactgctgggaagaagctggtccgtccctgtgatcagacacctgttcgcccctctgaaggagtacttcgcctgcgtgagcagcggcaacagcaacgccaacagccggggccccagcttctctagcggcctggtgccactgtccctgagagggagccacatgggccccatggagatctacaaaaccgtgagcgcctggaagcggcagcctgtgcgcgtgctgagcctgtttcggaatatcgataaagtcctgaaaagcctgggattcctggagagcggctctggctccggcggtggcaccctgaagtacgtggaggatgtgacaaacgtggtcagacgggatgtggagaagtggggccccttcgatctggtgtacggcagcacccaacccctgggcagctcttgtgaccggtgccctggctggtacatgtttcagttccaccggatcctgcagtacgccctgccgagacaggagtcccagcggccattcttttggattttcatggacaacttgctgctgaccgaggatgaccaggaaactaccactcggttcctgcagaccgaagccgtgaccctgcaggacgtgagaggccgggactaccagaacgccatgcgggtgtggtccaacatccctggactgaaaagcaagcacgcacctctgacccctaaagaagaggagtacctgcaggcccaggtgcggagcagaagcaagctggacgcccctaaggtggatctgctggtgaagaattgcctcctgcccctgagagagtacttcaagtatttcagccagaatagtctgcccctgggcggcccaagcagcggcgcccctcctcccagcggcggcagcccagccggctccccaacctctaccgaggagggcacctctgagtccgccacccccgagagcggccctggcacctccaccgagcccagcgagggcagcgcacccggcagccctgccggcagccccacctccacagaggagggaaccagcaccgagcccagcgaaggcagcgccccaggcaccagcaccgagcctagtgagggcggctctggcggcggcagcgcccaggagattaaacggatcaacaagatcagaagaagacttgtgaaagacagcaacaccaagaaggccggcaagacaggccccatgaaaaccctgctggttagagtgatgacacccgatctgagagagcggctggaaaacctgagaaagaagcctgaaaatatcccccagcccatcagcaatacatctagagccaacctgaataagctgctgaccgattacaccgaaatgaagaaggcgatcctgcatgtgtactgggaagagttccagaaggaccctgtgggcctgatgagccgggtggcccagcctgccagcaagaagatcgatcagaacaagctgaaacctgagatggacgagaagggcaacctgaccaccgccggctttgcctgctctcagtgtggccagcccctgttcgtgtacaagctggagcaggtgtctgagaagggcaaggcttacaccaactacttcggacggtgcaatgtggccgagcacgaaaagctgatcctgctggcccagctgaagcccgagaaggatagcgacgaagccgtgacatatagcctgggaaagtttgggcagagggccctggatttctacagcattcatgtgaccaaggagtccacccaccccgtgaagcccctggcccagatcgccggaaacagatacgcctccggacctgtgggaaaggccctgagcgacgcatgtatgggcacaatcgcctccttcctgtctaagtaccaggacatcatcatcgaacaccagaaggtggtgaagggcaaccagaagagactggagagcctgcgggagctggccggcaaggaaaacctggaataccctagcgtgaccctgccacctcagcctcacaccaaggagggcgttgatgcctacaacgaagtgatcgcccgggtgcgaatgtgggtgaacctgaacctgtggcagaagctgaagctaagcagagatgatgccaagcctctgctgagactgaagggattcccttcctttcctctggtcgagagacaggccaacgaagtggactggtgggacatggtgtgtaacgtgaagaagctgatcaacgagaaaaaggaggatggcaaggtgttttggcagaatctggctggctacaagagacaggaagccctgagaccatacctgagcagcgaggaagatcggaagaagggaaagaaattcgctcggtaccagctgggcgacctgctgctgcacctggaaaagaagcacggcgaggactggggaaaggtgtacgacgaggcctgggagcggattgacaagaaagtggaaggcctgagcaagcacatcaagctggaagaggaacggagaagcgaggacgcccagagcaaggccgccctgaccgactggctgcgggctaaggccagcttcgtgatcgagggcctgaaggaggccgacaaggacgagttctgcagatgcgagctgaagctgcagaagtggtacggggacctgcggggaaagcccttcgccatcgaagccgagaacagcatcctggacatcagcggcttcagcaagcagtacaactgtgccttcatctggcagaaggacggcgtgaagaagctgaacctgtacctgatcatcaactacttcaagggcggcaagctgcggttcaagaagatcaaacctgaagccttcgaagccaacagattctacaccgtgatcaacaaaaagagcggcgagatcgtgcccatggaggtgaacttcaacttcgacgaccccaacctgatcatcctgcctctggcctttggcaagagacagggcagagaattcatctggaacgacctgctgtccctggaaaccggcagcctgaagctggccaacggaagagtgatcgagaagacactgtacaacagaagaacccggcaggatgagcctgccctgttcgtggccctgaccttcgagcggcgggaggtcctggactcctccaatatcaaaccaatgaacctgatcggcgtggcaagaggcgaaaacatccccgccgtgatcgccctgaccgaccccgagggctgcccactgagccggtttaaggatagcctgggaaacccaacccacatcctgagaatcggcgagagctataaggagaagcagcggaccatccaggccaagaaggaggtggagcagcggagagccggcggctacagccggaagtacgccagcaaagccaagaatctggcagacgatatggtgagaaacaccgctagagatctgctgtactacgccgtgacccaggatgccatgctgatcttcgccaacctgagccggggcttcggccggcagggcaagcggaccttcatggccgagagacagtacacacggatggaggactggctgaccgccaagctggcctacgagggcctgagcaagacctacctgtccaagacactggcccagtacacctccaagacatgcagcaactgtgggtttaccatcaccagcgccgactacgacagggtgctggagaagctgaagaagacagcaacaggctggatgaccacaattaacggcaaggagctgaaggtggagggccagattacctactacaacagatacaagagacagaacgtagtcaaggacctgtccgtcgagctggatagactgagcgaagaatctgtgaacaacgacatctcctcctggacaaagggcagaagcggagaagctctgagcctcctgaagaaaagattctcccatagacccgtgcaggagaagttcgtgtgcctgaactgcggcttcgagacacacgcagccgagcaagccgccctgaacatcgccagatcctggctgttcctgcggagccaggagtacaagaaataccagacaaacaagacaaccggcaacaccgataagagagccttcgtcgagacctggcagtccttttaccggaagaagcttaaggaggtgtggaaacctgccgtgcggtctggcggatctggcggaggctccacaagcagccaggagctggtggccttcgaggacgtgctggtggacttcacccccgaggagtggcagtacctgaacagcagccagaagaccctgtacagggaggtgatgctggagacctacagcaacctggtgagcgtggccggccagcaggacaccaagcccgacctgatcctgaagctggagctggagggcccctgcctggccgagaggaagatcagcgtgtggagcttccccgaggaggcctgccagaccagccccaagaaaaagagaaaagtctaagctgccttctgcggggcttgccttctggccatgcccttcttctctcccttgcacctgtacctcttggtctttgaataaagcctgagtaggaaggctagcaaaaaaaaaaaaaaaaaaaaaaaaaaaaaaaaaaaaaaaaaaaaaaaaaaaaaaaaaaaaaaaaaaaaaaaaaaaaaaaa

SEQ ID NO: 7172 - RNA, 5797 nt, synthetic construct
  source 1..5797: mol_type = other RNA
aggaaataagagagaaaagaagagtaagaagaaatataagagccaccatggcccctaagaagaagcgtaaagtgagccggatggaacgcctcgtctacgaggtgcggcagaagtgcagaaacatcgaggacatctgcatctcctgcggatctctgaacgtgaccctggagcacccactgttcatcggcggcatgtgccagaactgtaaaaactgttttctggagtgtgcctatcaatacgacgatgacggctaccagagctactgcaccatctgttgcggcggaagagaggtgctgatgtgtggaaataacaactgctgccggtgcttctgcgtggaatgcgtggacctgctggtgggccccggcgccgcccaggccgctattaaggaagatccttggaactgctacatgtgcggccacaagggcacatacggcctgctgagacggagagaggactggcctagcagactgcagatgttcttcgccaataaccacgaccaggagttcgacccccctaaggtgtaccctcccgtccccgccgagaagagaaagcccatccgggtcctgagcctgttcgatggcatcgccaccggtctgctggtgctgaaggacctgggcatccaggtggataggtacattgcctccgaggtgtgcgaggactccatcaccgtgggaatggtgcgtcatcagggcaagatcatgtacgtgggcgacgtgcggagcgtgacacagaagcatatccaggagtggggccctttcgacctggtgatcggcggcagcccttgcaatgacctgagcatcgtgaacccagcccggaagggcctgtacgagggaaccggcagactgttcttcgagttttacagactgctgcacgacgcccggcctaaggaaggcgacgaccggcccttcttttggctgttcgagaatgtggtggccatgggagtcagcgacaagcgggatattagccggttcctggagagcaaccccgtgatgatcgatgccaaggaagtgagcgccgcccaccgggccagatacttctggggcaatctgcctggcatgaacagacccctggccagcaccgtgaacgacaagctggagctgcaggagtgcctggagcacggccggatcgccaagttcagcaaggtgagaaccatcaccacccgaagcaacagcatcaaacaaggcaaggaccagcactttcctgtgttcatgaacgagaaggaggacatcctgtggtgtaccgagatggagagagtgttcgggttcccagtccactacacagatgtcagcaacatgtctagactggccagacagagactgctgggaagaagctggtccgtccctgtgatcagacacctgttcgcccctctgaaggagtacttcgcctgcgtgagcagcggcaacagcaacgccaacagccggggccccagcttctctagcggcctggtgccactgtccctgagagggagccacatgggccccatggagatctacaaaaccgtgagcgcctggaagcggcagcctgtgcgcgtgctgagcctgtttcggaatatcgataaagtcctgaaaagcctgggattcctggagagcggctctggctccggcggtggcaccctgaagtacgtggaggatgtgacaaacgtggtcagacgggatgtggagaagtggggccccttcgatctggtgtacggcagcacccaacccctgggcagctcttgtgaccggtgccctggctggtacatgtttcagttccaccggatcctgcagtacgccctgccgagacaggagtcccagcggccattcttttggattttcatggacaacttgctgctgaccgaggatgaccaggaaactaccactcggttcctgcagaccgaagccgtgaccctgcaggacgtgagaggccgggactaccagaacgccatgcgggtgtggtccaacatccctggactgaaaagcaagcacgcacctctgacccctaaagaagaggagtacctgcaggcccaggtgcggagcagaagcaagctggacgcccctaaggtggatctgctggtgaagaattgcctcctgcccctgagagagtacttcaagtatttcagccagaatagtctgcccctgggcggcccaagcagcggcgcccctcctcccagcggcggcagcccagccggctccccaacctctaccgaggagggcacctctgagtccgccacccccgagagcggccctggcacctccaccgagcccagcgagggcagcgcacccggcagccctgccggcagccccacctccacagaggagggaaccagcaccgagcccagcgaaggcagcgccccaggcaccagcaccgagcctagtgagggcggctctggcggcggcagcgcccaggagattaaacggatcaacaagatcagaagaagacttgtgaaagacagcaacaccaagaaggccggcaagacaggccccatgaaaaccctgctggttagagtgatgacacccgatctgagagagcggctggaaaacctgagaaagaagcctgaaaatatcccccagcccatcagcaatacatctagagccaacctgaataagctgctgaccgattacaccgaaatgaagaaggcgatcctgcatgtgtactgggaagagttccagaaggaccctgtgggcctgatgagccgggtggcccagcctgccagcaagaagatcgatcagaacaagctgaaacctgagatggacgagaagggcaacctgaccaccgccggctttgcctgctctcagtgtggccagcccctgttcgtgtacaagctggagcaggtgtctgagaagggcaaggcttacaccaactacttcggacggtgcaatgtggccgagcacgaaaagctgatcctgctggcccagctgaagcccgagaaggatagcgacgaagccgtgacatatagcctgggaaagtttgggcagagggccctggatttctacagcattcatgtgaccaaggagtccacccaccccgtgaagcccctggcccagatcgccggaaacagatacgcctccggacctgtgggaaaggccctgagcgacgcatgtatgggcacaatcgcctccttcctgtctaagtaccaggacatcatcatcgaacaccagaaggtggtgaagggcaaccagaagagactggagagcctgcgggagctggccggcaaggaaaacctggaataccctagcgtgaccctgccacctcagcctcacaccaaggagggcgttgatgcctacaacgaagtgatcgcccgggtgcgaatgtgggtgaacctgaacctgtggcagaagctgaagctaagcagagatgatgccaagcctctgctgagactgaagggattcccttcctttcctctggtcgagagacaggccaacgaagtggactggtgggacatggtgtgtaacgtgaagaagctgatcaacgagaaaaaggaggatggcaaggtgttttggcagaatctggctggctacaagagacaggaagccctgagaccatacctgagcagcgaggaagatcggaagaagggaaagaaattcgctcggtaccagctgggcgacctgctgctgcacctggaaaagaagcacggcgaggactggggaaaggtgtacgacgaggcctgggagcggattgacaagaaagtggaaggcctgagcaagcacatcaagctggaagaggaacggagaagcgaggacgcccagagcaaggccgccctgaccgactggctgcgggctaaggccagcttcgtgatcgagggcctgaaggaggccgacaaggacgagttctgcagatgcgagctgaagctgcagaagtggtacggggacctgcggggaaagcccttcgccatcgaagccgagaacagcatcctggacatcagcggcttcagcaagcagtacaactgtgccttcatctggcagaaggacggcgtgaagaagctgaacctgtacctgatcatcaactacttcaagggcggcaagctgcggttcaagaagatcaaacctgaagccttcgaagccaacagattctacaccgtgatcaacaaaaagagcggcgagatcgtgcccatggaggtgaacttcaacttcgacgaccccaacctgatcatcctgcctctggcctttggcaagagacagggcagagaattcatctggaacgacctgctgtccctggaaaccggcagcctgaagctggccaacggaagagtgatcgagaagacactgtacaacagaagaacccggcaggatgagcctgccctgttcgtggccctgaccttcgagcggcgggaggtcctggactcctccaatatcaaaccaatgaacctgatcggcgtggcaagaggcgaaaacatccccgccgtgatcgccctgaccgaccccgagggctgcccactgagccggtttaaggatagcctgggaaacccaacccacatcctgagaatcggcgagagctataaggagaagcagcggaccatccaggccaagaaggaggtggagcagcggagagccggcggctacagccggaagtacgccagcaaagccaagaatctggcagacgatatggtgagaaacaccgctagagatctgctgtactacgccgtgacccaggatgccatgctgatcttcgccaacctgagccggggcttcggccggcagggcaagcggaccttcatggccgagagacagtacacacggatggaggactggctgaccgccaagctggcctacgagggcctgagcaagacctacctgtccaagacactggcccagtacacctccaagacatgcagcaactgtgggtttaccatcaccagcgccgactacgacagggtgctggagaagctgaagaagacagcaacaggctggatgaccacaattaacggcaaggagctgaaggtggagggccagattacctactacaacagatacaagagacagaacgtagtcaaggacctgtccgtcgagctggatagactgagcgaagaatctgtgaacaacgacatctcctcctggacaaagggcagaagcggagaagctctgagcctcctgaagaaaagattctcccatagacccgtgcaggagaagttcgtgtgcctgaactgcggcttcgagacacacgcagccgagcaagccgccctgaacatcgccagatcctggctgttcctgcggagccaggagtacaagaaataccagacaaacaagacaaccggcaacaccgataagagagccttcgtcgagacctggcagtccttttaccggaagaagcttaaggaggtgtggaaacctgccgtgcggtctggcggatctggcggaggctccacaagcagcagcgtgaccttcgaggacgtggccgtgtacttcagccaggaggagtggaggttcctgaacaaggcccagaagcacctgtaccacgacgtgatgctggaggtgttcgccctgatcgccagcctgggcggcggccagggcgccctggaggccgccgcccccagcgagcagaacgtgagcggcggcggcagccagaaggcctacgcccaggactgcagcctggacaccaaccccggccagaccaccagccccaagaaaaagagaaaagtctaagctgccttctgcggggcttgccttctggccatgcccttcttctctcccttgcacctgtacctcttggtctttgaataaagcctgagtaggaaggctagcaaaaaaaaaaaaaaaaaaaaaaaaaaaaaaaaaaaaaaaaaaaaaaaaaaaaaaaaaaaaaaaaaaaaaaaaaaaaaaaa

SEQ ID NO: 7173 - RNA, 5797 nt, synthetic construct
  source 1..5797: mol_type = other RNA
aggaaataagagagaaaagaagagtaagaagaaatataagagccaccatggcccctaagaagaagcgtaaagtgagccggatggaacgcctcgtctacgaggtgcggcagaagtgcagaaacatcgaggacatctgcatctcctgcggatctctgaacgtgaccctggagcacccactgttcatcggcggcatgtgccagaactgtaaaaactgttttctggagtgtgcctatcaatacgacgatgacggctaccagagctactgcaccatctgttgcggcggaagagaggtgctgatgtgtggaaataacaactgctgccggtgcttctgcgtggaatgcgtggacctgctggtgggccccggcgccgcccaggccgctattaaggaagatccttggaactgctacatgtgcggccacaagggcacatacggcctgctgagacggagagaggactggcctagcagactgcagatgttcttcgccaataaccacgaccaggagttcgacccccctaaggtgtaccctcccgtccccgccgagaagagaaagcccatccgggtcctgagcctgttcgatggcatcgccaccggtctgctggtgctgaaggacctgggcatccaggtggataggtacattgcctccgaggtgtgcgaggactccatcaccgtgggaatggtgcgtcatcagggcaagatcatgtacgtgggcgacgtgcggagcgtgacacagaagcatatccaggagtggggccctttcgacctggtgatcggcggcagcccttgcaatgacctgagcatcgtgaacccagcccggaagggcctgtacgagggaaccggcagactgttcttcgagttttacagactgctgcacgacgcccggcctaaggaaggcgacgaccggcccttcttttggctgttcgagaatgtggtggccatgggagtcagcgacaagcgggatattagccggttcctggagagcaaccccgtgatgatcgatgccaaggaagtgagcgccgcccaccgggccagatacttctggggcaatctgcctggcatgaacagacccctggccagcaccgtgaacgacaagctggagctgcaggagtgcctggagcacggccggatcgccaagttcagcaaggtgagaaccatcaccacccgaagcaacagcatcaaacaaggcaaggaccagcactttcctgtgttcatgaacgagaaggaggacatcctgtggtgtaccgagatggagagagtgttcgggttcccagtccactacacagatgtcagcaacatgtctagactggccagacagagactgctgggaagaagctggtccgtccctgtgatcagacacctgttcgcccctctgaaggagtacttcgcctgcgtgagcagcggcaacagcaacgccaacagccggggccccagcttctctagcggcctggtgccactgtccctgagagggagccacatgggccccatggagatctacaaaaccgtgagcgcctggaagcggcagcctgtgcgcgtgctgagcctgtttcggaatatcgataaagtcctgaaaagcctgggattcctggagagcggctctggctccggcggtggcaccctgaagtacgtggaggatgtgacaaacgtggtcagacgggatgtggagaagtggggccccttcgatctggtgtacggcagcacccaacccctgggcagctcttgtgaccggtgccctggctggtacatgtttcagttccaccggatcctgcagtacgccctgccgagacaggagtcccagcggccattcttttggattttcatggacaacttgctgctgaccgaggatgaccaggaaactaccactcggttcctgcagaccgaagccgtgaccctgcaggacgtgagaggccgggactaccagaacgccatgcgggtgtggtccaacatccctggactgaaaagcaagcacgcacctctgacccctaaagaagaggagtacctgcaggcccaggtgcggagcagaagcaagctggacgcccctaaggtggatctgctggtgaagaattgcctcctgcccctgagagagtacttcaagtatttcagccagaatagtctgcccctgggcggcccaagcagcggcgcccctcctcccagcggcggcagcccagccggctccccaacctctaccgaggagggcacctctgagtccgccacccccgagagcggccctggcacctccaccgagcccagcgagggcagcgcacccggcagccctgccggcagccccacctccacagaggagggaaccagcaccgagcccagcgaaggcagcgccccaggcaccagcaccgagcctagtgagggcggctctggcggcggcagcgcccaggagattaaacggatcaacaagatcagaagaagacttgtgaaagacagcaacaccaagaaggccggcaagacaggccccatgaaaaccctgctggttagagtgatgacacccgatctgagagagcggctggaaaacctgagaaagaagcctgaaaatatcccccagcccatcagcaatacatctagagccaacctgaataagctgctgaccgattacaccgaaatgaagaaggcgatcctgcatgtgtactgggaagagttccagaaggaccctgtgggcctgatgagccgggtggcccagcctgccagcaagaagatcgatcagaacaagctgaaacctgagatggacgagaagggcaacctgaccaccgccggctttgcctgctctcagtgtggccagcccctgttcgtgtacaagctggagcaggtgtctgagaagggcaaggcttacaccaactacttcggacggtgcaatgtggccgagcacgaaaagctgatcctgctggcccagctgaagcccgagaaggatagcgacgaagccgtgacatatagcctgggaaagtttgggcagagggccctggatttctacagcattcatgtgaccaaggagtccacccaccccgtgaagcccctggcccagatcgccggaaacagatacgcctccggacctgtgggaaaggccctgagcgacgcatgtatgggcacaatcgcctccttcctgtctaagtaccaggacatcatcatcgaacaccagaaggtggtgaagggcaaccagaagagactggagagcctgcgggagctggccggcaaggaaaacctggaataccctagcgtgaccctgccacctcagcctcacaccaaggagggcgttgatgcctacaacgaagtgatcgcccgggtgcgaatgtgggtgaacctgaacctgtggcagaagctgaagctaagcagagatgatgccaagcctctgctgagactgaagggattcccttcctttcctctggtcgagagacaggccaacgaagtggactggtgggacatggtgtgtaacgtgaagaagctgatcaacgagaaaaaggaggatggcaaggtgttttggcagaatctggctggctacaagagacaggaagccctgagaccatacctgagcagcgaggaagatcggaagaagggaaagaaattcgctcggtaccagctgggcgacctgctgctgcacctggaaaagaagcacggcgaggactggggaaaggtgtacgacgaggcctgggagcggattgacaagaaagtggaaggcctgagcaagcacatcaagctggaagaggaacggagaagcgaggacgcccagagcaaggccgccctgaccgactggctgcgggctaaggccagcttcgtgatcgagggcctgaaggaggccgacaaggacgagttctgcagatgcgagctgaagctgcagaagtggtacggggacctgcggggaaagcccttcgccatcgaagccgagaacagcatcctggacatcagcggcttcagcaagcagtacaactgtgccttcatctggcagaaggacggcgtgaagaagctgaacctgtacctgatcatcaactacttcaagggcggcaagctgcggttcaagaagatcaaacctgaagccttcgaagccaacagattctacaccgtgatcaacaaaaagagcggcgagatcgtgcccatggaggtgaacttcaacttcgacgaccccaacctgatcatcctgcctctggcctttggcaagagacagggcagagaattcatctggaacgacctgctgtccctggaaaccggcagcctgaagctggccaacggaagagtgatcgagaagacactgtacaacagaagaacccggcaggatgagcctgccctgttcgtggccctgaccttcgagcggcgggaggtcctggactcctccaatatcaaaccaatgaacctgatcggcgtggcaagaggcgaaaacatccccgccgtgatcgccctgaccgaccccgagggctgcccactgagccggtttaaggatagcctgggaaacccaacccacatcctgagaatcggcgagagctataaggagaagcagcggaccatccaggccaagaaggaggtggagcagcggagagccggcggctacagccggaagtacgccagcaaagccaagaatctggcagacgatatggtgagaaacaccgctagagatctgctgtactacgccgtgacccaggatgccatgctgatcttcgccaacctgagccggggcttcggccggcagggcaagcggaccttcatggccgagagacagtacacacggatggaggactggctgaccgccaagctggcctacgagggcctgagcaagacctacctgtccaagacactggcccagtacacctccaagacatgcagcaactgtgggtttaccatcaccagcgccgactacgacagggtgctggagaagctgaagaagacagcaacaggctggatgaccacaattaacggcaaggagctgaaggtggagggccagattacctactacaacagatacaagagacagaacgtagtcaaggacctgtccgtcgagctggatagactgagcgaagaatctgtgaacaacgacatctcctcctggacaaagggcagaagcggagaagctctgagcctcctgaagaaaagattctcccatagacccgtgcaggagaagttcgtgtgcctgaactgcggcttcgagacacacgcagccgagcaagccgccctgaacatcgccagatcctggctgttcctgcggagccaggagtacaagaaataccagacaaacaagacaaccggcaacaccgataagagagccttcgtcgagacctggcagtccttttaccggaagaagcttaaggaggtgtggaaacctgccgtgcggtctggcggatctggcggaggctccacaagcgtgaaggaggtggtgaccctgcaggacgtggccgtggacttcacctgggaggagtggaggctgctgagccccccccagaaggagctgtacagggaggtgatgctggagaacgcccagaacctgctgagcgtgggcctgcccgcccccctggaggacgtgctgagctacctggagcagaggaagggcccctggatgctggagcagaagaggctgaggagctgctgccccggcgagatcaggctgaccagccccaagaaaaagagaaaagtctaagctgccttctgcggggcttgccttctggccatgcccttcttctctcccttgcacctgtacctcttggtctttgaataaagcctgagtaggaaggctagcaaaaaaaaaaaaaaaaaaaaaaaaaaaaaaaaaaaaaaaaaaaaaaaaaaaaaaaaaaaaaaaaaaaaaaaaaaaaaaaa

SEQ ID NO: 7174 - RNA, 5797 nt, synthetic construct
  source 1..5797: mol_type = other RNA
aggaaataagagagaaaagaagagtaagaagaaatataagagccaccatggcccctaagaagaagcgtaaagtgagccggatggaacgcctcgtctacgaggtgcggcagaagtgcagaaacatcgaggacatctgcatctcctgcggatctctgaacgtgaccctggagcacccactgttcatcggcggcatgtgccagaactgtaaaaactgttttctggagtgtgcctatcaatacgacgatgacggctaccagagctactgcaccatctgttgcggcggaagagaggtgctgatgtgtggaaataacaactgctgccggtgcttctgcgtggaatgcgtggacctgctggtgggccccggcgccgcccaggccgctattaaggaagatccttggaactgctacatgtgcggccacaagggcacatacggcctgctgagacggagagaggactggcctagcagactgcagatgttcttcgccaataaccacgaccaggagttcgacccccctaaggtgtaccctcccgtccccgccgagaagagaaagcccatccgggtcctgagcctgttcgatggcatcgccaccggtctgctggtgctgaaggacctgggcatccaggtggataggtacattgcctccgaggtgtgcgaggactccatcaccgtgggaatggtgcgtcatcagggcaagatcatgtacgtgggcgacgtgcggagcgtgacacagaagcatatccaggagtggggccctttcgacctggtgatcggcggcagcccttgcaatgacctgagcatcgtgaacccagcccggaagggcctgtacgagggaaccggcagactgttcttcgagttttacagactgctgcacgacgcccggcctaaggaaggcgacgaccggcccttcttttggctgttcgagaatgtggtggccatgggagtcagcgacaagcgggatattagccggttcctggagagcaaccccgtgatgatcgatgccaaggaagtgagcgccgcccaccgggccagatacttctggggcaatctgcctggcatgaacagacccctggccagcaccgtgaacgacaagctggagctgcaggagtgcctggagcacggccggatcgccaagttcagcaaggtgagaaccatcaccacccgaagcaacagcatcaaacaaggcaaggaccagcactttcctgtgttcatgaacgagaaggaggacatcctgtggtgtaccgagatggagagagtgttcgggttcccagtccactacacagatgtcagcaacatgtctagactggccagacagagactgctgggaagaagctggtccgtccctgtgatcagacacctgttcgcccctctgaaggagtacttcgcctgcgtgagcagcggcaacagcaacgccaacagccggggccccagcttctctagcggcctggtgccactgtccctgagagggagccacatgggccccatggagatctacaaaaccgtgagcgcctggaagcggcagcctgtgcgcgtgctgagcctgtttcggaatatcgataaagtcctgaaaagcctgggattcctggagagcggctctggctccggcggtggcaccctgaagtacgtggaggatgtgacaaacgtggtcagacgggatgtggagaagtggggccccttcgatctggtgtacggcagcacccaacccctgggcagctcttgtgaccggtgccctggctggtacatgtttcagttccaccggatcctgcagtacgccctgccgagacaggagtcccagcggccattcttttggattttcatggacaacttgctgctgaccgaggatgaccaggaaactaccactcggttcctgcagaccgaagccgtgaccctgcaggacgtgagaggccgggactaccagaacgccatgcgggtgtggtccaacatccctggactgaaaagcaagcacgcacctctgacccctaaagaagaggagtacctgcaggcccaggtgcggagcagaagcaagctggacgcccctaaggtggatctgctggtgaagaattgcctcctgcccctgagagagtacttcaagtatttcagccagaatagtctgcccctgggcggcccaagcagcggcgcccctcctcccagcggcggcagcccagccggctccccaacctctaccgaggagggcacctctgagtccgccacccccgagagcggccctggcacctccaccgagcccagcgagggcagcgcacccggcagccctgccggcagccccacctccacagaggagggaaccagcaccgagcccagcgaaggcagcgccccaggcaccagcaccgagcctagtgagggcggctctggcggcggcagcgcccaggagattaaacggatcaacaagatcagaagaagacttgtgaaagacagcaacaccaagaaggccggcaagacaggccccatgaaaaccctgctggttagagtgatgacacccgatctgagagagcggctggaaaacctgagaaagaagcctgaaaatatcccccagcccatcagcaatacatctagagccaacctgaataagctgctgaccgattacaccgaaatgaagaaggcgatcctgcatgtgtactgggaagagttccagaaggaccctgtgggcctgatgagccgggtggcccagcctgccagcaagaagatcgatcagaacaagctgaaacctgagatggacgagaagggcaacctgaccaccgccggctttgcctgctctcagtgtggccagcccctgttcgtgtacaagctggagcaggtgtctgagaagggcaaggcttacaccaactacttcggacggtgcaatgtggccgagcacgaaaagctgatcctgctggcccagctgaagcccgagaaggatagcgacgaagccgtgacatatagcctgggaaagtttgggcagagggccctggatttctacagcattcatgtgaccaaggagtccacccaccccgtgaagcccctggcccagatcgccggaaacagatacgcctccggacctgtgggaaaggccctgagcgacgcatgtatgggcacaatcgcctccttcctgtctaagtaccaggacatcatcatcgaacaccagaaggtggtgaagggcaaccagaagagactggagagcctgcgggagctggccggcaaggaaaacctggaataccctagcgtgaccctgccacctcagcctcacaccaaggagggcgttgatgcctacaacgaagtgatcgcccgggtgcgaatgtgggtgaacctgaacctgtggcagaagctgaagctaagcagagatgatgccaagcctctgctgagactgaagggattcccttcctttcctctggtcgagagacaggccaacgaagtggactggtgggacatggtgtgtaacgtgaagaagctgatcaacgagaaaaaggaggatggcaaggtgttttggcagaatctggctggctacaagagacaggaagccctgagaccatacctgagcagcgaggaagatcggaagaagggaaagaaattcgctcggtaccagctgggcgacctgctgctgcacctggaaaagaagcacggcgaggactggggaaaggtgtacgacgaggcctgggagcggattgacaagaaagtggaaggcctgagcaagcacatcaagctggaagaggaacggagaagcgaggacgcccagagcaaggccgccctgaccgactggctgcgggctaaggccagcttcgtgatcgagggcctgaaggaggccgacaaggacgagttctgcagatgcgagctgaagctgcagaagtggtacggggacctgcggggaaagcccttcgccatcgaagccgagaacagcatcctggacatcagcggcttcagcaagcagtacaactgtgccttcatctggcagaaggacggcgtgaagaagctgaacctgtacctgatcatcaactacttcaagggcggcaagctgcggttcaagaagatcaaacctgaagccttcgaagccaacagattctacaccgtgatcaacaaaaagagcggcgagatcgtgcccatggaggtgaacttcaacttcgacgaccccaacctgatcatcctgcctctggcctttggcaagagacagggcagagaattcatctggaacgacctgctgtccctggaaaccggcagcctgaagctggccaacggaagagtgatcgagaagacactgtacaacagaagaacccggcaggatgagcctgccctgttcgtggccctgaccttcgagcggcgggaggtcctggactcctccaatatcaaaccaatgaacctgatcggcgtggcaagaggcgaaaacatccccgccgtgatcgccctgaccgaccccgagggctgcccactgagccggtttaaggatagcctgggaaacccaacccacatcctgagaatcggcgagagctataaggagaagcagcggaccatccaggccaagaaggaggtggagcagcggagagccggcggctacagccggaagtacgccagcaaagccaagaatctggcagacgatatggtgagaaacaccgctagagatctgctgtactacgccgtgacccaggatgccatgctgatcttcgccaacctgagccggggcttcggccggcagggcaagcggaccttcatggccgagagacagtacacacggatggaggactggctgaccgccaagctggcctacgagggcctgagcaagacctacctgtccaagacactggcccagtacacctccaagacatgcagcaactgtgggtttaccatcaccagcgccgactacgacagggtgctggagaagctgaagaagacagcaacaggctggatgaccacaattaacggcaaggagctgaaggtggagggccagattacctactacaacagatacaagagacagaacgtagtcaaggacctgtccgtcgagctggatagactgagcgaagaatctgtgaacaacgacatctcctcctggacaaagggcagaagcggagaagctctgagcctcctgaagaaaagattctcccatagacccgtgcaggagaagttcgtgtgcctgaactgcggcttcgagacacacgcagccgagcaagccgccctgaacatcgccagatcctggctgttcctgcggagccaggagtacaagaaataccagacaaacaagacaaccggcaacaccgataagagagccttcgtcgagacctggcagtccttttaccggaagaagcttaaggaggtgtggaaacctgccgtgcggtctggcggatctggcggaggctccacaagcatgctgcagaccgcctggaggcaggagcccgtgaccttcgaggacgtggccgtgtacttcacccagaacgagtggaccagcctggaccccgtgcagagggccctgtacagggaggtgatgctggagaactacgccaacgtggccagcctggccttccccttcaccacccccgtgctggtgagccagctggagcagggcgagaggccctggggcctggacccctgggagcccgtgggcagggagaccagccccaagaaaaagagaaaagtctaagctgccttctgcggggcttgccttctggccatgcccttcttctctcccttgcacctgtacctcttggtctttgaataaagcctgagtaggaaggctagcaaaaaaaaaaaaaaaaaaaaaaaaaaaaaaaaaaaaaaaaaaaaaaaaaaaaaaaaaaaaaaaaaaaaaaaaaaaaaaaa

SEQ ID NO: 7175 - RNA, 5797 nt, synthetic construct
  source 1..5797: mol_type = other RNA
aggaaataagagagaaaagaagagtaagaagaaatataagagccaccatggcccctaagaagaagcgtaaagtgagccggatggaacgcctcgtctacgaggtgcggcagaagtgcagaaacatcgaggacatctgcatctcctgcggatctctgaacgtgaccctggagcacccactgttcatcggcggcatgtgccagaactgtaaaaactgttttctggagtgtgcctatcaatacgacgatgacggctaccagagctactgcaccatctgttgcggcggaagagaggtgctgatgtgtggaaataacaactgctgccggtgcttctgcgtggaatgcgtggacctgctggtgggccccggcgccgcccaggccgctattaaggaagatccttggaactgctacatgtgcggccacaagggcacatacggcctgctgagacggagagaggactggcctagcagactgcagatgttcttcgccaataaccacgaccaggagttcgacccccctaaggtgtaccctcccgtccccgccgagaagagaaagcccatccgggtcctgagcctgttcgatggcatcgccaccggtctgctggtgctgaaggacctgggcatccaggtggataggtacattgcctccgaggtgtgcgaggactccatcaccgtgggaatggtgcgtcatcagggcaagatcatgtacgtgggcgacgtgcggagcgtgacacagaagcatatccaggagtggggccctttcgacctggtgatcggcggcagcccttgcaatgacctgagcatcgtgaacccagcccggaagggcctgtacgagggaaccggcagactgttcttcgagttttacagactgctgcacgacgcccggcctaaggaaggcgacgaccggcccttcttttggctgttcgagaatgtggtggccatgggagtcagcgacaagcgggatattagccggttcctggagagcaaccccgtgatgatcgatgccaaggaagtgagcgccgcccaccgggccagatacttctggggcaatctgcctggcatgaacagacccctggccagcaccgtgaacgacaagctggagctgcaggagtgcctggagcacggccggatcgccaagttcagcaaggtgagaaccatcaccacccgaagcaacagcatcaaacaaggcaaggaccagcactttcctgtgttcatgaacgagaaggaggacatcctgtggtgtaccgagatggagagagtgttcgggttcccagtccactacacagatgtcagcaacatgtctagactggccagacagagactgctgggaagaagctggtccgtccctgtgatcagacacctgttcgcccctctgaaggagtacttcgcctgcgtgagcagcggcaacagcaacgccaacagccggggccccagcttctctagcggcctggtgccactgtccctgagagggagccacatgggccccatggagatctacaaaaccgtgagcgcctggaagcggcagcctgtgcgcgtgctgagcctgtttcggaatatcgataaagtcctgaaaagcctgggattcctggagagcggctctggctccggcggtggcaccctgaagtacgtggaggatgtgacaaacgtggtcagacgggatgtggagaagtggggccccttcgatctggtgtacggcagcacccaacccctgggcagctcttgtgaccggtgccctggctggtacatgtttcagttccaccggatcctgcagtacgccctgccgagacaggagtcccagcggccattcttttggattttcatggacaacttgctgctgaccgaggatgaccaggaaactaccactcggttcctgcagaccgaagccgtgaccctgcaggacgtgagaggccgggactaccagaacgccatgcgggtgtggtccaacatccctggactgaaaagcaagcacgcacctctgacccctaaagaagaggagtacctgcaggcccaggtgcggagcagaagcaagctggacgcccctaaggtggatctgctggtgaagaattgcctcctgcccctgagagagtacttcaagtatttcagccagaatagtctgcccctgggcggcccaagcagcggcgcccctcctcccagcggcggcagcccagccggctccccaacctctaccgaggagggcacctctgagtccgccacccccgagagcggccctggcacctccaccgagcccagcgagggcagcgcacccggcagccctgccggcagccccacctccacagaggagggaaccagcaccgagcccagcgaaggcagcgccccaggcaccagcaccgagcctagtgagggcggctctggcggcggcagcgcccaggagattaaacggatcaacaagatcagaagaagacttgtgaaagacagcaacaccaagaaggccggcaagacaggccccatgaaaaccctgctggttagagtgatgacacccgatctgagagagcggctggaaaacctgagaaagaagcctgaaaatatcccccagcccatcagcaatacatctagagccaacctgaataagctgctgaccgattacaccgaaatgaagaaggcgatcctgcatgtgtactgggaagagttccagaaggaccctgtgggcctgatgagccgggtggcccagcctgccagcaagaagatcgatcagaacaagctgaaacctgagatggacgagaagggcaacctgaccaccgccggctttgcctgctctcagtgtggccagcccctgttcgtgtacaagctggagcaggtgtctgagaagggcaaggcttacaccaactacttcggacggtgcaatgtggccgagcacgaaaagctgatcctgctggcccagctgaagcccgagaaggatagcgacgaagccgtgacatatagcctgggaaagtttgggcagagggccctggatttctacagcattcatgtgaccaaggagtccacccaccccgtgaagcccctggcccagatcgccggaaacagatacgcctccggacctgtgggaaaggccctgagcgacgcatgtatgggcacaatcgcctccttcctgtctaagtaccaggacatcatcatcgaacaccagaaggtggtgaagggcaaccagaagagactggagagcctgcgggagctggccggcaaggaaaacctggaataccctagcgtgaccctgccacctcagcctcacaccaaggagggcgttgatgcctacaacgaagtgatcgcccgggtgcgaatgtgggtgaacctgaacctgtggcagaagctgaagctaagcagagatgatgccaagcctctgctgagactgaagggattcccttcctttcctctggtcgagagacaggccaacgaagtggactggtgggacatggtgtgtaacgtgaagaagctgatcaacgagaaaaaggaggatggcaaggtgttttggcagaatctggctggctacaagagacaggaagccctgagaccatacctgagcagcgaggaagatcggaagaagggaaagaaattcgctcggtaccagctgggcgacctgctgctgcacctggaaaagaagcacggcgaggactggggaaaggtgtacgacgaggcctgggagcggattgacaagaaagtggaaggcctgagcaagcacatcaagctggaagaggaacggagaagcgaggacgcccagagcaaggccgccctgaccgactggctgcgggctaaggccagcttcgtgatcgagggcctgaaggaggccgacaaggacgagttctgcagatgcgagctgaagctgcagaagtggtacggggacctgcggggaaagcccttcgccatcgaagccgagaacagcatcctggacatcagcggcttcagcaagcagtacaactgtgccttcatctggcagaaggacggcgtgaagaagctgaacctgtacctgatcatcaactacttcaagggcggcaagctgcggttcaagaagatcaaacctgaagccttcgaagccaacagattctacaccgtgatcaacaaaaagagcggcgagatcgtgcccatggaggtgaacttcaacttcgacgaccccaacctgatcatcctgcctctggcctttggcaagagacagggcagagaattcatctggaacgacctgctgtccctggaaaccggcagcctgaagctggccaacggaagagtgatcgagaagacactgtacaacagaagaacccggcaggatgagcctgccctgttcgtggccctgaccttcgagcggcgggaggtcctggactcctccaatatcaaaccaatgaacctgatcggcgtggcaagaggcgaaaacatccccgccgtgatcgccctgaccgaccccgagggctgcccactgagccggtttaaggatagcctgggaaacccaacccacatcctgagaatcggcgagagctataaggagaagcagcggaccatccaggccaagaaggaggtggagcagcggagagccggcggctacagccggaagtacgccagcaaagccaagaatctggcagacgatatggtgagaaacaccgctagagatctgctgtactacgccgtgacccaggatgccatgctgatcttcgccaacctgagccggggcttcggccggcagggcaagcggaccttcatggccgagagacagtacacacggatggaggactggctgaccgccaagctggcctacgagggcctgagcaagacctacctgtccaagacactggcccagtacacctccaagacatgcagcaactgtgggtttaccatcaccagcgccgactacgacagggtgctggagaagctgaagaagacagcaacaggctggatgaccacaattaacggcaaggagctgaaggtggagggccagattacctactacaacagatacaagagacagaacgtagtcaaggacctgtccgtcgagctggatagactgagcgaagaatctgtgaacaacgacatctcctcctggacaaagggcagaagcggagaagctctgagcctcctgaagaaaagattctcccatagacccgtgcaggagaagttcgtgtgcctgaactgcggcttcgagacacacgcagccgagcaagccgccctgaacatcgccagatcctggctgttcctgcggagccaggagtacaagaaataccagacaaacaagacaaccggcaacaccgataagagagccttcgtcgagacctggcagtccttttaccggaagaagcttaaggaggtgtggaaacctgccgtgcggtctggcggatctggcggaggctccacaagcagccagggcaccgtgagcttcaaggacgtggccgtgaacttcacccaggaggagtggcagtacctggacctgccccagagggacctgtacaaggacgtgatgctggagaactacaccaacctgatcagcgtgggctaccagaccaccaagcccagcgtgatccacaagctggagcagggcgaggagccctggatggtggagagggagatccccaactggagctacgccgaggagacctggcagaccagccccaagaaaaagagaaaagtctaagctgccttctgcggggcttgccttctggccatgcccttcttctctcccttgcacctgtacctcttggtctttgaataaagcctgagtaggaaggctagcaaaaaaaaaaaaaaaaaaaaaaaaaaaaaaaaaaaaaaaaaaaaaaaaaaaaaaaaaaaaaaaaaaaaaaaaaaaaaaaa

SEQ ID NO: 7176 - RNA, 5797 nt, synthetic construct
  source 1..5797: mol_type = other RNA
aggaaataagagagaaaagaagagtaagaagaaatataagagccaccatggcccctaagaagaagcgtaaagtgagccggatggaacgcctcgtctacgaggtgcggcagaagtgcagaaacatcgaggacatctgcatctcctgcggatctctgaacgtgaccctggagcacccactgttcatcggcggcatgtgccagaactgtaaaaactgttttctggagtgtgcctatcaatacgacgatgacggctaccagagctactgcaccatctgttgcggcggaagagaggtgctgatgtgtggaaataacaactgctgccggtgcttctgcgtggaatgcgtggacctgctggtgggccccggcgccgcccaggccgctattaaggaagatccttggaactgctacatgtgcggccacaagggcacatacggcctgctgagacggagagaggactggcctagcagactgcagatgttcttcgccaataaccacgaccaggagttcgacccccctaaggtgtaccctcccgtccccgccgagaagagaaagcccatccgggtcctgagcctgttcgatggcatcgccaccggtctgctggtgctgaaggacctgggcatccaggtggataggtacattgcctccgaggtgtgcgaggactccatcaccgtgggaatggtgcgtcatcagggcaagatcatgtacgtgggcgacgtgcggagcgtgacacagaagcatatccaggagtggggccctttcgacctggtgatcggcggcagcccttgcaatgacctgagcatcgtgaacccagcccggaagggcctgtacgagggaaccggcagactgttcttcgagttttacagactgctgcacgacgcccggcctaaggaaggcgacgaccggcccttcttttggctgttcgagaatgtggtggccatgggagtcagcgacaagcgggatattagccggttcctggagagcaaccccgtgatgatcgatgccaaggaagtgagcgccgcccaccgggccagatacttctggggcaatctgcctggcatgaacagacccctggccagcaccgtgaacgacaagctggagctgcaggagtgcctggagcacggccggatcgccaagttcagcaaggtgagaaccatcaccacccgaagcaacagcatcaaacaaggcaaggaccagcactttcctgtgttcatgaacgagaaggaggacatcctgtggtgtaccgagatggagagagtgttcgggttcccagtccactacacagatgtcagcaacatgtctagactggccagacagagactgctgggaagaagctggtccgtccctgtgatcagacacctgttcgcccctctgaaggagtacttcgcctgcgtgagcagcggcaacagcaacgccaacagccggggccccagcttctctagcggcctggtgccactgtccctgagagggagccacatgggccccatggagatctacaaaaccgtgagcgcctggaagcggcagcctgtgcgcgtgctgagcctgtttcggaatatcgataaagtcctgaaaagcctgggattcctggagagcggctctggctccggcggtggcaccctgaagtacgtggaggatgtgacaaacgtggtcagacgggatgtggagaagtggggccccttcgatctggtgtacggcagcacccaacccctgggcagctcttgtgaccggtgccctggctggtacatgtttcagttccaccggatcctgcagtacgccctgccgagacaggagtcccagcggccattcttttggattttcatggacaacttgctgctgaccgaggatgaccaggaaactaccactcggttcctgcagaccgaagccgtgaccctgcaggacgtgagaggccgggactaccagaacgccatgcgggtgtggtccaacatccctggactgaaaagcaagcacgcacctctgacccctaaagaagaggagtacctgcaggcccaggtgcggagcagaagcaagctggacgcccctaaggtggatctgctggtgaagaattgcctcctgcccctgagagagtacttcaagtatttcagccagaatagtctgcccctgggcggcccaagcagcggcgcccctcctcccagcggcggcagcccagccggctccccaacctctaccgaggagggcacctctgagtccgccacccccgagagcggccctggcacctccaccgagcccagcgagggcagcgcacccggcagccctgccggcagccccacctccacagaggagggaaccagcaccgagcccagcgaaggcagcgccccaggcaccagcaccgagcctagtgagggcggctctggcggcggcagcgcccaggagattaaacggatcaacaagatcagaagaagacttgtgaaagacagcaacaccaagaaggccggcaagacaggccccatgaaaaccctgctggttagagtgatgacacccgatctgagagagcggctggaaaacctgagaaagaagcctgaaaatatcccccagcccatcagcaatacatctagagccaacctgaataagctgctgaccgattacaccgaaatgaagaaggcgatcctgcatgtgtactgggaagagttccagaaggaccctgtgggcctgatgagccgggtggcccagcctgccagcaagaagatcgatcagaacaagctgaaacctgagatggacgagaagggcaacctgaccaccgccggctttgcctgctctcagtgtggccagcccctgttcgtgtacaagctggagcaggtgtctgagaagggcaaggcttacaccaactacttcggacggtgcaatgtggccgagcacgaaaagctgatcctgctggcccagctgaagcccgagaaggatagcgacgaagccgtgacatatagcctgggaaagtttgggcagagggccctggatttctacagcattcatgtgaccaaggagtccacccaccccgtgaagcccctggcccagatcgccggaaacagatacgcctccggacctgtgggaaaggccctgagcgacgcatgtatgggcacaatcgcctccttcctgtctaagtaccaggacatcatcatcgaacaccagaaggtggtgaagggcaaccagaagagactggagagcctgcgggagctggccggcaaggaaaacctggaataccctagcgtgaccctgccacctcagcctcacaccaaggagggcgttgatgcctacaacgaagtgatcgcccgggtgcgaatgtgggtgaacctgaacctgtggcagaagctgaagctaagcagagatgatgccaagcctctgctgagactgaagggattcccttcctttcctctggtcgagagacaggccaacgaagtggactggtgggacatggtgtgtaacgtgaagaagctgatcaacgagaaaaaggaggatggcaaggtgttttggcagaatctggctggctacaagagacaggaagccctgagaccatacctgagcagcgaggaagatcggaagaagggaaagaaattcgctcggtaccagctgggcgacctgctgctgcacctggaaaagaagcacggcgaggactggggaaaggtgtacgacgaggcctgggagcggattgacaagaaagtggaaggcctgagcaagcacatcaagctggaagaggaacggagaagcgaggacgcccagagcaaggccgccctgaccgactggctgcgggctaaggccagcttcgtgatcgagggcctgaaggaggccgacaaggacgagttctgcagatgcgagctgaagctgcagaagtggtacggggacctgcggggaaagcccttcgccatcgaagccgagaacagcatcctggacatcagcggcttcagcaagcagtacaactgtgccttcatctggcagaaggacggcgtgaagaagctgaacctgtacctgatcatcaactacttcaagggcggcaagctgcggttcaagaagatcaaacctgaagccttcgaagccaacagattctacaccgtgatcaacaaaaagagcggcgagatcgtgcccatggaggtgaacttcaacttcgacgaccccaacctgatcatcctgcctctggcctttggcaagagacagggcagagaattcatctggaacgacctgctgtccctggaaaccggcagcctgaagctggccaacggaagagtgatcgagaagacactgtacaacagaagaacccggcaggatgagcctgccctgttcgtggccctgaccttcgagcggcgggaggtcctggactcctccaatatcaaaccaatgaacctgatcggcgtggcaagaggcgaaaacatccccgccgtgatcgccctgaccgaccccgagggctgcccactgagccggtttaaggatagcctgggaaacccaacccacatcctgagaatcggcgagagctataaggagaagcagcggaccatccaggccaagaaggaggtggagcagcggagagccggcggctacagccggaagtacgccagcaaagccaagaatctggcagacgatatggtgagaaacaccgctagagatctgctgtactacgccgtgacccaggatgccatgctgatcttcgccaacctgagccggggcttcggccggcagggcaagcggaccttcatggccgagagacagtacacacggatggaggactggctgaccgccaagctggcctacgagggcctgagcaagacctacctgtccaagacactggcccagtacacctccaagacatgcagcaactgtgggtttaccatcaccagcgccgactacgacagggtgctggagaagctgaagaagacagcaacaggctggatgaccacaattaacggcaaggagctgaaggtggagggccagattacctactacaacagatacaagagacagaacgtagtcaaggacctgtccgtcgagctggatagactgagcgaagaatctgtgaacaacgacatctcctcctggacaaagggcagaagcggagaagctctgagcctcctgaagaaaagattctcccatagacccgtgcaggagaagttcgtgtgcctgaactgcggcttcgagacacacgcagccgagcaagccgccctgaacatcgccagatcctggctgttcctgcggagccaggagtacaagaaataccagacaaacaagacaaccggcaacaccgataagagagccttcgtcgagacctggcagtccttttaccggaagaagcttaaggaggtgtggaaacctgccgtgcggtctggcggatctggcggaggctccacaagcccccccagcctggtgaccttcggcgacgtggccatcgacttcagccaggaggagtgggagtggctgaacagcgcccagaggaccctgtacaggaacgtgatgctggagaactacaggaacctggccagcctgggcctgtgcggcagcaagcccgacatgatcagcagcctggagcagaggagggagccctggatcaccaagaggaagctgaccaggggcaggtgccccgacctgaaggccgtgaccagccccaagaaaaagagaaaagtctaagctgccttctgcggggcttgccttctggccatgcccttcttctctcccttgcacctgtacctcttggtctttgaataaagcctgagtaggaaggctagcaaaaaaaaaaaaaaaaaaaaaaaaaaaaaaaaaaaaaaaaaaaaaaaaaaaaaaaaaaaaaaaaaaaaaaaaaaaaaaaa

SEQ ID NO: 7177 - RNA, 5797 nt, synthetic construct
  source 1..5797: mol_type = other RNA
aggaaataagagagaaaagaagagtaagaagaaatataagagccaccatggcccctaagaagaagcgtaaagtgagccggatggaacgcctcgtctacgaggtgcggcagaagtgcagaaacatcgaggacatctgcatctcctgcggatctctgaacgtgaccctggagcacccactgttcatcggcggcatgtgccagaactgtaaaaactgttttctggagtgtgcctatcaatacgacgatgacggctaccagagctactgcaccatctgttgcggcggaagagaggtgctgatgtgtggaaataacaactgctgccggtgcttctgcgtggaatgcgtggacctgctggtgggccccggcgccgcccaggccgctattaaggaagatccttggaactgctacatgtgcggccacaagggcacatacggcctgctgagacggagagaggactggcctagcagactgcagatgttcttcgccaataaccacgaccaggagttcgacccccctaaggtgtaccctcccgtccccgccgagaagagaaagcccatccgggtcctgagcctgttcgatggcatcgccaccggtctgctggtgctgaaggacctgggcatccaggtggataggtacattgcctccgaggtgtgcgaggactccatcaccgtgggaatggtgcgtcatcagggcaagatcatgtacgtgggcgacgtgcggagcgtgacacagaagcatatccaggagtggggccctttcgacctggtgatcggcggcagcccttgcaatgacctgagcatcgtgaacccagcccggaagggcctgtacgagggaaccggcagactgttcttcgagttttacagactgctgcacgacgcccggcctaaggaaggcgacgaccggcccttcttttggctgttcgagaatgtggtggccatgggagtcagcgacaagcgggatattagccggttcctggagagcaaccccgtgatgatcgatgccaaggaagtgagcgccgcccaccgggccagatacttctggggcaatctgcctggcatgaacagacccctggccagcaccgtgaacgacaagctggagctgcaggagtgcctggagcacggccggatcgccaagttcagcaaggtgagaaccatcaccacccgaagcaacagcatcaaacaaggcaaggaccagcactttcctgtgttcatgaacgagaaggaggacatcctgtggtgtaccgagatggagagagtgttcgggttcccagtccactacacagatgtcagcaacatgtctagactggccagacagagactgctgggaagaagctggtccgtccctgtgatcagacacctgttcgcccctctgaaggagtacttcgcctgcgtgagcagcggcaacagcaacgccaacagccggggccccagcttctctagcggcctggtgccactgtccctgagagggagccacatgggccccatggagatctacaaaaccgtgagcgcctggaagcggcagcctgtgcgcgtgctgagcctgtttcggaatatcgataaagtcctgaaaagcctgggattcctggagagcggctctggctccggcggtggcaccctgaagtacgtggaggatgtgacaaacgtggtcagacgggatgtggagaagtggggccccttcgatctggtgtacggcagcacccaacccctgggcagctcttgtgaccggtgccctggctggtacatgtttcagttccaccggatcctgcagtacgccctgccgagacaggagtcccagcggccattcttttggattttcatggacaacttgctgctgaccgaggatgaccaggaaactaccactcggttcctgcagaccgaagccgtgaccctgcaggacgtgagaggccgggactaccagaacgccatgcgggtgtggtccaacatccctggactgaaaagcaagcacgcacctctgacccctaaagaagaggagtacctgcaggcccaggtgcggagcagaagcaagctggacgcccctaaggtggatctgctggtgaagaattgcctcctgcccctgagagagtacttcaagtatttcagccagaatagtctgcccctgggcggcccaagcagcggcgcccctcctcccagcggcggcagcccagccggctccccaacctctaccgaggagggcacctctgagtccgccacccccgagagcggccctggcacctccaccgagcccagcgagggcagcgcacccggcagccctgccggcagccccacctccacagaggagggaaccagcaccgagcccagcgaaggcagcgccccaggcaccagcaccgagcctagtgagggcggctctggcggcggcagcgcccaggagattaaacggatcaacaagatcagaagaagacttgtgaaagacagcaacaccaagaaggccggcaagacaggccccatgaaaaccctgctggttagagtgatgacacccgatctgagagagcggctggaaaacctgagaaagaagcctgaaaatatcccccagcccatcagcaatacatctagagccaacctgaataagctgctgaccgattacaccgaaatgaagaaggcgatcctgcatgtgtactgggaagagttccagaaggaccctgtgggcctgatgagccgggtggcccagcctgccagcaagaagatcgatcagaacaagctgaaacctgagatggacgagaagggcaacctgaccaccgccggctttgcctgctctcagtgtggccagcccctgttcgtgtacaagctggagcaggtgtctgagaagggcaaggcttacaccaactacttcggacggtgcaatgtggccgagcacgaaaagctgatcctgctggcccagctgaagcccgagaaggatagcgacgaagccgtgacatatagcctgggaaagtttgggcagagggccctggatttctacagcattcatgtgaccaaggagtccacccaccccgtgaagcccctggcccagatcgccggaaacagatacgcctccggacctgtgggaaaggccctgagcgacgcatgtatgggcacaatcgcctccttcctgtctaagtaccaggacatcatcatcgaacaccagaaggtggtgaagggcaaccagaagagactggagagcctgcgggagctggccggcaaggaaaacctggaataccctagcgtgaccctgccacctcagcctcacaccaaggagggcgttgatgcctacaacgaagtgatcgcccgggtgcgaatgtgggtgaacctgaacctgtggcagaagctgaagctaagcagagatgatgccaagcctctgctgagactgaagggattcccttcctttcctctggtcgagagacaggccaacgaagtggactggtgggacatggtgtgtaacgtgaagaagctgatcaacgagaaaaaggaggatggcaaggtgttttggcagaatctggctggctacaagagacaggaagccctgagaccatacctgagcagcgaggaagatcggaagaagggaaagaaattcgctcggtaccagctgggcgacctgctgctgcacctggaaaagaagcacggcgaggactggggaaaggtgtacgacgaggcctgggagcggattgacaagaaagtggaaggcctgagcaagcacatcaagctggaagaggaacggagaagcgaggacgcccagagcaaggccgccctgaccgactggctgcgggctaaggccagcttcgtgatcgagggcctgaaggaggccgacaaggacgagttctgcagatgcgagctgaagctgcagaagtggtacggggacctgcggggaaagcccttcgccatcgaagccgagaacagcatcctggacatcagcggcttcagcaagcagtacaactgtgccttcatctggcagaaggacggcgtgaagaagctgaacctgtacctgatcatcaactacttcaagggcggcaagctgcggttcaagaagatcaaacctgaagccttcgaagccaacagattctacaccgtgatcaacaaaaagagcggcgagatcgtgcccatggaggtgaacttcaacttcgacgaccccaacctgatcatcctgcctctggcctttggcaagagacagggcagagaattcatctggaacgacctgctgtccctggaaaccggcagcctgaagctggccaacggaagagtgatcgagaagacactgtacaacagaagaacccggcaggatgagcctgccctgttcgtggccctgaccttcgagcggcgggaggtcctggactcctccaatatcaaaccaatgaacctgatcggcgtggcaagaggcgaaaacatccccgccgtgatcgccctgaccgaccccgagggctgcccactgagccggtttaaggatagcctgggaaacccaacccacatcctgagaatcggcgagagctataaggagaagcagcggaccatccaggccaagaaggaggtggagcagcggagagccggcggctacagccggaagtacgccagcaaagccaagaatctggcagacgatatggtgagaaacaccgctagagatctgctgtactacgccgtgacccaggatgccatgctgatcttcgccaacctgagccggggcttcggccggcagggcaagcggaccttcatggccgagagacagtacacacggatggaggactggctgaccgccaagctggcctacgagggcctgagcaagacctacctgtccaagacactggcccagtacacctccaagacatgcagcaactgtgggtttaccatcaccagcgccgactacgacagggtgctggagaagctgaagaagacagcaacaggctggatgaccacaattaacggcaaggagctgaaggtggagggccagattacctactacaacagatacaagagacagaacgtagtcaaggacctgtccgtcgagctggatagactgagcgaagaatctgtgaacaacgacatctcctcctggacaaagggcagaagcggagaagctctgagcctcctgaagaaaagattctcccatagacccgtgcaggagaagttcgtgtgcctgaactgcggcttcgagacacacgcagccgagcaagccgccctgaacatcgccagatcctggctgttcctgcggagccaggagtacaagaaataccagacaaacaagacaaccggcaacaccgataagagagccttcgtcgagacctggcagtccttttaccggaagaagcttaaggaggtgtggaaacctgccgtgcggtctggcggatctggcggaggctccacaagcatgagggtgaccttcgaggacatcgccgtgagcttcagccaggaggagtgggagtacctggacgaggagcagaaggagctgtacagggaggtgatgaaggagaactaccagaccctgatcagcctgggcgccggcagcctgaccttcacccccgagatcatcagccacatcgagaggggcgaggagccctacagcagggacgagcccggcagcggcgagagggagcccggcaagagcaggtgcaccagccccaagaaaaagagaaaagtctaagctgccttctgcggggcttgccttctggccatgcccttcttctctcccttgcacctgtacctcttggtctttgaataaagcctgagtaggaaggctagcaaaaaaaaaaaaaaaaaaaaaaaaaaaaaaaaaaaaaaaaaaaaaaaaaaaaaaaaaaaaaaaaaaaaaaaaaaaaaaaa

SEQ ID NO: 7178 - RNA, 5797 nt, synthetic construct
  source 1..5797: mol_type = other RNA
aggaaataagagagaaaagaagagtaagaagaaatataagagccaccatggcccctaagaagaagcgtaaagtgagccggatggaacgcctcgtctacgaggtgcggcagaagtgcagaaacatcgaggacatctgcatctcctgcggatctctgaacgtgaccctggagcacccactgttcatcggcggcatgtgccagaactgtaaaaactgttttctggagtgtgcctatcaatacgacgatgacggctaccagagctactgcaccatctgttgcggcggaagagaggtgctgatgtgtggaaataacaactgctgccggtgcttctgcgtggaatgcgtggacctgctggtgggccccggcgccgcccaggccgctattaaggaagatccttggaactgctacatgtgcggccacaagggcacatacggcctgctgagacggagagaggactggcctagcagactgcagatgttcttcgccaataaccacgaccaggagttcgacccccctaaggtgtaccctcccgtccccgccgagaagagaaagcccatccgggtcctgagcctgttcgatggcatcgccaccggtctgctggtgctgaaggacctgggcatccaggtggataggtacattgcctccgaggtgtgcgaggactccatcaccgtgggaatggtgcgtcatcagggcaagatcatgtacgtgggcgacgtgcggagcgtgacacagaagcatatccaggagtggggccctttcgacctggtgatcggcggcagcccttgcaatgacctgagcatcgtgaacccagcccggaagggcctgtacgagggaaccggcagactgttcttcgagttttacagactgctgcacgacgcccggcctaaggaaggcgacgaccggcccttcttttggctgttcgagaatgtggtggccatgggagtcagcgacaagcgggatattagccggttcctggagagcaaccccgtgatgatcgatgccaaggaagtgagcgccgcccaccgggccagatacttctggggcaatctgcctggcatgaacagacccctggccagcaccgtgaacgacaagctggagctgcaggagtgcctggagcacggccggatcgccaagttcagcaaggtgagaaccatcaccacccgaagcaacagcatcaaacaaggcaaggaccagcactttcctgtgttcatgaacgagaaggaggacatcctgtggtgtaccgagatggagagagtgttcgggttcccagtccactacacagatgtcagcaacatgtctagactggccagacagagactgctgggaagaagctggtccgtccctgtgatcagacacctgttcgcccctctgaaggagtacttcgcctgcgtgagcagcggcaacagcaacgccaacagccggggccccagcttctctagcggcctggtgccactgtccctgagagggagccacatgggccccatggagatctacaaaaccgtgagcgcctggaagcggcagcctgtgcgcgtgctgagcctgtttcggaatatcgataaagtcctgaaaagcctgggattcctggagagcggctctggctccggcggtggcaccctgaagtacgtggaggatgtgacaaacgtggtcagacgggatgtggagaagtggggccccttcgatctggtgtacggcagcacccaacccctgggcagctcttgtgaccggtgccctggctggtacatgtttcagttccaccggatcctgcagtacgccctgccgagacaggagtcccagcggccattcttttggattttcatggacaacttgctgctgaccgaggatgaccaggaaactaccactcggttcctgcagaccgaagccgtgaccctgcaggacgtgagaggccgggactaccagaacgccatgcgggtgtggtccaacatccctggactgaaaagcaagcacgcacctctgacccctaaagaagaggagtacctgcaggcccaggtgcggagcagaagcaagctggacgcccctaaggtggatctgctggtgaagaattgcctcctgcccctgagagagtacttcaagtatttcagccagaatagtctgcccctgggcggcccaagcagcggcgcccctcctcccagcggcggcagcccagccggctccccaacctctaccgaggagggcacctctgagtccgccacccccgagagcggccctggcacctccaccgagcccagcgagggcagcgcacccggcagccctgccggcagccccacctccacagaggagggaaccagcaccgagcccagcgaaggcagcgccccaggcaccagcaccgagcctagtgagggcggctctggcggcggcagcgcccaggagattaaacggatcaacaagatcagaagaagacttgtgaaagacagcaacaccaagaaggccggcaagacaggccccatgaaaaccctgctggttagagtgatgacacccgatctgagagagcggctggaaaacctgagaaagaagcctgaaaatatcccccagcccatcagcaatacatctagagccaacctgaataagctgctgaccgattacaccgaaatgaagaaggcgatcctgcatgtgtactgggaagagttccagaaggaccctgtgggcctgatgagccgggtggcccagcctgccagcaagaagatcgatcagaacaagctgaaacctgagatggacgagaagggcaacctgaccaccgccggctttgcctgctctcagtgtggccagcccctgttcgtgtacaagctggagcaggtgtctgagaagggcaaggcttacaccaactacttcggacggtgcaatgtggccgagcacgaaaagctgatcctgctggcccagctgaagcccgagaaggatagcgacgaagccgtgacatatagcctgggaaagtttgggcagagggccctggatttctacagcattcatgtgaccaaggagtccacccaccccgtgaagcccctggcccagatcgccggaaacagatacgcctccggacctgtgggaaaggccctgagcgacgcatgtatgggcacaatcgcctccttcctgtctaagtaccaggacatcatcatcgaacaccagaaggtggtgaagggcaaccagaagagactggagagcctgcgggagctggccggcaaggaaaacctggaataccctagcgtgaccctgccacctcagcctcacaccaaggagggcgttgatgcctacaacgaagtgatcgcccgggtgcgaatgtgggtgaacctgaacctgtggcagaagctgaagctaagcagagatgatgccaagcctctgctgagactgaagggattcccttcctttcctctggtcgagagacaggccaacgaagtggactggtgggacatggtgtgtaacgtgaagaagctgatcaacgagaaaaaggaggatggcaaggtgttttggcagaatctggctggctacaagagacaggaagccctgagaccatacctgagcagcgaggaagatcggaagaagggaaagaaattcgctcggtaccagctgggcgacctgctgctgcacctggaaaagaagcacggcgaggactggggaaaggtgtacgacgaggcctgggagcggattgacaagaaagtggaaggcctgagcaagcacatcaagctggaagaggaacggagaagcgaggacgcccagagcaaggccgccctgaccgactggctgcgggctaaggccagcttcgtgatcgagggcctgaaggaggccgacaaggacgagttctgcagatgcgagctgaagctgcagaagtggtacggggacctgcggggaaagcccttcgccatcgaagccgagaacagcatcctggacatcagcggcttcagcaagcagtacaactgtgccttcatctggcagaaggacggcgtgaagaagctgaacctgtacctgatcatcaactacttcaagggcggcaagctgcggttcaagaagatcaaacctgaagccttcgaagccaacagattctacaccgtgatcaacaaaaagagcggcgagatcgtgcccatggaggtgaacttcaacttcgacgaccccaacctgatcatcctgcctctggcctttggcaagagacagggcagagaattcatctggaacgacctgctgtccctggaaaccggcagcctgaagctggccaacggaagagtgatcgagaagacactgtacaacagaagaacccggcaggatgagcctgccctgttcgtggccctgaccttcgagcggcgggaggtcctggactcctccaatatcaaaccaatgaacctgatcggcgtggcaagaggcgaaaacatccccgccgtgatcgccctgaccgaccccgagggctgcccactgagccggtttaaggatagcctgggaaacccaacccacatcctgagaatcggcgagagctataaggagaagcagcggaccatccaggccaagaaggaggtggagcagcggagagccggcggctacagccggaagtacgccagcaaagccaagaatctggcagacgatatggtgagaaacaccgctagagatctgctgtactacgccgtgacccaggatgccatgctgatcttcgccaacctgagccggggcttcggccggcagggcaagcggaccttcatggccgagagacagtacacacggatggaggactggctgaccgccaagctggcctacgagggcctgagcaagacctacctgtccaagacactggcccagtacacctccaagacatgcagcaactgtgggtttaccatcaccagcgccgactacgacagggtgctggagaagctgaagaagacagcaacaggctggatgaccacaattaacggcaaggagctgaaggtggagggccagattacctactacaacagatacaagagacagaacgtagtcaaggacctgtccgtcgagctggatagactgagcgaagaatctgtgaacaacgacatctcctcctggacaaagggcagaagcggagaagctctgagcctcctgaagaaaagattctcccatagacccgtgcaggagaagttcgtgtgcctgaactgcggcttcgagacacacgcagccgagcaagccgccctgaacatcgccagatcctggctgttcctgcggagccaggagtacaagaaataccagacaaacaagacaaccggcaacaccgataagagagccttcgtcgagacctggcagtccttttaccggaagaagcttaaggaggtgtggaaacctgccgtgcggtctggcggatctggcggaggctccacaagccaggacctggtgaccttcaaggacgtgagcgtggacttcaccagggaggagtggatgaggctggaccacccccagagggccctgtacagggacgtgatgctggagaactacaggaacctggtgctggtgagcctgggccaccccatcagcaagcccgacgtgatcagcaggctggagcagggcggcgtgccctgggtgctgaagaagggcgccaccggcagggccttcagcgacagggagaccaccagccccaagaaaaagagaaaagtctaagctgccttctgcggggcttgccttctggccatgcccttcttctctcccttgcacctgtacctcttggtctttgaataaagcctgagtaggaaggctagcaaaaaaaaaaaaaaaaaaaaaaaaaaaaaaaaaaaaaaaaaaaaaaaaaaaaaaaaaaaaaaaaaaaaaaaaaaaaaaaa

SEQ ID NO: 7179 - RNA, 5797 nt, synthetic construct
  source 1..5797: mol_type = other RNA
aggaaataagagagaaaagaagagtaagaagaaatataagagccaccatggcccctaagaagaagcgtaaagtgagccggatggaacgcctcgtctacgaggtgcggcagaagtgcagaaacatcgaggacatctgcatctcctgcggatctctgaacgtgaccctggagcacccactgttcatcggcggcatgtgccagaactgtaaaaactgttttctggagtgtgcctatcaatacgacgatgacggctaccagagctactgcaccatctgttgcggcggaagagaggtgctgatgtgtggaaataacaactgctgccggtgcttctgcgtggaatgcgtggacctgctggtgggccccggcgccgcccaggccgctattaaggaagatccttggaactgctacatgtgcggccacaagggcacatacggcctgctgagacggagagaggactggcctagcagactgcagatgttcttcgccaataaccacgaccaggagttcgacccccctaaggtgtaccctcccgtccccgccgagaagagaaagcccatccgggtcctgagcctgttcgatggcatcgccaccggtctgctggtgctgaaggacctgggcatccaggtggataggtacattgcctccgaggtgtgcgaggactccatcaccgtgggaatggtgcgtcatcagggcaagatcatgtacgtgggcgacgtgcggagcgtgacacagaagcatatccaggagtggggccctttcgacctggtgatcggcggcagcccttgcaatgacctgagcatcgtgaacccagcccggaagggcctgtacgagggaaccggcagactgttcttcgagttttacagactgctgcacgacgcccggcctaaggaaggcgacgaccggcccttcttttggctgttcgagaatgtggtggccatgggagtcagcgacaagcgggatattagccggttcctggagagcaaccccgtgatgatcgatgccaaggaagtgagcgccgcccaccgggccagatacttctggggcaatctgcctggcatgaacagacccctggccagcaccgtgaacgacaagctggagctgcaggagtgcctggagcacggccggatcgccaagttcagcaaggtgagaaccatcaccacccgaagcaacagcatcaaacaaggcaaggaccagcactttcctgtgttcatgaacgagaaggaggacatcctgtggtgtaccgagatggagagagtgttcgggttcccagtccactacacagatgtcagcaacatgtctagactggccagacagagactgctgggaagaagctggtccgtccctgtgatcagacacctgttcgcccctctgaaggagtacttcgcctgcgtgagcagcggcaacagcaacgccaacagccggggccccagcttctctagcggcctggtgccactgtccctgagagggagccacatgggccccatggagatctacaaaaccgtgagcgcctggaagcggcagcctgtgcgcgtgctgagcctgtttcggaatatcgataaagtcctgaaaagcctgggattcctggagagcggctctggctccggcggtggcaccctgaagtacgtggaggatgtgacaaacgtggtcagacgggatgtggagaagtggggccccttcgatctggtgtacggcagcacccaacccctgggcagctcttgtgaccggtgccctggctggtacatgtttcagttccaccggatcctgcagtacgccctgccgagacaggagtcccagcggccattcttttggattttcatggacaacttgctgctgaccgaggatgaccaggaaactaccactcggttcctgcagaccgaagccgtgaccctgcaggacgtgagaggccgggactaccagaacgccatgcgggtgtggtccaacatccctggactgaaaagcaagcacgcacctctgacccctaaagaagaggagtacctgcaggcccaggtgcggagcagaagcaagctggacgcccctaaggtggatctgctggtgaagaattgcctcctgcccctgagagagtacttcaagtatttcagccagaatagtctgcccctgggcggcccaagcagcggcgcccctcctcccagcggcggcagcccagccggctccccaacctctaccgaggagggcacctctgagtccgccacccccgagagcggccctggcacctccaccgagcccagcgagggcagcgcacccggcagccctgccggcagccccacctccacagaggagggaaccagcaccgagcccagcgaaggcagcgccccaggcaccagcaccgagcctagtgagggcggctctggcggcggcagcgcccaggagattaaacggatcaacaagatcagaagaagacttgtgaaagacagcaacaccaagaaggccggcaagacaggccccatgaaaaccctgctggttagagtgatgacacccgatctgagagagcggctggaaaacctgagaaagaagcctgaaaatatcccccagcccatcagcaatacatctagagccaacctgaataagctgctgaccgattacaccgaaatgaagaaggcgatcctgcatgtgtactgggaagagttccagaaggaccctgtgggcctgatgagccgggtggcccagcctgccagcaagaagatcgatcagaacaagctgaaacctgagatggacgagaagggcaacctgaccaccgccggctttgcctgctctcagtgtggccagcccctgttcgtgtacaagctggagcaggtgtctgagaagggcaaggcttacaccaactacttcggacggtgcaatgtggccgagcacgaaaagctgatcctgctggcccagctgaagcccgagaaggatagcgacgaagccgtgacatatagcctgggaaagtttgggcagagggccctggatttctacagcattcatgtgaccaaggagtccacccaccccgtgaagcccctggcccagatcgccggaaacagatacgcctccggacctgtgggaaaggccctgagcgacgcatgtatgggcacaatcgcctccttcctgtctaagtaccaggacatcatcatcgaacaccagaaggtggtgaagggcaaccagaagagactggagagcctgcgggagctggccggcaaggaaaacctggaataccctagcgtgaccctgccacctcagcctcacaccaaggagggcgttgatgcctacaacgaagtgatcgcccgggtgcgaatgtgggtgaacctgaacctgtggcagaagctgaagctaagcagagatgatgccaagcctctgctgagactgaagggattcccttcctttcctctggtcgagagacaggccaacgaagtggactggtgggacatggtgtgtaacgtgaagaagctgatcaacgagaaaaaggaggatggcaaggtgttttggcagaatctggctggctacaagagacaggaagccctgagaccatacctgagcagcgaggaagatcggaagaagggaaagaaattcgctcggtaccagctgggcgacctgctgctgcacctggaaaagaagcacggcgaggactggggaaaggtgtacgacgaggcctgggagcggattgacaagaaagtggaaggcctgagcaagcacatcaagctggaagaggaacggagaagcgaggacgcccagagcaaggccgccctgaccgactggctgcgggctaaggccagcttcgtgatcgagggcctgaaggaggccgacaaggacgagttctgcagatgcgagctgaagctgcagaagtggtacggggacctgcggggaaagcccttcgccatcgaagccgagaacagcatcctggacatcagcggcttcagcaagcagtacaactgtgccttcatctggcagaaggacggcgtgaagaagctgaacctgtacctgatcatcaactacttcaagggcggcaagctgcggttcaagaagatcaaacctgaagccttcgaagccaacagattctacaccgtgatcaacaaaaagagcggcgagatcgtgcccatggaggtgaacttcaacttcgacgaccccaacctgatcatcctgcctctggcctttggcaagagacagggcagagaattcatctggaacgacctgctgtccctggaaaccggcagcctgaagctggccaacggaagagtgatcgagaagacactgtacaacagaagaacccggcaggatgagcctgccctgttcgtggccctgaccttcgagcggcgggaggtcctggactcctccaatatcaaaccaatgaacctgatcggcgtggcaagaggcgaaaacatccccgccgtgatcgccctgaccgaccccgagggctgcccactgagccggtttaaggatagcctgggaaacccaacccacatcctgagaatcggcgagagctataaggagaagcagcggaccatccaggccaagaaggaggtggagcagcggagagccggcggctacagccggaagtacgccagcaaagccaagaatctggcagacgatatggtgagaaacaccgctagagatctgctgtactacgccgtgacccaggatgccatgctgatcttcgccaacctgagccggggcttcggccggcagggcaagcggaccttcatggccgagagacagtacacacggatggaggactggctgaccgccaagctggcctacgagggcctgagcaagacctacctgtccaagacactggcccagtacacctccaagacatgcagcaactgtgggtttaccatcaccagcgccgactacgacagggtgctggagaagctgaagaagacagcaacaggctggatgaccacaattaacggcaaggagctgaaggtggagggccagattacctactacaacagatacaagagacagaacgtagtcaaggacctgtccgtcgagctggatagactgagcgaagaatctgtgaacaacgacatctcctcctggacaaagggcagaagcggagaagctctgagcctcctgaagaaaagattctcccatagacccgtgcaggagaagttcgtgtgcctgaactgcggcttcgagacacacgcagccgagcaagccgccctgaacatcgccagatcctggctgttcctgcggagccaggagtacaagaaataccagacaaacaagacaaccggcaacaccgataagagagccttcgtcgagacctggcagtccttttaccggaagaagcttaaggaggtgtggaaacctgccgtgcggtctggcggatctggcggaggctccacaagcgaccaggagagcctgaccctggaggacgtggccgtggacttcagcagggaggagtggcagctgctggcccccgcccagaaggacctgtacagggacgtgatgctggagaactacaggaacctggtgagcctgggctaccaggccagcacccccgacgccctgtgcatgctggagaggggcgagggcccctgggccaccggcgaggccgtgaggggcggcgccaggcccgagaccaggaaggtgaccagccccaagaaaaagagaaaagtctaagctgccttctgcggggcttgccttctggccatgcccttcttctctcccttgcacctgtacctcttggtctttgaataaagcctgagtaggaaggctagcaaaaaaaaaaaaaaaaaaaaaaaaaaaaaaaaaaaaaaaaaaaaaaaaaaaaaaaaaaaaaaaaaaaaaaaaaaaaaaaa

SEQ ID NO: 7180 - RNA, 5797 nt, synthetic construct
  source 1..5797: mol_type = other RNA
aggaaataagagagaaaagaagagtaagaagaaatataagagccaccatggcccctaagaagaagcgtaaagtgagccggatggaacgcctcgtctacgaggtgcggcagaagtgcagaaacatcgaggacatctgcatctcctgcggatctctgaacgtgaccctggagcacccactgttcatcggcggcatgtgccagaactgtaaaaactgttttctggagtgtgcctatcaatacgacgatgacggctaccagagctactgcaccatctgttgcggcggaagagaggtgctgatgtgtggaaataacaactgctgccggtgcttctgcgtggaatgcgtggacctgctggtgggccccggcgccgcccaggccgctattaaggaagatccttggaactgctacatgtgcggccacaagggcacatacggcctgctgagacggagagaggactggcctagcagactgcagatgttcttcgccaataaccacgaccaggagttcgacccccctaaggtgtaccctcccgtccccgccgagaagagaaagcccatccgggtcctgagcctgttcgatggcatcgccaccggtctgctggtgctgaaggacctgggcatccaggtggataggtacattgcctccgaggtgtgcgaggactccatcaccgtgggaatggtgcgtcatcagggcaagatcatgtacgtgggcgacgtgcggagcgtgacacagaagcatatccaggagtggggccctttcgacctggtgatcggcggcagcccttgcaatgacctgagcatcgtgaacccagcccggaagggcctgtacgagggaaccggcagactgttcttcgagttttacagactgctgcacgacgcccggcctaaggaaggcgacgaccggcccttcttttggctgttcgagaatgtggtggccatgggagtcagcgacaagcgggatattagccggttcctggagagcaaccccgtgatgatcgatgccaaggaagtgagcgccgcccaccgggccagatacttctggggcaatctgcctggcatgaacagacccctggccagcaccgtgaacgacaagctggagctgcaggagtgcctggagcacggccggatcgccaagttcagcaaggtgagaaccatcaccacccgaagcaacagcatcaaacaaggcaaggaccagcactttcctgtgttcatgaacgagaaggaggacatcctgtggtgtaccgagatggagagagtgttcgggttcccagtccactacacagatgtcagcaacatgtctagactggccagacagagactgctgggaagaagctggtccgtccctgtgatcagacacctgttcgcccctctgaaggagtacttcgcctgcgtgagcagcggcaacagcaacgccaacagccggggccccagcttctctagcggcctggtgccactgtccctgagagggagccacatgggccccatggagatctacaaaaccgtgagcgcctggaagcggcagcctgtgcgcgtgctgagcctgtttcggaatatcgataaagtcctgaaaagcctgggattcctggagagcggctctggctccggcggtggcaccctgaagtacgtggaggatgtgacaaacgtggtcagacgggatgtggagaagtggggccccttcgatctggtgtacggcagcacccaacccctgggcagctcttgtgaccggtgccctggctggtacatgtttcagttccaccggatcctgcagtacgccctgccgagacaggagtcccagcggccattcttttggattttcatggacaacttgctgctgaccgaggatgaccaggaaactaccactcggttcctgcagaccgaagccgtgaccctgcaggacgtgagaggccgggactaccagaacgccatgcgggtgtggtccaacatccctggactgaaaagcaagcacgcacctctgacccctaaagaagaggagtacctgcaggcccaggtgcggagcagaagcaagctggacgcccctaaggtggatctgctggtgaagaattgcctcctgcccctgagagagtacttcaagtatttcagccagaatagtctgcccctgggcggcccaagcagcggcgcccctcctcccagcggcggcagcccagccggctccccaacctctaccgaggagggcacctctgagtccgccacccccgagagcggccctggcacctccaccgagcccagcgagggcagcgcacccggcagccctgccggcagccccacctccacagaggagggaaccagcaccgagcccagcgaaggcagcgccccaggcaccagcaccgagcctagtgagggcggctctggcggcggcagcgcccaggagattaaacggatcaacaagatcagaagaagacttgtgaaagacagcaacaccaagaaggccggcaagacaggccccatgaaaaccctgctggttagagtgatgacacccgatctgagagagcggctggaaaacctgagaaagaagcctgaaaatatcccccagcccatcagcaatacatctagagccaacctgaataagctgctgaccgattacaccgaaatgaagaaggcgatcctgcatgtgtactgggaagagttccagaaggaccctgtgggcctgatgagccgggtggcccagcctgccagcaagaagatcgatcagaacaagctgaaacctgagatggacgagaagggcaacctgaccaccgccggctttgcctgctctcagtgtggccagcccctgttcgtgtacaagctggagcaggtgtctgagaagggcaaggcttacaccaactacttcggacggtgcaatgtggccgagcacgaaaagctgatcctgctggcccagctgaagcccgagaaggatagcgacgaagccgtgacatatagcctgggaaagtttgggcagagggccctggatttctacagcattcatgtgaccaaggagtccacccaccccgtgaagcccctggcccagatcgccggaaacagatacgcctccggacctgtgggaaaggccctgagcgacgcatgtatgggcacaatcgcctccttcctgtctaagtaccaggacatcatcatcgaacaccagaaggtggtgaagggcaaccagaagagactggagagcctgcgggagctggccggcaaggaaaacctggaataccctagcgtgaccctgccacctcagcctcacaccaaggagggcgttgatgcctacaacgaagtgatcgcccgggtgcgaatgtgggtgaacctgaacctgtggcagaagctgaagctaagcagagatgatgccaagcctctgctgagactgaagggattcccttcctttcctctggtcgagagacaggccaacgaagtggactggtgggacatggtgtgtaacgtgaagaagctgatcaacgagaaaaaggaggatggcaaggtgttttggcagaatctggctggctacaagagacaggaagccctgagaccatacctgagcagcgaggaagatcggaagaagggaaagaaattcgctcggtaccagctgggcgacctgctgctgcacctggaaaagaagcacggcgaggactggggaaaggtgtacgacgaggcctgggagcggattgacaagaaagtggaaggcctgagcaagcacatcaagctggaagaggaacggagaagcgaggacgcccagagcaaggccgccctgaccgactggctgcgggctaaggccagcttcgtgatcgagggcctgaaggaggccgacaaggacgagttctgcagatgcgagctgaagctgcagaagtggtacggggacctgcggggaaagcccttcgccatcgaagccgagaacagcatcctggacatcagcggcttcagcaagcagtacaactgtgccttcatctggcagaaggacggcgtgaagaagctgaacctgtacctgatcatcaactacttcaagggcggcaagctgcggttcaagaagatcaaacctgaagccttcgaagccaacagattctacaccgtgatcaacaaaaagagcggcgagatcgtgcccatggaggtgaacttcaacttcgacgaccccaacctgatcatcctgcctctggcctttggcaagagacagggcagagaattcatctggaacgacctgctgtccctggaaaccggcagcctgaagctggccaacggaagagtgatcgagaagacactgtacaacagaagaacccggcaggatgagcctgccctgttcgtggccctgaccttcgagcggcgggaggtcctggactcctccaatatcaaaccaatgaacctgatcggcgtggcaagaggcgaaaacatccccgccgtgatcgccctgaccgaccccgagggctgcccactgagccggtttaaggatagcctgggaaacccaacccacatcctgagaatcggcgagagctataaggagaagcagcggaccatccaggccaagaaggaggtggagcagcggagagccggcggctacagccggaagtacgccagcaaagccaagaatctggcagacgatatggtgagaaacaccgctagagatctgctgtactacgccgtgacccaggatgccatgctgatcttcgccaacctgagccggggcttcggccggcagggcaagcggaccttcatggccgagagacagtacacacggatggaggactggctgaccgccaagctggcctacgagggcctgagcaagacctacctgtccaagacactggcccagtacacctccaagacatgcagcaactgtgggtttaccatcaccagcgccgactacgacagggtgctggagaagctgaagaagacagcaacaggctggatgaccacaattaacggcaaggagctgaaggtggagggccagattacctactacaacagatacaagagacagaacgtagtcaaggacctgtccgtcgagctggatagactgagcgaagaatctgtgaacaacgacatctcctcctggacaaagggcagaagcggagaagctctgagcctcctgaagaaaagattctcccatagacccgtgcaggagaagttcgtgtgcctgaactgcggcttcgagacacacgcagccgagcaagccgccctgaacatcgccagatcctggctgttcctgcggagccaggagtacaagaaataccagacaaacaagacaaccggcaacaccgataagagagccttcgtcgagacctggcagtccttttaccggaagaagcttaaggaggtgtggaaacctgccgtgcggtctggcggatctggcggaggctccacaagccccaggggcctggtgaccttcaaggacgtggccgtggacttcacccaggaggagtggggcctgctggaccacaaccagaaggagctgtacaaggaggtgatgctggagaacgccaggaacctgctgagcctgggcctgcccgtgcccagggaggacgtgatcagctacttcgagcagagggaggccccctggatgctggagcaggagggcctgaggagcaggtgcctggagggcgagatcaggaccagccccaagaaaaagagaaaagtctaagctgccttctgcggggcttgccttctggccatgcccttcttctctcccttgcacctgtacctcttggtctttgaataaagcctgagtaggaaggctagcaaaaaaaaaaaaaaaaaaaaaaaaaaaaaaaaaaaaaaaaaaaaaaaaaaaaaaaaaaaaaaaaaaaaaaaaaaaaaaaa

SEQ ID NO: 7181 - RNA, 5797 nt, synthetic construct
  source 1..5797: mol_type = other RNA
aggaaataagagagaaaagaagagtaagaagaaatataagagccaccatggcccctaagaagaagcgtaaagtgagccggatggaacgcctcgtctacgaggtgcggcagaagtgcagaaacatcgaggacatctgcatctcctgcggatctctgaacgtgaccctggagcacccactgttcatcggcggcatgtgccagaactgtaaaaactgttttctggagtgtgcctatcaatacgacgatgacggctaccagagctactgcaccatctgttgcggcggaagagaggtgctgatgtgtggaaataacaactgctgccggtgcttctgcgtggaatgcgtggacctgctggtgggccccggcgccgcccaggccgctattaaggaagatccttggaactgctacatgtgcggccacaagggcacatacggcctgctgagacggagagaggactggcctagcagactgcagatgttcttcgccaataaccacgaccaggagttcgacccccctaaggtgtaccctcccgtccccgccgagaagagaaagcccatccgggtcctgagcctgttcgatggcatcgccaccggtctgctggtgctgaaggacctgggcatccaggtggataggtacattgcctccgaggtgtgcgaggactccatcaccgtgggaatggtgcgtcatcagggcaagatcatgtacgtgggcgacgtgcggagcgtgacacagaagcatatccaggagtggggccctttcgacctggtgatcggcggcagcccttgcaatgacctgagcatcgtgaacccagcccggaagggcctgtacgagggaaccggcagactgttcttcgagttttacagactgctgcacgacgcccggcctaaggaaggcgacgaccggcccttcttttggctgttcgagaatgtggtggccatgggagtcagcgacaagcgggatattagccggttcctggagagcaaccccgtgatgatcgatgccaaggaagtgagcgccgcccaccgggccagatacttctggggcaatctgcctggcatgaacagacccctggccagcaccgtgaacgacaagctggagctgcaggagtgcctggagcacggccggatcgccaagttcagcaaggtgagaaccatcaccacccgaagcaacagcatcaaacaaggcaaggaccagcactttcctgtgttcatgaacgagaaggaggacatcctgtggtgtaccgagatggagagagtgttcgggttcccagtccactacacagatgtcagcaacatgtctagactggccagacagagactgctgggaagaagctggtccgtccctgtgatcagacacctgttcgcccctctgaaggagtacttcgcctgcgtgagcagcggcaacagcaacgccaacagccggggccccagcttctctagcggcctggtgccactgtccctgagagggagccacatgggccccatggagatctacaaaaccgtgagcgcctggaagcggcagcctgtgcgcgtgctgagcctgtttcggaatatcgataaagtcctgaaaagcctgggattcctggagagcggctctggctccggcggtggcaccctgaagtacgtggaggatgtgacaaacgtggtcagacgggatgtggagaagtggggccccttcgatctggtgtacggcagcacccaacccctgggcagctcttgtgaccggtgccctggctggtacatgtttcagttccaccggatcctgcagtacgccctgccgagacaggagtcccagcggccattcttttggattttcatggacaacttgctgctgaccgaggatgaccaggaaactaccactcggttcctgcagaccgaagccgtgaccctgcaggacgtgagaggccgggactaccagaacgccatgcgggtgtggtccaacatccctggactgaaaagcaagcacgcacctctgacccctaaagaagaggagtacctgcaggcccaggtgcggagcagaagcaagctggacgcccctaaggtggatctgctggtgaagaattgcctcctgcccctgagagagtacttcaagtatttcagccagaatagtctgcccctgggcggcccaagcagcggcgcccctcctcccagcggcggcagcccagccggctccccaacctctaccgaggagggcacctctgagtccgccacccccgagagcggccctggcacctccaccgagcccagcgagggcagcgcacccggcagccctgccggcagccccacctccacagaggagggaaccagcaccgagcccagcgaaggcagcgccccaggcaccagcaccgagcctagtgagggcggctctggcggcggcagcgcccaggagattaaacggatcaacaagatcagaagaagacttgtgaaagacagcaacaccaagaaggccggcaagacaggccccatgaaaaccctgctggttagagtgatgacacccgatctgagagagcggctggaaaacctgagaaagaagcctgaaaatatcccccagcccatcagcaatacatctagagccaacctgaataagctgctgaccgattacaccgaaatgaagaaggcgatcctgcatgtgtactgggaagagttccagaaggaccctgtgggcctgatgagccgggtggcccagcctgccagcaagaagatcgatcagaacaagctgaaacctgagatggacgagaagggcaacctgaccaccgccggctttgcctgctctcagtgtggccagcccctgttcgtgtacaagctggagcaggtgtctgagaagggcaaggcttacaccaactacttcggacggtgcaatgtggccgagcacgaaaagctgatcctgctggcccagctgaagcccgagaaggatagcgacgaagccgtgacatatagcctgggaaagtttgggcagagggccctggatttctacagcattcatgtgaccaaggagtccacccaccccgtgaagcccctggcccagatcgccggaaacagatacgcctccggacctgtgggaaaggccctgagcgacgcatgtatgggcacaatcgcctccttcctgtctaagtaccaggacatcatcatcgaacaccagaaggtggtgaagggcaaccagaagagactggagagcctgcgggagctggccggcaaggaaaacctggaataccctagcgtgaccctgccacctcagcctcacaccaaggagggcgttgatgcctacaacgaagtgatcgcccgggtgcgaatgtgggtgaacctgaacctgtggcagaagctgaagctaagcagagatgatgccaagcctctgctgagactgaagggattcccttcctttcctctggtcgagagacaggccaacgaagtggactggtgggacatggtgtgtaacgtgaagaagctgatcaacgagaaaaaggaggatggcaaggtgttttggcagaatctggctggctacaagagacaggaagccctgagaccatacctgagcagcgaggaagatcggaagaagggaaagaaattcgctcggtaccagctgggcgacctgctgctgcacctggaaaagaagcacggcgaggactggggaaaggtgtacgacgaggcctgggagcggattgacaagaaagtggaaggcctgagcaagcacatcaagctggaagaggaacggagaagcgaggacgcccagagcaaggccgccctgaccgactggctgcgggctaaggccagcttcgtgatcgagggcctgaaggaggccgacaaggacgagttctgcagatgcgagctgaagctgcagaagtggtacggggacctgcggggaaagcccttcgccatcgaagccgagaacagcatcctggacatcagcggcttcagcaagcagtacaactgtgccttcatctggcagaaggacggcgtgaagaagctgaacctgtacctgatcatcaactacttcaagggcggcaagctgcggttcaagaagatcaaacctgaagccttcgaagccaacagattctacaccgtgatcaacaaaaagagcggcgagatcgtgcccatggaggtgaacttcaacttcgacgaccccaacctgatcatcctgcctctggcctttggcaagagacagggcagagaattcatctggaacgacctgctgtccctggaaaccggcagcctgaagctggccaacggaagagtgatcgagaagacactgtacaacagaagaacccggcaggatgagcctgccctgttcgtggccctgaccttcgagcggcgggaggtcctggactcctccaatatcaaaccaatgaacctgatcggcgtggcaagaggcgaaaacatccccgccgtgatcgccctgaccgaccccgagggctgcccactgagccggtttaaggatagcctgggaaacccaacccacatcctgagaatcggcgagagctataaggagaagcagcggaccatccaggccaagaaggaggtggagcagcggagagccggcggctacagccggaagtacgccagcaaagccaagaatctggcagacgatatggtgagaaacaccgctagagatctgctgtactacgccgtgacccaggatgccatgctgatcttcgccaacctgagccggggcttcggccggcagggcaagcggaccttcatggccgagagacagtacacacggatggaggactggctgaccgccaagctggcctacgagggcctgagcaagacctacctgtccaagacactggcccagtacacctccaagacatgcagcaactgtgggtttaccatcaccagcgccgactacgacagggtgctggagaagctgaagaagacagcaacaggctggatgaccacaattaacggcaaggagctgaaggtggagggccagattacctactacaacagatacaagagacagaacgtagtcaaggacctgtccgtcgagctggatagactgagcgaagaatctgtgaacaacgacatctcctcctggacaaagggcagaagcggagaagctctgagcctcctgaagaaaagattctcccatagacccgtgcaggagaagttcgtgtgcctgaactgcggcttcgagacacacgcagccgagcaagccgccctgaacatcgccagatcctggctgttcctgcggagccaggagtacaagaaataccagacaaacaagacaaccggcaacaccgataagagagccttcgtcgagacctggcagtccttttaccggaagaagcttaaggaggtgtggaaacctgccgtgcggtctggcggatctggcggaggctccacaagcatggacgccgtgaccttcatggacgtgcacgtgaacttcagccaggaggagtgggccctgctgaaccccagccagaagagcctgtacaaggacgtgatgctggagacctactggaacctgacctgcatcggctacgagtgggaggaccacaacagcgaggagtgctgccagagcagcaggaggcacggcaggtacttcaacagcagccagtacagcacctgcaaggccaagggctacggcaagaccagccccaagaaaaagagaaaagtctaagctgccttctgcggggcttgccttctggccatgcccttcttctctcccttgcacctgtacctcttggtctttgaataaagcctgagtaggaaggctagcaaaaaaaaaaaaaaaaaaaaaaaaaaaaaaaaaaaaaaaaaaaaaaaaaaaaaaaaaaaaaaaaaaaaaaaaaaaaaaaa

SEQ ID NO: 7182 - RNA, 5797 nt, synthetic construct
  source 1..5797: mol_type = other RNA
aggaaataagagagaaaagaagagtaagaagaaatataagagccaccatggcccctaagaagaagcgtaaagtgagccggatggaacgcctcgtctacgaggtgcggcagaagtgcagaaacatcgaggacatctgcatctcctgcggatctctgaacgtgaccctggagcacccactgttcatcggcggcatgtgccagaactgtaaaaactgttttctggagtgtgcctatcaatacgacgatgacggctaccagagctactgcaccatctgttgcggcggaagagaggtgctgatgtgtggaaataacaactgctgccggtgcttctgcgtggaatgcgtggacctgctggtgggccccggcgccgcccaggccgctattaaggaagatccttggaactgctacatgtgcggccacaagggcacatacggcctgctgagacggagagaggactggcctagcagactgcagatgttcttcgccaataaccacgaccaggagttcgacccccctaaggtgtaccctcccgtccccgccgagaagagaaagcccatccgggtcctgagcctgttcgatggcatcgccaccggtctgctggtgctgaaggacctgggcatccaggtggataggtacattgcctccgaggtgtgcgaggactccatcaccgtgggaatggtgcgtcatcagggcaagatcatgtacgtgggcgacgtgcggagcgtgacacagaagcatatccaggagtggggccctttcgacctggtgatcggcggcagcccttgcaatgacctgagcatcgtgaacccagcccggaagggcctgtacgagggaaccggcagactgttcttcgagttttacagactgctgcacgacgcccggcctaaggaaggcgacgaccggcccttcttttggctgttcgagaatgtggtggccatgggagtcagcgacaagcgggatattagccggttcctggagagcaaccccgtgatgatcgatgccaaggaagtgagcgccgcccaccgggccagatacttctggggcaatctgcctggcatgaacagacccctggccagcaccgtgaacgacaagctggagctgcaggagtgcctggagcacggccggatcgccaagttcagcaaggtgagaaccatcaccacccgaagcaacagcatcaaacaaggcaaggaccagcactttcctgtgttcatgaacgagaaggaggacatcctgtggtgtaccgagatggagagagtgttcgggttcccagtccactacacagatgtcagcaacatgtctagactggccagacagagactgctgggaagaagctggtccgtccctgtgatcagacacctgttcgcccctctgaaggagtacttcgcctgcgtgagcagcggcaacagcaacgccaacagccggggccccagcttctctagcggcctggtgccactgtccctgagagggagccacatgggccccatggagatctacaaaaccgtgagcgcctggaagcggcagcctgtgcgcgtgctgagcctgtttcggaatatcgataaagtcctgaaaagcctgggattcctggagagcggctctggctccggcggtggcaccctgaagtacgtggaggatgtgacaaacgtggtcagacgggatgtggagaagtggggccccttcgatctggtgtacggcagcacccaacccctgggcagctcttgtgaccggtgccctggctggtacatgtttcagttccaccggatcctgcagtacgccctgccgagacaggagtcccagcggccattcttttggattttcatggacaacttgctgctgaccgaggatgaccaggaaactaccactcggttcctgcagaccgaagccgtgaccctgcaggacgtgagaggccgggactaccagaacgccatgcgggtgtggtccaacatccctggactgaaaagcaagcacgcacctctgacccctaaagaagaggagtacctgcaggcccaggtgcggagcagaagcaagctggacgcccctaaggtggatctgctggtgaagaattgcctcctgcccctgagagagtacttcaagtatttcagccagaatagtctgcccctgggcggcccaagcagcggcgcccctcctcccagcggcggcagcccagccggctccccaacctctaccgaggagggcacctctgagtccgccacccccgagagcggccctggcacctccaccgagcccagcgagggcagcgcacccggcagccctgccggcagccccacctccacagaggagggaaccagcaccgagcccagcgaaggcagcgccccaggcaccagcaccgagcctagtgagggcggctctggcggcggcagcgcccaggagattaaacggatcaacaagatcagaagaagacttgtgaaagacagcaacaccaagaaggccggcaagacaggccccatgaaaaccctgctggttagagtgatgacacccgatctgagagagcggctggaaaacctgagaaagaagcctgaaaatatcccccagcccatcagcaatacatctagagccaacctgaataagctgctgaccgattacaccgaaatgaagaaggcgatcctgcatgtgtactgggaagagttccagaaggaccctgtgggcctgatgagccgggtggcccagcctgccagcaagaagatcgatcagaacaagctgaaacctgagatggacgagaagggcaacctgaccaccgccggctttgcctgctctcagtgtggccagcccctgttcgtgtacaagctggagcaggtgtctgagaagggcaaggcttacaccaactacttcggacggtgcaatgtggccgagcacgaaaagctgatcctgctggcccagctgaagcccgagaaggatagcgacgaagccgtgacatatagcctgggaaagtttgggcagagggccctggatttctacagcattcatgtgaccaaggagtccacccaccccgtgaagcccctggcccagatcgccggaaacagatacgcctccggacctgtgggaaaggccctgagcgacgcatgtatgggcacaatcgcctccttcctgtctaagtaccaggacatcatcatcgaacaccagaaggtggtgaagggcaaccagaagagactggagagcctgcgggagctggccggcaaggaaaacctggaataccctagcgtgaccctgccacctcagcctcacaccaaggagggcgttgatgcctacaacgaagtgatcgcccgggtgcgaatgtgggtgaacctgaacctgtggcagaagctgaagctaagcagagatgatgccaagcctctgctgagactgaagggattcccttcctttcctctggtcgagagacaggccaacgaagtggactggtgggacatggtgtgtaacgtgaagaagctgatcaacgagaaaaaggaggatggcaaggtgttttggcagaatctggctggctacaagagacaggaagccctgagaccatacctgagcagcgaggaagatcggaagaagggaaagaaattcgctcggtaccagctgggcgacctgctgctgcacctggaaaagaagcacggcgaggactggggaaaggtgtacgacgaggcctgggagcggattgacaagaaagtggaaggcctgagcaagcacatcaagctggaagaggaacggagaagcgaggacgcccagagcaaggccgccctgaccgactggctgcgggctaaggccagcttcgtgatcgagggcctgaaggaggccgacaaggacgagttctgcagatgcgagctgaagctgcagaagtggtacggggacctgcggggaaagcccttcgccatcgaagccgagaacagcatcctggacatcagcggcttcagcaagcagtacaactgtgccttcatctggcagaaggacggcgtgaagaagctgaacctgtacctgatcatcaactacttcaagggcggcaagctgcggttcaagaagatcaaacctgaagccttcgaagccaacagattctacaccgtgatcaacaaaaagagcggcgagatcgtgcccatggaggtgaacttcaacttcgacgaccccaacctgatcatcctgcctctggcctttggcaagagacagggcagagaattcatctggaacgacctgctgtccctggaaaccggcagcctgaagctggccaacggaagagtgatcgagaagacactgtacaacagaagaacccggcaggatgagcctgccctgttcgtggccctgaccttcgagcggcgggaggtcctggactcctccaatatcaaaccaatgaacctgatcggcgtggcaagaggcgaaaacatccccgccgtgatcgccctgaccgaccccgagggctgcccactgagccggtttaaggatagcctgggaaacccaacccacatcctgagaatcggcgagagctataaggagaagcagcggaccatccaggccaagaaggaggtggagcagcggagagccggcggctacagccggaagtacgccagcaaagccaagaatctggcagacgatatggtgagaaacaccgctagagatctgctgtactacgccgtgacccaggatgccatgctgatcttcgccaacctgagccggggcttcggccggcagggcaagcggaccttcatggccgagagacagtacacacggatggaggactggctgaccgccaagctggcctacgagggcctgagcaagacctacctgtccaagacactggcccagtacacctccaagacatgcagcaactgtgggtttaccatcaccagcgccgactacgacagggtgctggagaagctgaagaagacagcaacaggctggatgaccacaattaacggcaaggagctgaaggtggagggccagattacctactacaacagatacaagagacagaacgtagtcaaggacctgtccgtcgagctggatagactgagcgaagaatctgtgaacaacgacatctcctcctggacaaagggcagaagcggagaagctctgagcctcctgaagaaaagattctcccatagacccgtgcaggagaagttcgtgtgcctgaactgcggcttcgagacacacgcagccgagcaagccgccctgaacatcgccagatcctggctgttcctgcggagccaggagtacaagaaataccagacaaacaagacaaccggcaacaccgataagagagccttcgtcgagacctggcagtccttttaccggaagaagcttaaggaggtgtggaaacctgccgtgcggtctggcggatctggcggaggctccacaagcttccaggagagcgtgaccttcaaggacgtggccgtggacttcacccaggaggagtgggcccagctggaccccccccagaggaacctgtacagggacgtgatgctggagaactacgagcacttcgtgttcctgggcctgcccgtggccaagcccgaggtgatcagccagctggagaggggcgaggtgcccctgttccccgagcagcccgagttcagcaccagcatctgccccgacagcctgaacaccagccccaagaaaaagagaaaagtctaagctgccttctgcggggcttgccttctggccatgcccttcttctctcccttgcacctgtacctcttggtctttgaataaagcctgagtaggaaggctagcaaaaaaaaaaaaaaaaaaaaaaaaaaaaaaaaaaaaaaaaaaaaaaaaaaaaaaaaaaaaaaaaaaaaaaaaaaaaaaaa

SEQ ID NO: 7183 - RNA, 5797 nt, synthetic construct
  source 1..5797: mol_type = other RNA
aggaaataagagagaaaagaagagtaagaagaaatataagagccaccatggcccctaagaagaagcgtaaagtgagccggatggaacgcctcgtctacgaggtgcggcagaagtgcagaaacatcgaggacatctgcatctcctgcggatctctgaacgtgaccctggagcacccactgttcatcggcggcatgtgccagaactgtaaaaactgttttctggagtgtgcctatcaatacgacgatgacggctaccagagctactgcaccatctgttgcggcggaagagaggtgctgatgtgtggaaataacaactgctgccggtgcttctgcgtggaatgcgtggacctgctggtgggccccggcgccgcccaggccgctattaaggaagatccttggaactgctacatgtgcggccacaagggcacatacggcctgctgagacggagagaggactggcctagcagactgcagatgttcttcgccaataaccacgaccaggagttcgacccccctaaggtgtaccctcccgtccccgccgagaagagaaagcccatccgggtcctgagcctgttcgatggcatcgccaccggtctgctggtgctgaaggacctgggcatccaggtggataggtacattgcctccgaggtgtgcgaggactccatcaccgtgggaatggtgcgtcatcagggcaagatcatgtacgtgggcgacgtgcggagcgtgacacagaagcatatccaggagtggggccctttcgacctggtgatcggcggcagcccttgcaatgacctgagcatcgtgaacccagcccggaagggcctgtacgagggaaccggcagactgttcttcgagttttacagactgctgcacgacgcccggcctaaggaaggcgacgaccggcccttcttttggctgttcgagaatgtggtggccatgggagtcagcgacaagcgggatattagccggttcctggagagcaaccccgtgatgatcgatgccaaggaagtgagcgccgcccaccgggccagatacttctggggcaatctgcctggcatgaacagacccctggccagcaccgtgaacgacaagctggagctgcaggagtgcctggagcacggccggatcgccaagttcagcaaggtgagaaccatcaccacccgaagcaacagcatcaaacaaggcaaggaccagcactttcctgtgttcatgaacgagaaggaggacatcctgtggtgtaccgagatggagagagtgttcgggttcccagtccactacacagatgtcagcaacatgtctagactggccagacagagactgctgggaagaagctggtccgtccctgtgatcagacacctgttcgcccctctgaaggagtacttcgcctgcgtgagcagcggcaacagcaacgccaacagccggggccccagcttctctagcggcctggtgccactgtccctgagagggagccacatgggccccatggagatctacaaaaccgtgagcgcctggaagcggcagcctgtgcgcgtgctgagcctgtttcggaatatcgataaagtcctgaaaagcctgggattcctggagagcggctctggctccggcggtggcaccctgaagtacgtggaggatgtgacaaacgtggtcagacgggatgtggagaagtggggccccttcgatctggtgtacggcagcacccaacccctgggcagctcttgtgaccggtgccctggctggtacatgtttcagttccaccggatcctgcagtacgccctgccgagacaggagtcccagcggccattcttttggattttcatggacaacttgctgctgaccgaggatgaccaggaaactaccactcggttcctgcagaccgaagccgtgaccctgcaggacgtgagaggccgggactaccagaacgccatgcgggtgtggtccaacatccctggactgaaaagcaagcacgcacctctgacccctaaagaagaggagtacctgcaggcccaggtgcggagcagaagcaagctggacgcccctaaggtggatctgctggtgaagaattgcctcctgcccctgagagagtacttcaagtatttcagccagaatagtctgcccctgggcggcccaagcagcggcgcccctcctcccagcggcggcagcccagccggctccccaacctctaccgaggagggcacctctgagtccgccacccccgagagcggccctggcacctccaccgagcccagcgagggcagcgcacccggcagccctgccggcagccccacctccacagaggagggaaccagcaccgagcccagcgaaggcagcgccccaggcaccagcaccgagcctagtgagggcggctctggcggcggcagcgcccaggagattaaacggatcaacaagatcagaagaagacttgtgaaagacagcaacaccaagaaggccggcaagacaggccccatgaaaaccctgctggttagagtgatgacacccgatctgagagagcggctggaaaacctgagaaagaagcctgaaaatatcccccagcccatcagcaatacatctagagccaacctgaataagctgctgaccgattacaccgaaatgaagaaggcgatcctgcatgtgtactgggaagagttccagaaggaccctgtgggcctgatgagccgggtggcccagcctgccagcaagaagatcgatcagaacaagctgaaacctgagatggacgagaagggcaacctgaccaccgccggctttgcctgctctcagtgtggccagcccctgttcgtgtacaagctggagcaggtgtctgagaagggcaaggcttacaccaactacttcggacggtgcaatgtggccgagcacgaaaagctgatcctgctggcccagctgaagcccgagaaggatagcgacgaagccgtgacatatagcctgggaaagtttgggcagagggccctggatttctacagcattcatgtgaccaaggagtccacccaccccgtgaagcccctggcccagatcgccggaaacagatacgcctccggacctgtgggaaaggccctgagcgacgcatgtatgggcacaatcgcctccttcctgtctaagtaccaggacatcatcatcgaacaccagaaggtggtgaagggcaaccagaagagactggagagcctgcgggagctggccggcaaggaaaacctggaataccctagcgtgaccctgccacctcagcctcacaccaaggagggcgttgatgcctacaacgaagtgatcgcccgggtgcgaatgtgggtgaacctgaacctgtggcagaagctgaagctaagcagagatgatgccaagcctctgctgagactgaagggattcccttcctttcctctggtcgagagacaggccaacgaagtggactggtgggacatggtgtgtaacgtgaagaagctgatcaacgagaaaaaggaggatggcaaggtgttttggcagaatctggctggctacaagagacaggaagccctgagaccatacctgagcagcgaggaagatcggaagaagggaaagaaattcgctcggtaccagctgggcgacctgctgctgcacctggaaaagaagcacggcgaggactggggaaaggtgtacgacgaggcctgggagcggattgacaagaaagtggaaggcctgagcaagcacatcaagctggaagaggaacggagaagcgaggacgcccagagcaaggccgccctgaccgactggctgcgggctaaggccagcttcgtgatcgagggcctgaaggaggccgacaaggacgagttctgcagatgcgagctgaagctgcagaagtggtacggggacctgcggggaaagcccttcgccatcgaagccgagaacagcatcctggacatcagcggcttcagcaagcagtacaactgtgccttcatctggcagaaggacggcgtgaagaagctgaacctgtacctgatcatcaactacttcaagggcggcaagctgcggttcaagaagatcaaacctgaagccttcgaagccaacagattctacaccgtgatcaacaaaaagagcggcgagatcgtgcccatggaggtgaacttcaacttcgacgaccccaacctgatcatcctgcctctggcctttggcaagagacagggcagagaattcatctggaacgacctgctgtccctggaaaccggcagcctgaagctggccaacggaagagtgatcgagaagacactgtacaacagaagaacccggcaggatgagcctgccctgttcgtggccctgaccttcgagcggcgggaggtcctggactcctccaatatcaaaccaatgaacctgatcggcgtggcaagaggcgaaaacatccccgccgtgatcgccctgaccgaccccgagggctgcccactgagccggtttaaggatagcctgggaaacccaacccacatcctgagaatcggcgagagctataaggagaagcagcggaccatccaggccaagaaggaggtggagcagcggagagccggcggctacagccggaagtacgccagcaaagccaagaatctggcagacgatatggtgagaaacaccgctagagatctgctgtactacgccgtgacccaggatgccatgctgatcttcgccaacctgagccggggcttcggccggcagggcaagcggaccttcatggccgagagacagtacacacggatggaggactggctgaccgccaagctggcctacgagggcctgagcaagacctacctgtccaagacactggcccagtacacctccaagacatgcagcaactgtgggtttaccatcaccagcgccgactacgacagggtgctggagaagctgaagaagacagcaacaggctggatgaccacaattaacggcaaggagctgaaggtggagggccagattacctactacaacagatacaagagacagaacgtagtcaaggacctgtccgtcgagctggatagactgagcgaagaatctgtgaacaacgacatctcctcctggacaaagggcagaagcggagaagctctgagcctcctgaagaaaagattctcccatagacccgtgcaggagaagttcgtgtgcctgaactgcggcttcgagacacacgcagccgagcaagccgccctgaacatcgccagatcctggctgttcctgcggagccaggagtacaagaaataccagacaaacaagacaaccggcaacaccgataagagagccttcgtcgagacctggcagtccttttaccggaagaagcttaaggaggtgtggaaacctgccgtgcggtctggcggatctggcggaggctccacaagcccccaggccagcgtgaccttcaaggacgtggccgtggacttcacctgggaggagtggaggctgctggaccccagccagaaggagctgttctgggaggtgatgctggagaactacaggaacctggtgtgcctgggcctggccgacagcaacaaggacgtgaggatcagcgagctggagagcggcgagccccactggatccccaccggcggcgtgctgaggagctgctggcccggctgggagagcaccagccccaagaaaaagagaaaagtctaagctgccttctgcggggcttgccttctggccatgcccttcttctctcccttgcacctgtacctcttggtctttgaataaagcctgagtaggaaggctagcaaaaaaaaaaaaaaaaaaaaaaaaaaaaaaaaaaaaaaaaaaaaaaaaaaaaaaaaaaaaaaaaaaaaaaaaaaaaaaaa

SEQ ID NO: 7184 - RNA, 5797 nt, synthetic construct
  source 1..5797: mol_type = other RNA
aggaaataagagagaaaagaagagtaagaagaaatataagagccaccatggcccctaagaagaagcgtaaagtgagccggatggaacgcctcgtctacgaggtgcggcagaagtgcagaaacatcgaggacatctgcatctcctgcggatctctgaacgtgaccctggagcacccactgttcatcggcggcatgtgccagaactgtaaaaactgttttctggagtgtgcctatcaatacgacgatgacggctaccagagctactgcaccatctgttgcggcggaagagaggtgctgatgtgtggaaataacaactgctgccggtgcttctgcgtggaatgcgtggacctgctggtgggccccggcgccgcccaggccgctattaaggaagatccttggaactgctacatgtgcggccacaagggcacatacggcctgctgagacggagagaggactggcctagcagactgcagatgttcttcgccaataaccacgaccaggagttcgacccccctaaggtgtaccctcccgtccccgccgagaagagaaagcccatccgggtcctgagcctgttcgatggcatcgccaccggtctgctggtgctgaaggacctgggcatccaggtggataggtacattgcctccgaggtgtgcgaggactccatcaccgtgggaatggtgcgtcatcagggcaagatcatgtacgtgggcgacgtgcggagcgtgacacagaagcatatccaggagtggggccctttcgacctggtgatcggcggcagcccttgcaatgacctgagcatcgtgaacccagcccggaagggcctgtacgagggaaccggcagactgttcttcgagttttacagactgctgcacgacgcccggcctaaggaaggcgacgaccggcccttcttttggctgttcgagaatgtggtggccatgggagtcagcgacaagcgggatattagccggttcctggagagcaaccccgtgatgatcgatgccaaggaagtgagcgccgcccaccgggccagatacttctggggcaatctgcctggcatgaacagacccctggccagcaccgtgaacgacaagctggagctgcaggagtgcctggagcacggccggatcgccaagttcagcaaggtgagaaccatcaccacccgaagcaacagcatcaaacaaggcaaggaccagcactttcctgtgttcatgaacgagaaggaggacatcctgtggtgtaccgagatggagagagtgttcgggttcccagtccactacacagatgtcagcaacatgtctagactggccagacagagactgctgggaagaagctggtccgtccctgtgatcagacacctgttcgcccctctgaaggagtacttcgcctgcgtgagcagcggcaacagcaacgccaacagccggggccccagcttctctagcggcctggtgccactgtccctgagagggagccacatgggccccatggagatctacaaaaccgtgagcgcctggaagcggcagcctgtgcgcgtgctgagcctgtttcggaatatcgataaagtcctgaaaagcctgggattcctggagagcggctctggctccggcggtggcaccctgaagtacgtggaggatgtgacaaacgtggtcagacgggatgtggagaagtggggccccttcgatctggtgtacggcagcacccaacccctgggcagctcttgtgaccggtgccctggctggtacatgtttcagttccaccggatcctgcagtacgccctgccgagacaggagtcccagcggccattcttttggattttcatggacaacttgctgctgaccgaggatgaccaggaaactaccactcggttcctgcagaccgaagccgtgaccctgcaggacgtgagaggccgggactaccagaacgccatgcgggtgtggtccaacatccctggactgaaaagcaagcacgcacctctgacccctaaagaagaggagtacctgcaggcccaggtgcggagcagaagcaagctggacgcccctaaggtggatctgctggtgaagaattgcctcctgcccctgagagagtacttcaagtatttcagccagaatagtctgcccctgggcggcccaagcagcggcgcccctcctcccagcggcggcagcccagccggctccccaacctctaccgaggagggcacctctgagtccgccacccccgagagcggccctggcacctccaccgagcccagcgagggcagcgcacccggcagccctgccggcagccccacctccacagaggagggaaccagcaccgagcccagcgaaggcagcgccccaggcaccagcaccgagcctagtgagggcggctctggcggcggcagcgcccaggagattaaacggatcaacaagatcagaagaagacttgtgaaagacagcaacaccaagaaggccggcaagacaggccccatgaaaaccctgctggttagagtgatgacacccgatctgagagagcggctggaaaacctgagaaagaagcctgaaaatatcccccagcccatcagcaatacatctagagccaacctgaataagctgctgaccgattacaccgaaatgaagaaggcgatcctgcatgtgtactgggaagagttccagaaggaccctgtgggcctgatgagccgggtggcccagcctgccagcaagaagatcgatcagaacaagctgaaacctgagatggacgagaagggcaacctgaccaccgccggctttgcctgctctcagtgtggccagcccctgttcgtgtacaagctggagcaggtgtctgagaagggcaaggcttacaccaactacttcggacggtgcaatgtggccgagcacgaaaagctgatcctgctggcccagctgaagcccgagaaggatagcgacgaagccgtgacatatagcctgggaaagtttgggcagagggccctggatttctacagcattcatgtgaccaaggagtccacccaccccgtgaagcccctggcccagatcgccggaaacagatacgcctccggacctgtgggaaaggccctgagcgacgcatgtatgggcacaatcgcctccttcctgtctaagtaccaggacatcatcatcgaacaccagaaggtggtgaagggcaaccagaagagactggagagcctgcgggagctggccggcaaggaaaacctggaataccctagcgtgaccctgccacctcagcctcacaccaaggagggcgttgatgcctacaacgaagtgatcgcccgggtgcgaatgtgggtgaacctgaacctgtggcagaagctgaagctaagcagagatgatgccaagcctctgctgagactgaagggattcccttcctttcctctggtcgagagacaggccaacgaagtggactggtgggacatggtgtgtaacgtgaagaagctgatcaacgagaaaaaggaggatggcaaggtgttttggcagaatctggctggctacaagagacaggaagccctgagaccatacctgagcagcgaggaagatcggaagaagggaaagaaattcgctcggtaccagctgggcgacctgctgctgcacctggaaaagaagcacggcgaggactggggaaaggtgtacgacgaggcctgggagcggattgacaagaaagtggaaggcctgagcaagcacatcaagctggaagaggaacggagaagcgaggacgcccagagcaaggccgccctgaccgactggctgcgggctaaggccagcttcgtgatcgagggcctgaaggaggccgacaaggacgagttctgcagatgcgagctgaagctgcagaagtggtacggggacctgcggggaaagcccttcgccatcgaagccgagaacagcatcctggacatcagcggcttcagcaagcagtacaactgtgccttcatctggcagaaggacggcgtgaagaagctgaacctgtacctgatcatcaactacttcaagggcggcaagctgcggttcaagaagatcaaacctgaagccttcgaagccaacagattctacaccgtgatcaacaaaaagagcggcgagatcgtgcccatggaggtgaacttcaacttcgacgaccccaacctgatcatcctgcctctggcctttggcaagagacagggcagagaattcatctggaacgacctgctgtccctggaaaccggcagcctgaagctggccaacggaagagtgatcgagaagacactgtacaacagaagaacccggcaggatgagcctgccctgttcgtggccctgaccttcgagcggcgggaggtcctggactcctccaatatcaaaccaatgaacctgatcggcgtggcaagaggcgaaaacatccccgccgtgatcgccctgaccgaccccgagggctgcccactgagccggtttaaggatagcctgggaaacccaacccacatcctgagaatcggcgagagctataaggagaagcagcggaccatccaggccaagaaggaggtggagcagcggagagccggcggctacagccggaagtacgccagcaaagccaagaatctggcagacgatatggtgagaaacaccgctagagatctgctgtactacgccgtgacccaggatgccatgctgatcttcgccaacctgagccggggcttcggccggcagggcaagcggaccttcatggccgagagacagtacacacggatggaggactggctgaccgccaagctggcctacgagggcctgagcaagacctacctgtccaagacactggcccagtacacctccaagacatgcagcaactgtgggtttaccatcaccagcgccgactacgacagggtgctggagaagctgaagaagacagcaacaggctggatgaccacaattaacggcaaggagctgaaggtggagggccagattacctactacaacagatacaagagacagaacgtagtcaaggacctgtccgtcgagctggatagactgagcgaagaatctgtgaacaacgacatctcctcctggacaaagggcagaagcggagaagctctgagcctcctgaagaaaagattctcccatagacccgtgcaggagaagttcgtgtgcctgaactgcggcttcgagacacacgcagccgagcaagccgccctgaacatcgccagatcctggctgttcctgcggagccaggagtacaagaaataccagacaaacaagacaaccggcaacaccgataagagagccttcgtcgagacctggcagtccttttaccggaagaagcttaaggaggtgtggaaacctgccgtgcggtctggcggatctggcggaggctccacaagcagcaaggacctggtgaccttcggcgacgtggccgtgaacttcagccaggaggagtgggagtggctgaaccccgcccagaggaacctgtacaggagggtgatgctggagaactacaggagcctggtgagcctgggcgtgagcgtgagcaagcccgacgtgatcagcctgctggagcagggcaaggagccctggatggtgaagaaggagggcaccaggggcgcctgccccgactgggagtacgtgaccagccccaagaaaaagagaaaagtctaagctgccttctgcggggcttgccttctggccatgcccttcttctctcccttgcacctgtacctcttggtctttgaataaagcctgagtaggaaggctagcaaaaaaaaaaaaaaaaaaaaaaaaaaaaaaaaaaaaaaaaaaaaaaaaaaaaaaaaaaaaaaaaaaaaaaaaaaaaaaaa

SEQ ID NO: 7185 - RNA, 5797 nt, synthetic construct
  source 1..5797: mol_type = other RNA
aggaaataagagagaaaagaagagtaagaagaaatataagagccaccatggcccctaagaagaagcgtaaagtgagccggatggaacgcctcgtctacgaggtgcggcagaagtgcagaaacatcgaggacatctgcatctcctgcggatctctgaacgtgaccctggagcacccactgttcatcggcggcatgtgccagaactgtaaaaactgttttctggagtgtgcctatcaatacgacgatgacggctaccagagctactgcaccatctgttgcggcggaagagaggtgctgatgtgtggaaataacaactgctgccggtgcttctgcgtggaatgcgtggacctgctggtgggccccggcgccgcccaggccgctattaaggaagatccttggaactgctacatgtgcggccacaagggcacatacggcctgctgagacggagagaggactggcctagcagactgcagatgttcttcgccaataaccacgaccaggagttcgacccccctaaggtgtaccctcccgtccccgccgagaagagaaagcccatccgggtcctgagcctgttcgatggcatcgccaccggtctgctggtgctgaaggacctgggcatccaggtggataggtacattgcctccgaggtgtgcgaggactccatcaccgtgggaatggtgcgtcatcagggcaagatcatgtacgtgggcgacgtgcggagcgtgacacagaagcatatccaggagtggggccctttcgacctggtgatcggcggcagcccttgcaatgacctgagcatcgtgaacccagcccggaagggcctgtacgagggaaccggcagactgttcttcgagttttacagactgctgcacgacgcccggcctaaggaaggcgacgaccggcccttcttttggctgttcgagaatgtggtggccatgggagtcagcgacaagcgggatattagccggttcctggagagcaaccccgtgatgatcgatgccaaggaagtgagcgccgcccaccgggccagatacttctggggcaatctgcctggcatgaacagacccctggccagcaccgtgaacgacaagctggagctgcaggagtgcctggagcacggccggatcgccaagttcagcaaggtgagaaccatcaccacccgaagcaacagcatcaaacaaggcaaggaccagcactttcctgtgttcatgaacgagaaggaggacatcctgtggtgtaccgagatggagagagtgttcgggttcccagtccactacacagatgtcagcaacatgtctagactggccagacagagactgctgggaagaagctggtccgtccctgtgatcagacacctgttcgcccctctgaaggagtacttcgcctgcgtgagcagcggcaacagcaacgccaacagccggggccccagcttctctagcggcctggtgccactgtccctgagagggagccacatgggccccatggagatctacaaaaccgtgagcgcctggaagcggcagcctgtgcgcgtgctgagcctgtttcggaatatcgataaagtcctgaaaagcctgggattcctggagagcggctctggctccggcggtggcaccctgaagtacgtggaggatgtgacaaacgtggtcagacgggatgtggagaagtggggccccttcgatctggtgtacggcagcacccaacccctgggcagctcttgtgaccggtgccctggctggtacatgtttcagttccaccggatcctgcagtacgccctgccgagacaggagtcccagcggccattcttttggattttcatggacaacttgctgctgaccgaggatgaccaggaaactaccactcggttcctgcagaccgaagccgtgaccctgcaggacgtgagaggccgggactaccagaacgccatgcgggtgtggtccaacatccctggactgaaaagcaagcacgcacctctgacccctaaagaagaggagtacctgcaggcccaggtgcggagcagaagcaagctggacgcccctaaggtggatctgctggtgaagaattgcctcctgcccctgagagagtacttcaagtatttcagccagaatagtctgcccctgggcggcccaagcagcggcgcccctcctcccagcggcggcagcccagccggctccccaacctctaccgaggagggcacctctgagtccgccacccccgagagcggccctggcacctccaccgagcccagcgagggcagcgcacccggcagccctgccggcagccccacctccacagaggagggaaccagcaccgagcccagcgaaggcagcgccccaggcaccagcaccgagcctagtgagggcggctctggcggcggcagcgcccaggagattaaacggatcaacaagatcagaagaagacttgtgaaagacagcaacaccaagaaggccggcaagacaggccccatgaaaaccctgctggttagagtgatgacacccgatctgagagagcggctggaaaacctgagaaagaagcctgaaaatatcccccagcccatcagcaatacatctagagccaacctgaataagctgctgaccgattacaccgaaatgaagaaggcgatcctgcatgtgtactgggaagagttccagaaggaccctgtgggcctgatgagccgggtggcccagcctgccagcaagaagatcgatcagaacaagctgaaacctgagatggacgagaagggcaacctgaccaccgccggctttgcctgctctcagtgtggccagcccctgttcgtgtacaagctggagcaggtgtctgagaagggcaaggcttacaccaactacttcggacggtgcaatgtggccgagcacgaaaagctgatcctgctggcccagctgaagcccgagaaggatagcgacgaagccgtgacatatagcctgggaaagtttgggcagagggccctggatttctacagcattcatgtgaccaaggagtccacccaccccgtgaagcccctggcccagatcgccggaaacagatacgcctccggacctgtgggaaaggccctgagcgacgcatgtatgggcacaatcgcctccttcctgtctaagtaccaggacatcatcatcgaacaccagaaggtggtgaagggcaaccagaagagactggagagcctgcgggagctggccggcaaggaaaacctggaataccctagcgtgaccctgccacctcagcctcacaccaaggagggcgttgatgcctacaacgaagtgatcgcccgggtgcgaatgtgggtgaacctgaacctgtggcagaagctgaagctaagcagagatgatgccaagcctctgctgagactgaagggattcccttcctttcctctggtcgagagacaggccaacgaagtggactggtgggacatggtgtgtaacgtgaagaagctgatcaacgagaaaaaggaggatggcaaggtgttttggcagaatctggctggctacaagagacaggaagccctgagaccatacctgagcagcgaggaagatcggaagaagggaaagaaattcgctcggtaccagctgggcgacctgctgctgcacctggaaaagaagcacggcgaggactggggaaaggtgtacgacgaggcctgggagcggattgacaagaaagtggaaggcctgagcaagcacatcaagctggaagaggaacggagaagcgaggacgcccagagcaaggccgccctgaccgactggctgcgggctaaggccagcttcgtgatcgagggcctgaaggaggccgacaaggacgagttctgcagatgcgagctgaagctgcagaagtggtacggggacctgcggggaaagcccttcgccatcgaagccgagaacagcatcctggacatcagcggcttcagcaagcagtacaactgtgccttcatctggcagaaggacggcgtgaagaagctgaacctgtacctgatcatcaactacttcaagggcggcaagctgcggttcaagaagatcaaacctgaagccttcgaagccaacagattctacaccgtgatcaacaaaaagagcggcgagatcgtgcccatggaggtgaacttcaacttcgacgaccccaacctgatcatcctgcctctggcctttggcaagagacagggcagagaattcatctggaacgacctgctgtccctggaaaccggcagcctgaagctggccaacggaagagtgatcgagaagacactgtacaacagaagaacccggcaggatgagcctgccctgttcgtggccctgaccttcgagcggcgggaggtcctggactcctccaatatcaaaccaatgaacctgatcggcgtggcaagaggcgaaaacatccccgccgtgatcgccctgaccgaccccgagggctgcccactgagccggtttaaggatagcctgggaaacccaacccacatcctgagaatcggcgagagctataaggagaagcagcggaccatccaggccaagaaggaggtggagcagcggagagccggcggctacagccggaagtacgccagcaaagccaagaatctggcagacgatatggtgagaaacaccgctagagatctgctgtactacgccgtgacccaggatgccatgctgatcttcgccaacctgagccggggcttcggccggcagggcaagcggaccttcatggccgagagacagtacacacggatggaggactggctgaccgccaagctggcctacgagggcctgagcaagacctacctgtccaagacactggcccagtacacctccaagacatgcagcaactgtgggtttaccatcaccagcgccgactacgacagggtgctggagaagctgaagaagacagcaacaggctggatgaccacaattaacggcaaggagctgaaggtggagggccagattacctactacaacagatacaagagacagaacgtagtcaaggacctgtccgtcgagctggatagactgagcgaagaatctgtgaacaacgacatctcctcctggacaaagggcagaagcggagaagctctgagcctcctgaagaaaagattctcccatagacccgtgcaggagaagttcgtgtgcctgaactgcggcttcgagacacacgcagccgagcaagccgccctgaacatcgccagatcctggctgttcctgcggagccaggagtacaagaaataccagacaaacaagacaaccggcaacaccgataagagagccttcgtcgagacctggcagtccttttaccggaagaagcttaaggaggtgtggaaacctgccgtgcggtctggcggatctggcggaggctccacaagccaggtgcccgtgaccttcgaggacatcaccgtgtacttcagcagggagcagtgggagtacctggacgagggccagaaggagctgtacagggaggtgatgaaggagaactacgagaccctgatcagcctgggcaccggccccgagggcttcaaccccgaggtgctggccaggatcaagctggaggaggagagccacgtgtgggaccccaaggagcccggccagaaggaggtgaccaggagctacaccagccccaagaaaaagagaaaagtctaagctgccttctgcggggcttgccttctggccatgcccttcttctctcccttgcacctgtacctcttggtctttgaataaagcctgagtaggaaggctagcaaaaaaaaaaaaaaaaaaaaaaaaaaaaaaaaaaaaaaaaaaaaaaaaaaaaaaaaaaaaaaaaaaaaaaaaaaaaaaaa

SEQ ID NO: 7186 - RNA, 5797 nt, synthetic construct
  source 1..5797: mol_type = other RNA
aggaaataagagagaaaagaagagtaagaagaaatataagagccaccatggcccctaagaagaagcgtaaagtgagccggatggaacgcctcgtctacgaggtgcggcagaagtgcagaaacatcgaggacatctgcatctcctgcggatctctgaacgtgaccctggagcacccactgttcatcggcggcatgtgccagaactgtaaaaactgttttctggagtgtgcctatcaatacgacgatgacggctaccagagctactgcaccatctgttgcggcggaagagaggtgctgatgtgtggaaataacaactgctgccggtgcttctgcgtggaatgcgtggacctgctggtgggccccggcgccgcccaggccgctattaaggaagatccttggaactgctacatgtgcggccacaagggcacatacggcctgctgagacggagagaggactggcctagcagactgcagatgttcttcgccaataaccacgaccaggagttcgacccccctaaggtgtaccctcccgtccccgccgagaagagaaagcccatccgggtcctgagcctgttcgatggcatcgccaccggtctgctggtgctgaaggacctgggcatccaggtggataggtacattgcctccgaggtgtgcgaggactccatcaccgtgggaatggtgcgtcatcagggcaagatcatgtacgtgggcgacgtgcggagcgtgacacagaagcatatccaggagtggggccctttcgacctggtgatcggcggcagcccttgcaatgacctgagcatcgtgaacccagcccggaagggcctgtacgagggaaccggcagactgttcttcgagttttacagactgctgcacgacgcccggcctaaggaaggcgacgaccggcccttcttttggctgttcgagaatgtggtggccatgggagtcagcgacaagcgggatattagccggttcctggagagcaaccccgtgatgatcgatgccaaggaagtgagcgccgcccaccgggccagatacttctggggcaatctgcctggcatgaacagacccctggccagcaccgtgaacgacaagctggagctgcaggagtgcctggagcacggccggatcgccaagttcagcaaggtgagaaccatcaccacccgaagcaacagcatcaaacaaggcaaggaccagcactttcctgtgttcatgaacgagaaggaggacatcctgtggtgtaccgagatggagagagtgttcgggttcccagtccactacacagatgtcagcaacatgtctagactggccagacagagactgctgggaagaagctggtccgtccctgtgatcagacacctgttcgcccctctgaaggagtacttcgcctgcgtgagcagcggcaacagcaacgccaacagccggggccccagcttctctagcggcctggtgccactgtccctgagagggagccacatgggccccatggagatctacaaaaccgtgagcgcctggaagcggcagcctgtgcgcgtgctgagcctgtttcggaatatcgataaagtcctgaaaagcctgggattcctggagagcggctctggctccggcggtggcaccctgaagtacgtggaggatgtgacaaacgtggtcagacgggatgtggagaagtggggccccttcgatctggtgtacggcagcacccaacccctgggcagctcttgtgaccggtgccctggctggtacatgtttcagttccaccggatcctgcagtacgccctgccgagacaggagtcccagcggccattcttttggattttcatggacaacttgctgctgaccgaggatgaccaggaaactaccactcggttcctgcagaccgaagccgtgaccctgcaggacgtgagaggccgggactaccagaacgccatgcgggtgtggtccaacatccctggactgaaaagcaagcacgcacctctgacccctaaagaagaggagtacctgcaggcccaggtgcggagcagaagcaagctggacgcccctaaggtggatctgctggtgaagaattgcctcctgcccctgagagagtacttcaagtatttcagccagaatagtctgcccctgggcggcccaagcagcggcgcccctcctcccagcggcggcagcccagccggctccccaacctctaccgaggagggcacctctgagtccgccacccccgagagcggccctggcacctccaccgagcccagcgagggcagcgcacccggcagccctgccggcagccccacctccacagaggagggaaccagcaccgagcccagcgaaggcagcgccccaggcaccagcaccgagcctagtgagggcggctctggcggcggcagcgcccaggagattaaacggatcaacaagatcagaagaagacttgtgaaagacagcaacaccaagaaggccggcaagacaggccccatgaaaaccctgctggttagagtgatgacacccgatctgagagagcggctggaaaacctgagaaagaagcctgaaaatatcccccagcccatcagcaatacatctagagccaacctgaataagctgctgaccgattacaccgaaatgaagaaggcgatcctgcatgtgtactgggaagagttccagaaggaccctgtgggcctgatgagccgggtggcccagcctgccagcaagaagatcgatcagaacaagctgaaacctgagatggacgagaagggcaacctgaccaccgccggctttgcctgctctcagtgtggccagcccctgttcgtgtacaagctggagcaggtgtctgagaagggcaaggcttacaccaactacttcggacggtgcaatgtggccgagcacgaaaagctgatcctgctggcccagctgaagcccgagaaggatagcgacgaagccgtgacatatagcctgggaaagtttgggcagagggccctggatttctacagcattcatgtgaccaaggagtccacccaccccgtgaagcccctggcccagatcgccggaaacagatacgcctccggacctgtgggaaaggccctgagcgacgcatgtatgggcacaatcgcctccttcctgtctaagtaccaggacatcatcatcgaacaccagaaggtggtgaagggcaaccagaagagactggagagcctgcgggagctggccggcaaggaaaacctggaataccctagcgtgaccctgccacctcagcctcacaccaaggagggcgttgatgcctacaacgaagtgatcgcccgggtgcgaatgtgggtgaacctgaacctgtggcagaagctgaagctaagcagagatgatgccaagcctctgctgagactgaagggattcccttcctttcctctggtcgagagacaggccaacgaagtggactggtgggacatggtgtgtaacgtgaagaagctgatcaacgagaaaaaggaggatggcaaggtgttttggcagaatctggctggctacaagagacaggaagccctgagaccatacctgagcagcgaggaagatcggaagaagggaaagaaattcgctcggtaccagctgggcgacctgctgctgcacctggaaaagaagcacggcgaggactggggaaaggtgtacgacgaggcctgggagcggattgacaagaaagtggaaggcctgagcaagcacatcaagctggaagaggaacggagaagcgaggacgcccagagcaaggccgccctgaccgactggctgcgggctaaggccagcttcgtgatcgagggcctgaaggaggccgacaaggacgagttctgcagatgcgagctgaagctgcagaagtggtacggggacctgcggggaaagcccttcgccatcgaagccgagaacagcatcctggacatcagcggcttcagcaagcagtacaactgtgccttcatctggcagaaggacggcgtgaagaagctgaacctgtacctgatcatcaactacttcaagggcggcaagctgcggttcaagaagatcaaacctgaagccttcgaagccaacagattctacaccgtgatcaacaaaaagagcggcgagatcgtgcccatggaggtgaacttcaacttcgacgaccccaacctgatcatcctgcctctggcctttggcaagagacagggcagagaattcatctggaacgacctgctgtccctggaaaccggcagcctgaagctggccaacggaagagtgatcgagaagacactgtacaacagaagaacccggcaggatgagcctgccctgttcgtggccctgaccttcgagcggcgggaggtcctggactcctccaatatcaaaccaatgaacctgatcggcgtggcaagaggcgaaaacatccccgccgtgatcgccctgaccgaccccgagggctgcccactgagccggtttaaggatagcctgggaaacccaacccacatcctgagaatcggcgagagctataaggagaagcagcggaccatccaggccaagaaggaggtggagcagcggagagccggcggctacagccggaagtacgccagcaaagccaagaatctggcagacgatatggtgagaaacaccgctagagatctgctgtactacgccgtgacccaggatgccatgctgatcttcgccaacctgagccggggcttcggccggcagggcaagcggaccttcatggccgagagacagtacacacggatggaggactggctgaccgccaagctggcctacgagggcctgagcaagacctacctgtccaagacactggcccagtacacctccaagacatgcagcaactgtgggtttaccatcaccagcgccgactacgacagggtgctggagaagctgaagaagacagcaacaggctggatgaccacaattaacggcaaggagctgaaggtggagggccagattacctactacaacagatacaagagacagaacgtagtcaaggacctgtccgtcgagctggatagactgagcgaagaatctgtgaacaacgacatctcctcctggacaaagggcagaagcggagaagctctgagcctcctgaagaaaagattctcccatagacccgtgcaggagaagttcgtgtgcctgaactgcggcttcgagacacacgcagccgagcaagccgccctgaacatcgccagatcctggctgttcctgcggagccaggagtacaagaaataccagacaaacaagacaaccggcaacaccgataagagagccttcgtcgagacctggcagtccttttaccggaagaagcttaaggaggtgtggaaacctgccgtgcggtctggcggatctggcggaggctccacaagcttccagggcagcgtgatgttcagggacgtgagcatcaacttcagccaggaggagtgggagtgcctggaccccggccagatgaacctgtacaaggaggtgatgctggagaacttcagcaacctggtgagcgtgggcctgagcagcgccaagcccgtggtgatcagcctgctggaggagggcaaggagccctggatggtggagagggaggtgaagaggggcctgtgcagcgacctggagagcatgaccagccccaagaaaaagagaaaagtctaagctgccttctgcggggcttgccttctggccatgcccttcttctctcccttgcacctgtacctcttggtctttgaataaagcctgagtaggaaggctagcaaaaaaaaaaaaaaaaaaaaaaaaaaaaaaaaaaaaaaaaaaaaaaaaaaaaaaaaaaaaaaaaaaaaaaaaaaaaaaaa

SEQ ID NO: 7187 - RNA, 5797 nt, synthetic construct
  source 1..5797: mol_type = other RNA
aggaaataagagagaaaagaagagtaagaagaaatataagagccaccatggcccctaagaagaagcgtaaagtgagccggatggaacgcctcgtctacgaggtgcggcagaagtgcagaaacatcgaggacatctgcatctcctgcggatctctgaacgtgaccctggagcacccactgttcatcggcggcatgtgccagaactgtaaaaactgttttctggagtgtgcctatcaatacgacgatgacggctaccagagctactgcaccatctgttgcggcggaagagaggtgctgatgtgtggaaataacaactgctgccggtgcttctgcgtggaatgcgtggacctgctggtgggccccggcgccgcccaggccgctattaaggaagatccttggaactgctacatgtgcggccacaagggcacatacggcctgctgagacggagagaggactggcctagcagactgcagatgttcttcgccaataaccacgaccaggagttcgacccccctaaggtgtaccctcccgtccccgccgagaagagaaagcccatccgggtcctgagcctgttcgatggcatcgccaccggtctgctggtgctgaaggacctgggcatccaggtggataggtacattgcctccgaggtgtgcgaggactccatcaccgtgggaatggtgcgtcatcagggcaagatcatgtacgtgggcgacgtgcggagcgtgacacagaagcatatccaggagtggggccctttcgacctggtgatcggcggcagcccttgcaatgacctgagcatcgtgaacccagcccggaagggcctgtacgagggaaccggcagactgttcttcgagttttacagactgctgcacgacgcccggcctaaggaaggcgacgaccggcccttcttttggctgttcgagaatgtggtggccatgggagtcagcgacaagcgggatattagccggttcctggagagcaaccccgtgatgatcgatgccaaggaagtgagcgccgcccaccgggccagatacttctggggcaatctgcctggcatgaacagacccctggccagcaccgtgaacgacaagctggagctgcaggagtgcctggagcacggccggatcgccaagttcagcaaggtgagaaccatcaccacccgaagcaacagcatcaaacaaggcaaggaccagcactttcctgtgttcatgaacgagaaggaggacatcctgtggtgtaccgagatggagagagtgttcgggttcccagtccactacacagatgtcagcaacatgtctagactggccagacagagactgctgggaagaagctggtccgtccctgtgatcagacacctgttcgcccctctgaaggagtacttcgcctgcgtgagcagcggcaacagcaacgccaacagccggggccccagcttctctagcggcctggtgccactgtccctgagagggagccacatgggccccatggagatctacaaaaccgtgagcgcctggaagcggcagcctgtgcgcgtgctgagcctgtttcggaatatcgataaagtcctgaaaagcctgggattcctggagagcggctctggctccggcggtggcaccctgaagtacgtggaggatgtgacaaacgtggtcagacgggatgtggagaagtggggccccttcgatctggtgtacggcagcacccaacccctgggcagctcttgtgaccggtgccctggctggtacatgtttcagttccaccggatcctgcagtacgccctgccgagacaggagtcccagcggccattcttttggattttcatggacaacttgctgctgaccgaggatgaccaggaaactaccactcggttcctgcagaccgaagccgtgaccctgcaggacgtgagaggccgggactaccagaacgccatgcgggtgtggtccaacatccctggactgaaaagcaagcacgcacctctgacccctaaagaagaggagtacctgcaggcccaggtgcggagcagaagcaagctggacgcccctaaggtggatctgctggtgaagaattgcctcctgcccctgagagagtacttcaagtatttcagccagaatagtctgcccctgggcggcccaagcagcggcgcccctcctcccagcggcggcagcccagccggctccccaacctctaccgaggagggcacctctgagtccgccacccccgagagcggccctggcacctccaccgagcccagcgagggcagcgcacccggcagccctgccggcagccccacctccacagaggagggaaccagcaccgagcccagcgaaggcagcgccccaggcaccagcaccgagcctagtgagggcggctctggcggcggcagcgcccaggagattaaacggatcaacaagatcagaagaagacttgtgaaagacagcaacaccaagaaggccggcaagacaggccccatgaaaaccctgctggttagagtgatgacacccgatctgagagagcggctggaaaacctgagaaagaagcctgaaaatatcccccagcccatcagcaatacatctagagccaacctgaataagctgctgaccgattacaccgaaatgaagaaggcgatcctgcatgtgtactgggaagagttccagaaggaccctgtgggcctgatgagccgggtggcccagcctgccagcaagaagatcgatcagaacaagctgaaacctgagatggacgagaagggcaacctgaccaccgccggctttgcctgctctcagtgtggccagcccctgttcgtgtacaagctggagcaggtgtctgagaagggcaaggcttacaccaactacttcggacggtgcaatgtggccgagcacgaaaagctgatcctgctggcccagctgaagcccgagaaggatagcgacgaagccgtgacatatagcctgggaaagtttgggcagagggccctggatttctacagcattcatgtgaccaaggagtccacccaccccgtgaagcccctggcccagatcgccggaaacagatacgcctccggacctgtgggaaaggccctgagcgacgcatgtatgggcacaatcgcctccttcctgtctaagtaccaggacatcatcatcgaacaccagaaggtggtgaagggcaaccagaagagactggagagcctgcgggagctggccggcaaggaaaacctggaataccctagcgtgaccctgccacctcagcctcacaccaaggagggcgttgatgcctacaacgaagtgatcgcccgggtgcgaatgtgggtgaacctgaacctgtggcagaagctgaagctaagcagagatgatgccaagcctctgctgagactgaagggattcccttcctttcctctggtcgagagacaggccaacgaagtggactggtgggacatggtgtgtaacgtgaagaagctgatcaacgagaaaaaggaggatggcaaggtgttttggcagaatctggctggctacaagagacaggaagccctgagaccatacctgagcagcgaggaagatcggaagaagggaaagaaattcgctcggtaccagctgggcgacctgctgctgcacctggaaaagaagcacggcgaggactggggaaaggtgtacgacgaggcctgggagcggattgacaagaaagtggaaggcctgagcaagcacatcaagctggaagaggaacggagaagcgaggacgcccagagcaaggccgccctgaccgactggctgcgggctaaggccagcttcgtgatcgagggcctgaaggaggccgacaaggacgagttctgcagatgcgagctgaagctgcagaagtggtacggggacctgcggggaaagcccttcgccatcgaagccgagaacagcatcctggacatcagcggcttcagcaagcagtacaactgtgccttcatctggcagaaggacggcgtgaagaagctgaacctgtacctgatcatcaactacttcaagggcggcaagctgcggttcaagaagatcaaacctgaagccttcgaagccaacagattctacaccgtgatcaacaaaaagagcggcgagatcgtgcccatggaggtgaacttcaacttcgacgaccccaacctgatcatcctgcctctggcctttggcaagagacagggcagagaattcatctggaacgacctgctgtccctggaaaccggcagcctgaagctggccaacggaagagtgatcgagaagacactgtacaacagaagaacccggcaggatgagcctgccctgttcgtggccctgaccttcgagcggcgggaggtcctggactcctccaatatcaaaccaatgaacctgatcggcgtggcaagaggcgaaaacatccccgccgtgatcgccctgaccgaccccgagggctgcccactgagccggtttaaggatagcctgggaaacccaacccacatcctgagaatcggcgagagctataaggagaagcagcggaccatccaggccaagaaggaggtggagcagcggagagccggcggctacagccggaagtacgccagcaaagccaagaatctggcagacgatatggtgagaaacaccgctagagatctgctgtactacgccgtgacccaggatgccatgctgatcttcgccaacctgagccggggcttcggccggcagggcaagcggaccttcatggccgagagacagtacacacggatggaggactggctgaccgccaagctggcctacgagggcctgagcaagacctacctgtccaagacactggcccagtacacctccaagacatgcagcaactgtgggtttaccatcaccagcgccgactacgacagggtgctggagaagctgaagaagacagcaacaggctggatgaccacaattaacggcaaggagctgaaggtggagggccagattacctactacaacagatacaagagacagaacgtagtcaaggacctgtccgtcgagctggatagactgagcgaagaatctgtgaacaacgacatctcctcctggacaaagggcagaagcggagaagctctgagcctcctgaagaaaagattctcccatagacccgtgcaggagaagttcgtgtgcctgaactgcggcttcgagacacacgcagccgagcaagccgccctgaacatcgccagatcctggctgttcctgcggagccaggagtacaagaaataccagacaaacaagacaaccggcaacaccgataagagagccttcgtcgagacctggcagtccttttaccggaagaagcttaaggaggtgtggaaacctgccgtgcggtctggcggatctggcggaggctccacaagcctgcagggcggcgtgaccttcgaggacgtggccgtggacttcacccaggaggagtggcagcagctgagccccgagcagaggggcctgtacagggacgtgaccctggagaactacaggaacctggccagcatgggcggcgaggacttcgccaagcccgaggtgatcctgaggctggagaacggcgaggagccctggatggtggagacccaggtgctgaggagctgcggccccgccgagaaggacaccagccccaagaaaaagagaaaagtctaagctgccttctgcggggcttgccttctggccatgcccttcttctctcccttgcacctgtacctcttggtctttgaataaagcctgagtaggaaggctagcaaaaaaaaaaaaaaaaaaaaaaaaaaaaaaaaaaaaaaaaaaaaaaaaaaaaaaaaaaaaaaaaaaaaaaaaaaaaaaaa

SEQ ID NO: 7188 - RNA, 5797 nt, synthetic construct
  source 1..5797: mol_type = other RNA
aggaaataagagagaaaagaagagtaagaagaaatataagagccaccatggcccctaagaagaagcgtaaagtgagccggatggaacgcctcgtctacgaggtgcggcagaagtgcagaaacatcgaggacatctgcatctcctgcggatctctgaacgtgaccctggagcacccactgttcatcggcggcatgtgccagaactgtaaaaactgttttctggagtgtgcctatcaatacgacgatgacggctaccagagctactgcaccatctgttgcggcggaagagaggtgctgatgtgtggaaataacaactgctgccggtgcttctgcgtggaatgcgtggacctgctggtgggccccggcgccgcccaggccgctattaaggaagatccttggaactgctacatgtgcggccacaagggcacatacggcctgctgagacggagagaggactggcctagcagactgcagatgttcttcgccaataaccacgaccaggagttcgacccccctaaggtgtaccctcccgtccccgccgagaagagaaagcccatccgggtcctgagcctgttcgatggcatcgccaccggtctgctggtgctgaaggacctgggcatccaggtggataggtacattgcctccgaggtgtgcgaggactccatcaccgtgggaatggtgcgtcatcagggcaagatcatgtacgtgggcgacgtgcggagcgtgacacagaagcatatccaggagtggggccctttcgacctggtgatcggcggcagcccttgcaatgacctgagcatcgtgaacccagcccggaagggcctgtacgagggaaccggcagactgttcttcgagttttacagactgctgcacgacgcccggcctaaggaaggcgacgaccggcccttcttttggctgttcgagaatgtggtggccatgggagtcagcgacaagcgggatattagccggttcctggagagcaaccccgtgatgatcgatgccaaggaagtgagcgccgcccaccgggccagatacttctggggcaatctgcctggcatgaacagacccctggccagcaccgtgaacgacaagctggagctgcaggagtgcctggagcacggccggatcgccaagttcagcaaggtgagaaccatcaccacccgaagcaacagcatcaaacaaggcaaggaccagcactttcctgtgttcatgaacgagaaggaggacatcctgtggtgtaccgagatggagagagtgttcgggttcccagtccactacacagatgtcagcaacatgtctagactggccagacagagactgctgggaagaagctggtccgtccctgtgatcagacacctgttcgcccctctgaaggagtacttcgcctgcgtgagcagcggcaacagcaacgccaacagccggggccccagcttctctagcggcctggtgccactgtccctgagagggagccacatgggccccatggagatctacaaaaccgtgagcgcctggaagcggcagcctgtgcgcgtgctgagcctgtttcggaatatcgataaagtcctgaaaagcctgggattcctggagagcggctctggctccggcggtggcaccctgaagtacgtggaggatgtgacaaacgtggtcagacgggatgtggagaagtggggccccttcgatctggtgtacggcagcacccaacccctgggcagctcttgtgaccggtgccctggctggtacatgtttcagttccaccggatcctgcagtacgccctgccgagacaggagtcccagcggccattcttttggattttcatggacaacttgctgctgaccgaggatgaccaggaaactaccactcggttcctgcagaccgaagccgtgaccctgcaggacgtgagaggccgggactaccagaacgccatgcgggtgtggtccaacatccctggactgaaaagcaagcacgcacctctgacccctaaagaagaggagtacctgcaggcccaggtgcggagcagaagcaagctggacgcccctaaggtggatctgctggtgaagaattgcctcctgcccctgagagagtacttcaagtatttcagccagaatagtctgcccctgggcggcccaagcagcggcgcccctcctcccagcggcggcagcccagccggctccccaacctctaccgaggagggcacctctgagtccgccacccccgagagcggccctggcacctccaccgagcccagcgagggcagcgcacccggcagccctgccggcagccccacctccacagaggagggaaccagcaccgagcccagcgaaggcagcgccccaggcaccagcaccgagcctagtgagggcggctctggcggcggcagcgcccaggagattaaacggatcaacaagatcagaagaagacttgtgaaagacagcaacaccaagaaggccggcaagacaggccccatgaaaaccctgctggttagagtgatgacacccgatctgagagagcggctggaaaacctgagaaagaagcctgaaaatatcccccagcccatcagcaatacatctagagccaacctgaataagctgctgaccgattacaccgaaatgaagaaggcgatcctgcatgtgtactgggaagagttccagaaggaccctgtgggcctgatgagccgggtggcccagcctgccagcaagaagatcgatcagaacaagctgaaacctgagatggacgagaagggcaacctgaccaccgccggctttgcctgctctcagtgtggccagcccctgttcgtgtacaagctggagcaggtgtctgagaagggcaaggcttacaccaactacttcggacggtgcaatgtggccgagcacgaaaagctgatcctgctggcccagctgaagcccgagaaggatagcgacgaagccgtgacatatagcctgggaaagtttgggcagagggccctggatttctacagcattcatgtgaccaaggagtccacccaccccgtgaagcccctggcccagatcgccggaaacagatacgcctccggacctgtgggaaaggccctgagcgacgcatgtatgggcacaatcgcctccttcctgtctaagtaccaggacatcatcatcgaacaccagaaggtggtgaagggcaaccagaagagactggagagcctgcgggagctggccggcaaggaaaacctggaataccctagcgtgaccctgccacctcagcctcacaccaaggagggcgttgatgcctacaacgaagtgatcgcccgggtgcgaatgtgggtgaacctgaacctgtggcagaagctgaagctaagcagagatgatgccaagcctctgctgagactgaagggattcccttcctttcctctggtcgagagacaggccaacgaagtggactggtgggacatggtgtgtaacgtgaagaagctgatcaacgagaaaaaggaggatggcaaggtgttttggcagaatctggctggctacaagagacaggaagccctgagaccatacctgagcagcgaggaagatcggaagaagggaaagaaattcgctcggtaccagctgggcgacctgctgctgcacctggaaaagaagcacggcgaggactggggaaaggtgtacgacgaggcctgggagcggattgacaagaaagtggaaggcctgagcaagcacatcaagctggaagaggaacggagaagcgaggacgcccagagcaaggccgccctgaccgactggctgcgggctaaggccagcttcgtgatcgagggcctgaaggaggccgacaaggacgagttctgcagatgcgagctgaagctgcagaagtggtacggggacctgcggggaaagcccttcgccatcgaagccgagaacagcatcctggacatcagcggcttcagcaagcagtacaactgtgccttcatctggcagaaggacggcgtgaagaagctgaacctgtacctgatcatcaactacttcaagggcggcaagctgcggttcaagaagatcaaacctgaagccttcgaagccaacagattctacaccgtgatcaacaaaaagagcggcgagatcgtgcccatggaggtgaacttcaacttcgacgaccccaacctgatcatcctgcctctggcctttggcaagagacagggcagagaattcatctggaacgacctgctgtccctggaaaccggcagcctgaagctggccaacggaagagtgatcgagaagacactgtacaacagaagaacccggcaggatgagcctgccctgttcgtggccctgaccttcgagcggcgggaggtcctggactcctccaatatcaaaccaatgaacctgatcggcgtggcaagaggcgaaaacatccccgccgtgatcgccctgaccgaccccgagggctgcccactgagccggtttaaggatagcctgggaaacccaacccacatcctgagaatcggcgagagctataaggagaagcagcggaccatccaggccaagaaggaggtggagcagcggagagccggcggctacagccggaagtacgccagcaaagccaagaatctggcagacgatatggtgagaaacaccgctagagatctgctgtactacgccgtgacccaggatgccatgctgatcttcgccaacctgagccggggcttcggccggcagggcaagcggaccttcatggccgagagacagtacacacggatggaggactggctgaccgccaagctggcctacgagggcctgagcaagacctacctgtccaagacactggcccagtacacctccaagacatgcagcaactgtgggtttaccatcaccagcgccgactacgacagggtgctggagaagctgaagaagacagcaacaggctggatgaccacaattaacggcaaggagctgaaggtggagggccagattacctactacaacagatacaagagacagaacgtagtcaaggacctgtccgtcgagctggatagactgagcgaagaatctgtgaacaacgacatctcctcctggacaaagggcagaagcggagaagctctgagcctcctgaagaaaagattctcccatagacccgtgcaggagaagttcgtgtgcctgaactgcggcttcgagacacacgcagccgagcaagccgccctgaacatcgccagatcctggctgttcctgcggagccaggagtacaagaaataccagacaaacaagacaaccggcaacaccgataagagagccttcgtcgagacctggcagtccttttaccggaagaagcttaaggaggtgtggaaacctgccgtgcggtctggcggatctggcggaggctccacaagcatggccgccgccgccctgagggaccccgcccagcagggctacgtgaccttcgaggacgtggccgtgtacttcagccaggaggagtggaggctgctggacgaggcccagaagctgctgtacaggaacgtgatgctggagaacttcagcctgctggccagcctgggcctggccagcagcaagacccacgagatcacccagctggagagctgggaggagcccttcatgcccgcctgggaggtggtgaccagccccaagaaaaagagaaaagtctaagctgccttctgcggggcttgccttctggccatgcccttcttctctcccttgcacctgtacctcttggtctttgaataaagcctgagtaggaaggctagcaaaaaaaaaaaaaaaaaaaaaaaaaaaaaaaaaaaaaaaaaaaaaaaaaaaaaaaaaaaaaaaaaaaaaaaaaaaaaaaa

SEQ ID NO: 7189 - RNA, 5797 nt, synthetic construct
  source 1..5797: mol_type = other RNA
aggaaataagagagaaaagaagagtaagaagaaatataagagccaccatggcccctaagaagaagcgtaaagtgagccggatggaacgcctcgtctacgaggtgcggcagaagtgcagaaacatcgaggacatctgcatctcctgcggatctctgaacgtgaccctggagcacccactgttcatcggcggcatgtgccagaactgtaaaaactgttttctggagtgtgcctatcaatacgacgatgacggctaccagagctactgcaccatctgttgcggcggaagagaggtgctgatgtgtggaaataacaactgctgccggtgcttctgcgtggaatgcgtggacctgctggtgggccccggcgccgcccaggccgctattaaggaagatccttggaactgctacatgtgcggccacaagggcacatacggcctgctgagacggagagaggactggcctagcagactgcagatgttcttcgccaataaccacgaccaggagttcgacccccctaaggtgtaccctcccgtccccgccgagaagagaaagcccatccgggtcctgagcctgttcgatggcatcgccaccggtctgctggtgctgaaggacctgggcatccaggtggataggtacattgcctccgaggtgtgcgaggactccatcaccgtgggaatggtgcgtcatcagggcaagatcatgtacgtgggcgacgtgcggagcgtgacacagaagcatatccaggagtggggccctttcgacctggtgatcggcggcagcccttgcaatgacctgagcatcgtgaacccagcccggaagggcctgtacgagggaaccggcagactgttcttcgagttttacagactgctgcacgacgcccggcctaaggaaggcgacgaccggcccttcttttggctgttcgagaatgtggtggccatgggagtcagcgacaagcgggatattagccggttcctggagagcaaccccgtgatgatcgatgccaaggaagtgagcgccgcccaccgggccagatacttctggggcaatctgcctggcatgaacagacccctggccagcaccgtgaacgacaagctggagctgcaggagtgcctggagcacggccggatcgccaagttcagcaaggtgagaaccatcaccacccgaagcaacagcatcaaacaaggcaaggaccagcactttcctgtgttcatgaacgagaaggaggacatcctgtggtgtaccgagatggagagagtgttcgggttcccagtccactacacagatgtcagcaacatgtctagactggccagacagagactgctgggaagaagctggtccgtccctgtgatcagacacctgttcgcccctctgaaggagtacttcgcctgcgtgagcagcggcaacagcaacgccaacagccggggccccagcttctctagcggcctggtgccactgtccctgagagggagccacatgggccccatggagatctacaaaaccgtgagcgcctggaagcggcagcctgtgcgcgtgctgagcctgtttcggaatatcgataaagtcctgaaaagcctgggattcctggagagcggctctggctccggcggtggcaccctgaagtacgtggaggatgtgacaaacgtggtcagacgggatgtggagaagtggggccccttcgatctggtgtacggcagcacccaacccctgggcagctcttgtgaccggtgccctggctggtacatgtttcagttccaccggatcctgcagtacgccctgccgagacaggagtcccagcggccattcttttggattttcatggacaacttgctgctgaccgaggatgaccaggaaactaccactcggttcctgcagaccgaagccgtgaccctgcaggacgtgagaggccgggactaccagaacgccatgcgggtgtggtccaacatccctggactgaaaagcaagcacgcacctctgacccctaaagaagaggagtacctgcaggcccaggtgcggagcagaagcaagctggacgcccctaaggtggatctgctggtgaagaattgcctcctgcccctgagagagtacttcaagtatttcagccagaatagtctgcccctgggcggcccaagcagcggcgcccctcctcccagcggcggcagcccagccggctccccaacctctaccgaggagggcacctctgagtccgccacccccgagagcggccctggcacctccaccgagcccagcgagggcagcgcacccggcagccctgccggcagccccacctccacagaggagggaaccagcaccgagcccagcgaaggcagcgccccaggcaccagcaccgagcctagtgagggcggctctggcggcggcagcgcccaggagattaaacggatcaacaagatcagaagaagacttgtgaaagacagcaacaccaagaaggccggcaagacaggccccatgaaaaccctgctggttagagtgatgacacccgatctgagagagcggctggaaaacctgagaaagaagcctgaaaatatcccccagcccatcagcaatacatctagagccaacctgaataagctgctgaccgattacaccgaaatgaagaaggcgatcctgcatgtgtactgggaagagttccagaaggaccctgtgggcctgatgagccgggtggcccagcctgccagcaagaagatcgatcagaacaagctgaaacctgagatggacgagaagggcaacctgaccaccgccggctttgcctgctctcagtgtggccagcccctgttcgtgtacaagctggagcaggtgtctgagaagggcaaggcttacaccaactacttcggacggtgcaatgtggccgagcacgaaaagctgatcctgctggcccagctgaagcccgagaaggatagcgacgaagccgtgacatatagcctgggaaagtttgggcagagggccctggatttctacagcattcatgtgaccaaggagtccacccaccccgtgaagcccctggcccagatcgccggaaacagatacgcctccggacctgtgggaaaggccctgagcgacgcatgtatgggcacaatcgcctccttcctgtctaagtaccaggacatcatcatcgaacaccagaaggtggtgaagggcaaccagaagagactggagagcctgcgggagctggccggcaaggaaaacctggaataccctagcgtgaccctgccacctcagcctcacaccaaggagggcgttgatgcctacaacgaagtgatcgcccgggtgcgaatgtgggtgaacctgaacctgtggcagaagctgaagctaagcagagatgatgccaagcctctgctgagactgaagggattcccttcctttcctctggtcgagagacaggccaacgaagtggactggtgggacatggtgtgtaacgtgaagaagctgatcaacgagaaaaaggaggatggcaaggtgttttggcagaatctggctggctacaagagacaggaagccctgagaccatacctgagcagcgaggaagatcggaagaagggaaagaaattcgctcggtaccagctgggcgacctgctgctgcacctggaaaagaagcacggcgaggactggggaaaggtgtacgacgaggcctgggagcggattgacaagaaagtggaaggcctgagcaagcacatcaagctggaagaggaacggagaagcgaggacgcccagagcaaggccgccctgaccgactggctgcgggctaaggccagcttcgtgatcgagggcctgaaggaggccgacaaggacgagttctgcagatgcgagctgaagctgcagaagtggtacggggacctgcggggaaagcccttcgccatcgaagccgagaacagcatcctggacatcagcggcttcagcaagcagtacaactgtgccttcatctggcagaaggacggcgtgaagaagctgaacctgtacctgatcatcaactacttcaagggcggcaagctgcggttcaagaagatcaaacctgaagccttcgaagccaacagattctacaccgtgatcaacaaaaagagcggcgagatcgtgcccatggaggtgaacttcaacttcgacgaccccaacctgatcatcctgcctctggcctttggcaagagacagggcagagaattcatctggaacgacctgctgtccctggaaaccggcagcctgaagctggccaacggaagagtgatcgagaagacactgtacaacagaagaacccggcaggatgagcctgccctgttcgtggccctgaccttcgagcggcgggaggtcctggactcctccaatatcaaaccaatgaacctgatcggcgtggcaagaggcgaaaacatccccgccgtgatcgccctgaccgaccccgagggctgcccactgagccggtttaaggatagcctgggaaacccaacccacatcctgagaatcggcgagagctataaggagaagcagcggaccatccaggccaagaaggaggtggagcagcggagagccggcggctacagccggaagtacgccagcaaagccaagaatctggcagacgatatggtgagaaacaccgctagagatctgctgtactacgccgtgacccaggatgccatgctgatcttcgccaacctgagccggggcttcggccggcagggcaagcggaccttcatggccgagagacagtacacacggatggaggactggctgaccgccaagctggcctacgagggcctgagcaagacctacctgtccaagacactggcccagtacacctccaagacatgcagcaactgtgggtttaccatcaccagcgccgactacgacagggtgctggagaagctgaagaagacagcaacaggctggatgaccacaattaacggcaaggagctgaaggtggagggccagattacctactacaacagatacaagagacagaacgtagtcaaggacctgtccgtcgagctggatagactgagcgaagaatctgtgaacaacgacatctcctcctggacaaagggcagaagcggagaagctctgagcctcctgaagaaaagattctcccatagacccgtgcaggagaagttcgtgtgcctgaactgcggcttcgagacacacgcagccgagcaagccgccctgaacatcgccagatcctggctgttcctgcggagccaggagtacaagaaataccagacaaacaagacaaccggcaacaccgataagagagccttcgtcgagacctggcagtccttttaccggaagaagcttaaggaggtgtggaaacctgccgtgcggtctggcggatctggcggaggctccacaagcgagatggagcccctgaccttcagggacgtggccatcgagttcagcctggaggagtggcagtgcctgaaccccgcccagcaggacctgttcaggaacgtgatgctggagaactacaggaacctggtgttcctgggcatcgccgccagcaagcccgacctgatcacctgcctggagaaggccaaggagccctggaagatgaagcagcacgagatggtggacgagccccccggcgccagcaccttcaccagccccaagaaaaagagaaaagtctaagctgccttctgcggggcttgccttctggccatgcccttcttctctcccttgcacctgtacctcttggtctttgaataaagcctgagtaggaaggctagcaaaaaaaaaaaaaaaaaaaaaaaaaaaaaaaaaaaaaaaaaaaaaaaaaaaaaaaaaaaaaaaaaaaaaaaaaaaaaaaa

SEQ ID NO: 7190 - RNA, 5797 nt, synthetic construct
  source 1..5797: mol_type = other RNA
aggaaataagagagaaaagaagagtaagaagaaatataagagccaccatggcccctaagaagaagcgtaaagtgagccggatggaacgcctcgtctacgaggtgcggcagaagtgcagaaacatcgaggacatctgcatctcctgcggatctctgaacgtgaccctggagcacccactgttcatcggcggcatgtgccagaactgtaaaaactgttttctggagtgtgcctatcaatacgacgatgacggctaccagagctactgcaccatctgttgcggcggaagagaggtgctgatgtgtggaaataacaactgctgccggtgcttctgcgtggaatgcgtggacctgctggtgggccccggcgccgcccaggccgctattaaggaagatccttggaactgctacatgtgcggccacaagggcacatacggcctgctgagacggagagaggactggcctagcagactgcagatgttcttcgccaataaccacgaccaggagttcgacccccctaaggtgtaccctcccgtccccgccgagaagagaaagcccatccgggtcctgagcctgttcgatggcatcgccaccggtctgctggtgctgaaggacctgggcatccaggtggataggtacattgcctccgaggtgtgcgaggactccatcaccgtgggaatggtgcgtcatcagggcaagatcatgtacgtgggcgacgtgcggagcgtgacacagaagcatatccaggagtggggccctttcgacctggtgatcggcggcagcccttgcaatgacctgagcatcgtgaacccagcccggaagggcctgtacgagggaaccggcagactgttcttcgagttttacagactgctgcacgacgcccggcctaaggaaggcgacgaccggcccttcttttggctgttcgagaatgtggtggccatgggagtcagcgacaagcgggatattagccggttcctggagagcaaccccgtgatgatcgatgccaaggaagtgagcgccgcccaccgggccagatacttctggggcaatctgcctggcatgaacagacccctggccagcaccgtgaacgacaagctggagctgcaggagtgcctggagcacggccggatcgccaagttcagcaaggtgagaaccatcaccacccgaagcaacagcatcaaacaaggcaaggaccagcactttcctgtgttcatgaacgagaaggaggacatcctgtggtgtaccgagatggagagagtgttcgggttcccagtccactacacagatgtcagcaacatgtctagactggccagacagagactgctgggaagaagctggtccgtccctgtgatcagacacctgttcgcccctctgaaggagtacttcgcctgcgtgagcagcggcaacagcaacgccaacagccggggccccagcttctctagcggcctggtgccactgtccctgagagggagccacatgggccccatggagatctacaaaaccgtgagcgcctggaagcggcagcctgtgcgcgtgctgagcctgtttcggaatatcgataaagtcctgaaaagcctgggattcctggagagcggctctggctccggcggtggcaccctgaagtacgtggaggatgtgacaaacgtggtcagacgggatgtggagaagtggggccccttcgatctggtgtacggcagcacccaacccctgggcagctcttgtgaccggtgccctggctggtacatgtttcagttccaccggatcctgcagtacgccctgccgagacaggagtcccagcggccattcttttggattttcatggacaacttgctgctgaccgaggatgaccaggaaactaccactcggttcctgcagaccgaagccgtgaccctgcaggacgtgagaggccgggactaccagaacgccatgcgggtgtggtccaacatccctggactgaaaagcaagcacgcacctctgacccctaaagaagaggagtacctgcaggcccaggtgcggagcagaagcaagctggacgcccctaaggtggatctgctggtgaagaattgcctcctgcccctgagagagtacttcaagtatttcagccagaatagtctgcccctgggcggcccaagcagcggcgcccctcctcccagcggcggcagcccagccggctccccaacctctaccgaggagggcacctctgagtccgccacccccgagagcggccctggcacctccaccgagcccagcgagggcagcgcacccggcagccctgccggcagccccacctccacagaggagggaaccagcaccgagcccagcgaaggcagcgccccaggcaccagcaccgagcctagtgagggcggctctggcggcggcagcgcccaggagattaaacggatcaacaagatcagaagaagacttgtgaaagacagcaacaccaagaaggccggcaagacaggccccatgaaaaccctgctggttagagtgatgacacccgatctgagagagcggctggaaaacctgagaaagaagcctgaaaatatcccccagcccatcagcaatacatctagagccaacctgaataagctgctgaccgattacaccgaaatgaagaaggcgatcctgcatgtgtactgggaagagttccagaaggaccctgtgggcctgatgagccgggtggcccagcctgccagcaagaagatcgatcagaacaagctgaaacctgagatggacgagaagggcaacctgaccaccgccggctttgcctgctctcagtgtggccagcccctgttcgtgtacaagctggagcaggtgtctgagaagggcaaggcttacaccaactacttcggacggtgcaatgtggccgagcacgaaaagctgatcctgctggcccagctgaagcccgagaaggatagcgacgaagccgtgacatatagcctgggaaagtttgggcagagggccctggatttctacagcattcatgtgaccaaggagtccacccaccccgtgaagcccctggcccagatcgccggaaacagatacgcctccggacctgtgggaaaggccctgagcgacgcatgtatgggcacaatcgcctccttcctgtctaagtaccaggacatcatcatcgaacaccagaaggtggtgaagggcaaccagaagagactggagagcctgcgggagctggccggcaaggaaaacctggaataccctagcgtgaccctgccacctcagcctcacaccaaggagggcgttgatgcctacaacgaagtgatcgcccgggtgcgaatgtgggtgaacctgaacctgtggcagaagctgaagctaagcagagatgatgccaagcctctgctgagactgaagggattcccttcctttcctctggtcgagagacaggccaacgaagtggactggtgggacatggtgtgtaacgtgaagaagctgatcaacgagaaaaaggaggatggcaaggtgttttggcagaatctggctggctacaagagacaggaagccctgagaccatacctgagcagcgaggaagatcggaagaagggaaagaaattcgctcggtaccagctgggcgacctgctgctgcacctggaaaagaagcacggcgaggactggggaaaggtgtacgacgaggcctgggagcggattgacaagaaagtggaaggcctgagcaagcacatcaagctggaagaggaacggagaagcgaggacgcccagagcaaggccgccctgaccgactggctgcgggctaaggccagcttcgtgatcgagggcctgaaggaggccgacaaggacgagttctgcagatgcgagctgaagctgcagaagtggtacggggacctgcggggaaagcccttcgccatcgaagccgagaacagcatcctggacatcagcggcttcagcaagcagtacaactgtgccttcatctggcagaaggacggcgtgaagaagctgaacctgtacctgatcatcaactacttcaagggcggcaagctgcggttcaagaagatcaaacctgaagccttcgaagccaacagattctacaccgtgatcaacaaaaagagcggcgagatcgtgcccatggaggtgaacttcaacttcgacgaccccaacctgatcatcctgcctctggcctttggcaagagacagggcagagaattcatctggaacgacctgctgtccctggaaaccggcagcctgaagctggccaacggaagagtgatcgagaagacactgtacaacagaagaacccggcaggatgagcctgccctgttcgtggccctgaccttcgagcggcgggaggtcctggactcctccaatatcaaaccaatgaacctgatcggcgtggcaagaggcgaaaacatccccgccgtgatcgccctgaccgaccccgagggctgcccactgagccggtttaaggatagcctgggaaacccaacccacatcctgagaatcggcgagagctataaggagaagcagcggaccatccaggccaagaaggaggtggagcagcggagagccggcggctacagccggaagtacgccagcaaagccaagaatctggcagacgatatggtgagaaacaccgctagagatctgctgtactacgccgtgacccaggatgccatgctgatcttcgccaacctgagccggggcttcggccggcagggcaagcggaccttcatggccgagagacagtacacacggatggaggactggctgaccgccaagctggcctacgagggcctgagcaagacctacctgtccaagacactggcccagtacacctccaagacatgcagcaactgtgggtttaccatcaccagcgccgactacgacagggtgctggagaagctgaagaagacagcaacaggctggatgaccacaattaacggcaaggagctgaaggtggagggccagattacctactacaacagatacaagagacagaacgtagtcaaggacctgtccgtcgagctggatagactgagcgaagaatctgtgaacaacgacatctcctcctggacaaagggcagaagcggagaagctctgagcctcctgaagaaaagattctcccatagacccgtgcaggagaagttcgtgtgcctgaactgcggcttcgagacacacgcagccgagcaagccgccctgaacatcgccagatcctggctgttcctgcggagccaggagtacaagaaataccagacaaacaagacaaccggcaacaccgataagagagccttcgtcgagacctggcagtccttttaccggaagaagcttaaggaggtgtggaaacctgccgtgcggtctggcggatctggcggaggctccacaagcaagcccggcgccgtgagcttcgccgacgtggccgtgtacttcagccccgaggagtggggctgcctgaggcccgcccagaggagcctgtacagggacgtgatgagggagacctacggccacctgggcgccctgggcttccccggccccaagcccgccctgatcagctggatggagcaggagagcgaggcctggagcagcgccgcccaggaccccgagaagggcgagagcctgggcggcgcccagaccagccccaagaaaaagagaaaagtctaagctgccttctgcggggcttgccttctggccatgcccttcttctctcccttgcacctgtacctcttggtctttgaataaagcctgagtaggaaggctagcaaaaaaaaaaaaaaaaaaaaaaaaaaaaaaaaaaaaaaaaaaaaaaaaaaaaaaaaaaaaaaaaaaaaaaaaaaaaaaaa

SEQ ID NO: 7191 - RNA, 5797 nt, synthetic construct
  source 1..5797: mol_type = other RNA
aggaaataagagagaaaagaagagtaagaagaaatataagagccaccatggcccctaagaagaagcgtaaagtgagccggatggaacgcctcgtctacgaggtgcggcagaagtgcagaaacatcgaggacatctgcatctcctgcggatctctgaacgtgaccctggagcacccactgttcatcggcggcatgtgccagaactgtaaaaactgttttctggagtgtgcctatcaatacgacgatgacggctaccagagctactgcaccatctgttgcggcggaagagaggtgctgatgtgtggaaataacaactgctgccggtgcttctgcgtggaatgcgtggacctgctggtgggccccggcgccgcccaggccgctattaaggaagatccttggaactgctacatgtgcggccacaagggcacatacggcctgctgagacggagagaggactggcctagcagactgcagatgttcttcgccaataaccacgaccaggagttcgacccccctaaggtgtaccctcccgtccccgccgagaagagaaagcccatccgggtcctgagcctgttcgatggcatcgccaccggtctgctggtgctgaaggacctgggcatccaggtggataggtacattgcctccgaggtgtgcgaggactccatcaccgtgggaatggtgcgtcatcagggcaagatcatgtacgtgggcgacgtgcggagcgtgacacagaagcatatccaggagtggggccctttcgacctggtgatcggcggcagcccttgcaatgacctgagcatcgtgaacccagcccggaagggcctgtacgagggaaccggcagactgttcttcgagttttacagactgctgcacgacgcccggcctaaggaaggcgacgaccggcccttcttttggctgttcgagaatgtggtggccatgggagtcagcgacaagcgggatattagccggttcctggagagcaaccccgtgatgatcgatgccaaggaagtgagcgccgcccaccgggccagatacttctggggcaatctgcctggcatgaacagacccctggccagcaccgtgaacgacaagctggagctgcaggagtgcctggagcacggccggatcgccaagttcagcaaggtgagaaccatcaccacccgaagcaacagcatcaaacaaggcaaggaccagcactttcctgtgttcatgaacgagaaggaggacatcctgtggtgtaccgagatggagagagtgttcgggttcccagtccactacacagatgtcagcaacatgtctagactggccagacagagactgctgggaagaagctggtccgtccctgtgatcagacacctgttcgcccctctgaaggagtacttcgcctgcgtgagcagcggcaacagcaacgccaacagccggggccccagcttctctagcggcctggtgccactgtccctgagagggagccacatgggccccatggagatctacaaaaccgtgagcgcctggaagcggcagcctgtgcgcgtgctgagcctgtttcggaatatcgataaagtcctgaaaagcctgggattcctggagagcggctctggctccggcggtggcaccctgaagtacgtggaggatgtgacaaacgtggtcagacgggatgtggagaagtggggccccttcgatctggtgtacggcagcacccaacccctgggcagctcttgtgaccggtgccctggctggtacatgtttcagttccaccggatcctgcagtacgccctgccgagacaggagtcccagcggccattcttttggattttcatggacaacttgctgctgaccgaggatgaccaggaaactaccactcggttcctgcagaccgaagccgtgaccctgcaggacgtgagaggccgggactaccagaacgccatgcgggtgtggtccaacatccctggactgaaaagcaagcacgcacctctgacccctaaagaagaggagtacctgcaggcccaggtgcggagcagaagcaagctggacgcccctaaggtggatctgctggtgaagaattgcctcctgcccctgagagagtacttcaagtatttcagccagaatagtctgcccctgggcggcccaagcagcggcgcccctcctcccagcggcggcagcccagccggctccccaacctctaccgaggagggcacctctgagtccgccacccccgagagcggccctggcacctccaccgagcccagcgagggcagcgcacccggcagccctgccggcagccccacctccacagaggagggaaccagcaccgagcccagcgaaggcagcgccccaggcaccagcaccgagcctagtgagggcggctctggcggcggcagcgcccaggagattaaacggatcaacaagatcagaagaagacttgtgaaagacagcaacaccaagaaggccggcaagacaggccccatgaaaaccctgctggttagagtgatgacacccgatctgagagagcggctggaaaacctgagaaagaagcctgaaaatatcccccagcccatcagcaatacatctagagccaacctgaataagctgctgaccgattacaccgaaatgaagaaggcgatcctgcatgtgtactgggaagagttccagaaggaccctgtgggcctgatgagccgggtggcccagcctgccagcaagaagatcgatcagaacaagctgaaacctgagatggacgagaagggcaacctgaccaccgccggctttgcctgctctcagtgtggccagcccctgttcgtgtacaagctggagcaggtgtctgagaagggcaaggcttacaccaactacttcggacggtgcaatgtggccgagcacgaaaagctgatcctgctggcccagctgaagcccgagaaggatagcgacgaagccgtgacatatagcctgggaaagtttgggcagagggccctggatttctacagcattcatgtgaccaaggagtccacccaccccgtgaagcccctggcccagatcgccggaaacagatacgcctccggacctgtgggaaaggccctgagcgacgcatgtatgggcacaatcgcctccttcctgtctaagtaccaggacatcatcatcgaacaccagaaggtggtgaagggcaaccagaagagactggagagcctgcgggagctggccggcaaggaaaacctggaataccctagcgtgaccctgccacctcagcctcacaccaaggagggcgttgatgcctacaacgaagtgatcgcccgggtgcgaatgtgggtgaacctgaacctgtggcagaagctgaagctaagcagagatgatgccaagcctctgctgagactgaagggattcccttcctttcctctggtcgagagacaggccaacgaagtggactggtgggacatggtgtgtaacgtgaagaagctgatcaacgagaaaaaggaggatggcaaggtgttttggcagaatctggctggctacaagagacaggaagccctgagaccatacctgagcagcgaggaagatcggaagaagggaaagaaattcgctcggtaccagctgggcgacctgctgctgcacctggaaaagaagcacggcgaggactggggaaaggtgtacgacgaggcctgggagcggattgacaagaaagtggaaggcctgagcaagcacatcaagctggaagaggaacggagaagcgaggacgcccagagcaaggccgccctgaccgactggctgcgggctaaggccagcttcgtgatcgagggcctgaaggaggccgacaaggacgagttctgcagatgcgagctgaagctgcagaagtggtacggggacctgcggggaaagcccttcgccatcgaagccgagaacagcatcctggacatcagcggcttcagcaagcagtacaactgtgccttcatctggcagaaggacggcgtgaagaagctgaacctgtacctgatcatcaactacttcaagggcggcaagctgcggttcaagaagatcaaacctgaagccttcgaagccaacagattctacaccgtgatcaacaaaaagagcggcgagatcgtgcccatggaggtgaacttcaacttcgacgaccccaacctgatcatcctgcctctggcctttggcaagagacagggcagagaattcatctggaacgacctgctgtccctggaaaccggcagcctgaagctggccaacggaagagtgatcgagaagacactgtacaacagaagaacccggcaggatgagcctgccctgttcgtggccctgaccttcgagcggcgggaggtcctggactcctccaatatcaaaccaatgaacctgatcggcgtggcaagaggcgaaaacatccccgccgtgatcgccctgaccgaccccgagggctgcccactgagccggtttaaggatagcctgggaaacccaacccacatcctgagaatcggcgagagctataaggagaagcagcggaccatccaggccaagaaggaggtggagcagcggagagccggcggctacagccggaagtacgccagcaaagccaagaatctggcagacgatatggtgagaaacaccgctagagatctgctgtactacgccgtgacccaggatgccatgctgatcttcgccaacctgagccggggcttcggccggcagggcaagcggaccttcatggccgagagacagtacacacggatggaggactggctgaccgccaagctggcctacgagggcctgagcaagacctacctgtccaagacactggcccagtacacctccaagacatgcagcaactgtgggtttaccatcaccagcgccgactacgacagggtgctggagaagctgaagaagacagcaacaggctggatgaccacaattaacggcaaggagctgaaggtggagggccagattacctactacaacagatacaagagacagaacgtagtcaaggacctgtccgtcgagctggatagactgagcgaagaatctgtgaacaacgacatctcctcctggacaaagggcagaagcggagaagctctgagcctcctgaagaaaagattctcccatagacccgtgcaggagaagttcgtgtgcctgaactgcggcttcgagacacacgcagccgagcaagccgccctgaacatcgccagatcctggctgttcctgcggagccaggagtacaagaaataccagacaaacaagacaaccggcaacaccgataagagagccttcgtcgagacctggcagtccttttaccggaagaagcttaaggaggtgtggaaacctgccgtgcggtctggcggatctggcggaggctccacaagcttccaggagctggtgagcttcaaggacgtgaccgtgggcttcacccaggaggagtggcagcacctggaccccacccagaggagcctgtacagggacgtgatgctggagaactacagcaacctggtgagcgtgggctactgcgtgaccaagcccgaggtgatcttcaggctggagcagggcgaggagccctggatcctggaggaggagttccccaggcagagcttccccgaggtgtggaagatcaccagccccaagaaaaagagaaaagtctaagctgccttctgcggggcttgccttctggccatgcccttcttctctcccttgcacctgtacctcttggtctttgaataaagcctgagtaggaaggctagcaaaaaaaaaaaaaaaaaaaaaaaaaaaaaaaaaaaaaaaaaaaaaaaaaaaaaaaaaaaaaaaaaaaaaaaaaaaaaaaa

SEQ ID NO: 7192 - RNA, 5797 nt, synthetic construct
  source 1..5797: mol_type = other RNA
aggaaataagagagaaaagaagagtaagaagaaatataagagccaccatggcccctaagaagaagcgtaaagtgagccggatggaacgcctcgtctacgaggtgcggcagaagtgcagaaacatcgaggacatctgcatctcctgcggatctctgaacgtgaccctggagcacccactgttcatcggcggcatgtgccagaactgtaaaaactgttttctggagtgtgcctatcaatacgacgatgacggctaccagagctactgcaccatctgttgcggcggaagagaggtgctgatgtgtggaaataacaactgctgccggtgcttctgcgtggaatgcgtggacctgctggtgggccccggcgccgcccaggccgctattaaggaagatccttggaactgctacatgtgcggccacaagggcacatacggcctgctgagacggagagaggactggcctagcagactgcagatgttcttcgccaataaccacgaccaggagttcgacccccctaaggtgtaccctcccgtccccgccgagaagagaaagcccatccgggtcctgagcctgttcgatggcatcgccaccggtctgctggtgctgaaggacctgggcatccaggtggataggtacattgcctccgaggtgtgcgaggactccatcaccgtgggaatggtgcgtcatcagggcaagatcatgtacgtgggcgacgtgcggagcgtgacacagaagcatatccaggagtggggccctttcgacctggtgatcggcggcagcccttgcaatgacctgagcatcgtgaacccagcccggaagggcctgtacgagggaaccggcagactgttcttcgagttttacagactgctgcacgacgcccggcctaaggaaggcgacgaccggcccttcttttggctgttcgagaatgtggtggccatgggagtcagcgacaagcgggatattagccggttcctggagagcaaccccgtgatgatcgatgccaaggaagtgagcgccgcccaccgggccagatacttctggggcaatctgcctggcatgaacagacccctggccagcaccgtgaacgacaagctggagctgcaggagtgcctggagcacggccggatcgccaagttcagcaaggtgagaaccatcaccacccgaagcaacagcatcaaacaaggcaaggaccagcactttcctgtgttcatgaacgagaaggaggacatcctgtggtgtaccgagatggagagagtgttcgggttcccagtccactacacagatgtcagcaacatgtctagactggccagacagagactgctgggaagaagctggtccgtccctgtgatcagacacctgttcgcccctctgaaggagtacttcgcctgcgtgagcagcggcaacagcaacgccaacagccggggccccagcttctctagcggcctggtgccactgtccctgagagggagccacatgggccccatggagatctacaaaaccgtgagcgcctggaagcggcagcctgtgcgcgtgctgagcctgtttcggaatatcgataaagtcctgaaaagcctgggattcctggagagcggctctggctccggcggtggcaccctgaagtacgtggaggatgtgacaaacgtggtcagacgggatgtggagaagtggggccccttcgatctggtgtacggcagcacccaacccctgggcagctcttgtgaccggtgccctggctggtacatgtttcagttccaccggatcctgcagtacgccctgccgagacaggagtcccagcggccattcttttggattttcatggacaacttgctgctgaccgaggatgaccaggaaactaccactcggttcctgcagaccgaagccgtgaccctgcaggacgtgagaggccgggactaccagaacgccatgcgggtgtggtccaacatccctggactgaaaagcaagcacgcacctctgacccctaaagaagaggagtacctgcaggcccaggtgcggagcagaagcaagctggacgcccctaaggtggatctgctggtgaagaattgcctcctgcccctgagagagtacttcaagtatttcagccagaatagtctgcccctgggcggcccaagcagcggcgcccctcctcccagcggcggcagcccagccggctccccaacctctaccgaggagggcacctctgagtccgccacccccgagagcggccctggcacctccaccgagcccagcgagggcagcgcacccggcagccctgccggcagccccacctccacagaggagggaaccagcaccgagcccagcgaaggcagcgccccaggcaccagcaccgagcctagtgagggcggctctggcggcggcagcgcccaggagattaaacggatcaacaagatcagaagaagacttgtgaaagacagcaacaccaagaaggccggcaagacaggccccatgaaaaccctgctggttagagtgatgacacccgatctgagagagcggctggaaaacctgagaaagaagcctgaaaatatcccccagcccatcagcaatacatctagagccaacctgaataagctgctgaccgattacaccgaaatgaagaaggcgatcctgcatgtgtactgggaagagttccagaaggaccctgtgggcctgatgagccgggtggcccagcctgccagcaagaagatcgatcagaacaagctgaaacctgagatggacgagaagggcaacctgaccaccgccggctttgcctgctctcagtgtggccagcccctgttcgtgtacaagctggagcaggtgtctgagaagggcaaggcttacaccaactacttcggacggtgcaatgtggccgagcacgaaaagctgatcctgctggcccagctgaagcccgagaaggatagcgacgaagccgtgacatatagcctgggaaagtttgggcagagggccctggatttctacagcattcatgtgaccaaggagtccacccaccccgtgaagcccctggcccagatcgccggaaacagatacgcctccggacctgtgggaaaggccctgagcgacgcatgtatgggcacaatcgcctccttcctgtctaagtaccaggacatcatcatcgaacaccagaaggtggtgaagggcaaccagaagagactggagagcctgcgggagctggccggcaaggaaaacctggaataccctagcgtgaccctgccacctcagcctcacaccaaggagggcgttgatgcctacaacgaagtgatcgcccgggtgcgaatgtgggtgaacctgaacctgtggcagaagctgaagctaagcagagatgatgccaagcctctgctgagactgaagggattcccttcctttcctctggtcgagagacaggccaacgaagtggactggtgggacatggtgtgtaacgtgaagaagctgatcaacgagaaaaaggaggatggcaaggtgttttggcagaatctggctggctacaagagacaggaagccctgagaccatacctgagcagcgaggaagatcggaagaagggaaagaaattcgctcggtaccagctgggcgacctgctgctgcacctggaaaagaagcacggcgaggactggggaaaggtgtacgacgaggcctgggagcggattgacaagaaagtggaaggcctgagcaagcacatcaagctggaagaggaacggagaagcgaggacgcccagagcaaggccgccctgaccgactggctgcgggctaaggccagcttcgtgatcgagggcctgaaggaggccgacaaggacgagttctgcagatgcgagctgaagctgcagaagtggtacggggacctgcggggaaagcccttcgccatcgaagccgagaacagcatcctggacatcagcggcttcagcaagcagtacaactgtgccttcatctggcagaaggacggcgtgaagaagctgaacctgtacctgatcatcaactacttcaagggcggcaagctgcggttcaagaagatcaaacctgaagccttcgaagccaacagattctacaccgtgatcaacaaaaagagcggcgagatcgtgcccatggaggtgaacttcaacttcgacgaccccaacctgatcatcctgcctctggcctttggcaagagacagggcagagaattcatctggaacgacctgctgtccctggaaaccggcagcctgaagctggccaacggaagagtgatcgagaagacactgtacaacagaagaacccggcaggatgagcctgccctgttcgtggccctgaccttcgagcggcgggaggtcctggactcctccaatatcaaaccaatgaacctgatcggcgtggcaagaggcgaaaacatccccgccgtgatcgccctgaccgaccccgagggctgcccactgagccggtttaaggatagcctgggaaacccaacccacatcctgagaatcggcgagagctataaggagaagcagcggaccatccaggccaagaaggaggtggagcagcggagagccggcggctacagccggaagtacgccagcaaagccaagaatctggcagacgatatggtgagaaacaccgctagagatctgctgtactacgccgtgacccaggatgccatgctgatcttcgccaacctgagccggggcttcggccggcagggcaagcggaccttcatggccgagagacagtacacacggatggaggactggctgaccgccaagctggcctacgagggcctgagcaagacctacctgtccaagacactggcccagtacacctccaagacatgcagcaactgtgggtttaccatcaccagcgccgactacgacagggtgctggagaagctgaagaagacagcaacaggctggatgaccacaattaacggcaaggagctgaaggtggagggccagattacctactacaacagatacaagagacagaacgtagtcaaggacctgtccgtcgagctggatagactgagcgaagaatctgtgaacaacgacatctcctcctggacaaagggcagaagcggagaagctctgagcctcctgaagaaaagattctcccatagacccgtgcaggagaagttcgtgtgcctgaactgcggcttcgagacacacgcagccgagcaagccgccctgaacatcgccagatcctggctgttcctgcggagccaggagtacaagaaataccagacaaacaagacaaccggcaacaccgataagagagccttcgtcgagacctggcagtccttttaccggaagaagcttaaggaggtgtggaaacctgccgtgcggtctggcggatctggcggaggctccacaagcctgagggagagcgtgaccttcaaggacgtggccgtggacttcaccggcgaggagtggaggaggctggaccccgcccagagggccctgtacagggacgtgatgctggagaactacgagaacctggtgagcctgggcctgcccgtgagcaagctggacgtgatcagcctgctggagaggggcgaggccccctggtggctggagggcggcggcctgcagagcccctgcagcgacgccctgagccagaccagccccaagaaaaagagaaaagtctaagctgccttctgcggggcttgccttctggccatgcccttcttctctcccttgcacctgtacctcttggtctttgaataaagcctgagtaggaaggctagcaaaaaaaaaaaaaaaaaaaaaaaaaaaaaaaaaaaaaaaaaaaaaaaaaaaaaaaaaaaaaaaaaaaaaaaaaaaaaaaa

SEQ ID NO: 7193 - RNA, 5797 nt, synthetic construct
  source 1..5797: mol_type = other RNA
aggaaataagagagaaaagaagagtaagaagaaatataagagccaccatggcccctaagaagaagcgtaaagtgagccggatggaacgcctcgtctacgaggtgcggcagaagtgcagaaacatcgaggacatctgcatctcctgcggatctctgaacgtgaccctggagcacccactgttcatcggcggcatgtgccagaactgtaaaaactgttttctggagtgtgcctatcaatacgacgatgacggctaccagagctactgcaccatctgttgcggcggaagagaggtgctgatgtgtggaaataacaactgctgccggtgcttctgcgtggaatgcgtggacctgctggtgggccccggcgccgcccaggccgctattaaggaagatccttggaactgctacatgtgcggccacaagggcacatacggcctgctgagacggagagaggactggcctagcagactgcagatgttcttcgccaataaccacgaccaggagttcgacccccctaaggtgtaccctcccgtccccgccgagaagagaaagcccatccgggtcctgagcctgttcgatggcatcgccaccggtctgctggtgctgaaggacctgggcatccaggtggataggtacattgcctccgaggtgtgcgaggactccatcaccgtgggaatggtgcgtcatcagggcaagatcatgtacgtgggcgacgtgcggagcgtgacacagaagcatatccaggagtggggccctttcgacctggtgatcggcggcagcccttgcaatgacctgagcatcgtgaacccagcccggaagggcctgtacgagggaaccggcagactgttcttcgagttttacagactgctgcacgacgcccggcctaaggaaggcgacgaccggcccttcttttggctgttcgagaatgtggtggccatgggagtcagcgacaagcgggatattagccggttcctggagagcaaccccgtgatgatcgatgccaaggaagtgagcgccgcccaccgggccagatacttctggggcaatctgcctggcatgaacagacccctggccagcaccgtgaacgacaagctggagctgcaggagtgcctggagcacggccggatcgccaagttcagcaaggtgagaaccatcaccacccgaagcaacagcatcaaacaaggcaaggaccagcactttcctgtgttcatgaacgagaaggaggacatcctgtggtgtaccgagatggagagagtgttcgggttcccagtccactacacagatgtcagcaacatgtctagactggccagacagagactgctgggaagaagctggtccgtccctgtgatcagacacctgttcgcccctctgaaggagtacttcgcctgcgtgagcagcggcaacagcaacgccaacagccggggccccagcttctctagcggcctggtgccactgtccctgagagggagccacatgggccccatggagatctacaaaaccgtgagcgcctggaagcggcagcctgtgcgcgtgctgagcctgtttcggaatatcgataaagtcctgaaaagcctgggattcctggagagcggctctggctccggcggtggcaccctgaagtacgtggaggatgtgacaaacgtggtcagacgggatgtggagaagtggggccccttcgatctggtgtacggcagcacccaacccctgggcagctcttgtgaccggtgccctggctggtacatgtttcagttccaccggatcctgcagtacgccctgccgagacaggagtcccagcggccattcttttggattttcatggacaacttgctgctgaccgaggatgaccaggaaactaccactcggttcctgcagaccgaagccgtgaccctgcaggacgtgagaggccgggactaccagaacgccatgcgggtgtggtccaacatccctggactgaaaagcaagcacgcacctctgacccctaaagaagaggagtacctgcaggcccaggtgcggagcagaagcaagctggacgcccctaaggtggatctgctggtgaagaattgcctcctgcccctgagagagtacttcaagtatttcagccagaatagtctgcccctgggcggcccaagcagcggcgcccctcctcccagcggcggcagcccagccggctccccaacctctaccgaggagggcacctctgagtccgccacccccgagagcggccctggcacctccaccgagcccagcgagggcagcgcacccggcagccctgccggcagccccacctccacagaggagggaaccagcaccgagcccagcgaaggcagcgccccaggcaccagcaccgagcctagtgagggcggctctggcggcggcagcgcccaggagattaaacggatcaacaagatcagaagaagacttgtgaaagacagcaacaccaagaaggccggcaagacaggccccatgaaaaccctgctggttagagtgatgacacccgatctgagagagcggctggaaaacctgagaaagaagcctgaaaatatcccccagcccatcagcaatacatctagagccaacctgaataagctgctgaccgattacaccgaaatgaagaaggcgatcctgcatgtgtactgggaagagttccagaaggaccctgtgggcctgatgagccgggtggcccagcctgccagcaagaagatcgatcagaacaagctgaaacctgagatggacgagaagggcaacctgaccaccgccggctttgcctgctctcagtgtggccagcccctgttcgtgtacaagctggagcaggtgtctgagaagggcaaggcttacaccaactacttcggacggtgcaatgtggccgagcacgaaaagctgatcctgctggcccagctgaagcccgagaaggatagcgacgaagccgtgacatatagcctgggaaagtttgggcagagggccctggatttctacagcattcatgtgaccaaggagtccacccaccccgtgaagcccctggcccagatcgccggaaacagatacgcctccggacctgtgggaaaggccctgagcgacgcatgtatgggcacaatcgcctccttcctgtctaagtaccaggacatcatcatcgaacaccagaaggtggtgaagggcaaccagaagagactggagagcctgcgggagctggccggcaaggaaaacctggaataccctagcgtgaccctgccacctcagcctcacaccaaggagggcgttgatgcctacaacgaagtgatcgcccgggtgcgaatgtgggtgaacctgaacctgtggcagaagctgaagctaagcagagatgatgccaagcctctgctgagactgaagggattcccttcctttcctctggtcgagagacaggccaacgaagtggactggtgggacatggtgtgtaacgtgaagaagctgatcaacgagaaaaaggaggatggcaaggtgttttggcagaatctggctggctacaagagacaggaagccctgagaccatacctgagcagcgaggaagatcggaagaagggaaagaaattcgctcggtaccagctgggcgacctgctgctgcacctggaaaagaagcacggcgaggactggggaaaggtgtacgacgaggcctgggagcggattgacaagaaagtggaaggcctgagcaagcacatcaagctggaagaggaacggagaagcgaggacgcccagagcaaggccgccctgaccgactggctgcgggctaaggccagcttcgtgatcgagggcctgaaggaggccgacaaggacgagttctgcagatgcgagctgaagctgcagaagtggtacggggacctgcggggaaagcccttcgccatcgaagccgagaacagcatcctggacatcagcggcttcagcaagcagtacaactgtgccttcatctggcagaaggacggcgtgaagaagctgaacctgtacctgatcatcaactacttcaagggcggcaagctgcggttcaagaagatcaaacctgaagccttcgaagccaacagattctacaccgtgatcaacaaaaagagcggcgagatcgtgcccatggaggtgaacttcaacttcgacgaccccaacctgatcatcctgcctctggcctttggcaagagacagggcagagaattcatctggaacgacctgctgtccctggaaaccggcagcctgaagctggccaacggaagagtgatcgagaagacactgtacaacagaagaacccggcaggatgagcctgccctgttcgtggccctgaccttcgagcggcgggaggtcctggactcctccaatatcaaaccaatgaacctgatcggcgtggcaagaggcgaaaacatccccgccgtgatcgccctgaccgaccccgagggctgcccactgagccggtttaaggatagcctgggaaacccaacccacatcctgagaatcggcgagagctataaggagaagcagcggaccatccaggccaagaaggaggtggagcagcggagagccggcggctacagccggaagtacgccagcaaagccaagaatctggcagacgatatggtgagaaacaccgctagagatctgctgtactacgccgtgacccaggatgccatgctgatcttcgccaacctgagccggggcttcggccggcagggcaagcggaccttcatggccgagagacagtacacacggatggaggactggctgaccgccaagctggcctacgagggcctgagcaagacctacctgtccaagacactggcccagtacacctccaagacatgcagcaactgtgggtttaccatcaccagcgccgactacgacagggtgctggagaagctgaagaagacagcaacaggctggatgaccacaattaacggcaaggagctgaaggtggagggccagattacctactacaacagatacaagagacagaacgtagtcaaggacctgtccgtcgagctggatagactgagcgaagaatctgtgaacaacgacatctcctcctggacaaagggcagaagcggagaagctctgagcctcctgaagaaaagattctcccatagacccgtgcaggagaagttcgtgtgcctgaactgcggcttcgagacacacgcagccgagcaagccgccctgaacatcgccagatcctggctgttcctgcggagccaggagtacaagaaataccagacaaacaagacaaccggcaacaccgataagagagccttcgtcgagacctggcagtccttttaccggaagaagcttaaggaggtgtggaaacctgccgtgcggtctggcggatctggcggaggctccacaagcttccagggccccgtgaccttcgaggaggtggccgtgtacttcaccagcgaggagtgggccctgctggaccccacccagagggccctgtactgggacgtgatgcaggagaactacgagaacgtgaccagcctgggcttccccgtgagcaagccccacatcatcagccagctggagcagggcgccgagccctgggtgcccgacctgcagggcagcgaggagatcctgagcaagcaccagaggatcaccagccccaagaaaaagagaaaagtctaagctgccttctgcggggcttgccttctggccatgcccttcttctctcccttgcacctgtacctcttggtctttgaataaagcctgagtaggaaggctagcaaaaaaaaaaaaaaaaaaaaaaaaaaaaaaaaaaaaaaaaaaaaaaaaaaaaaaaaaaaaaaaaaaaaaaaaaaaaaaaa

SEQ ID NO: 7194 - RNA, 5797 nt, synthetic construct
  source 1..5797: mol_type = other RNA
aggaaataagagagaaaagaagagtaagaagaaatataagagccaccatggcccctaagaagaagcgtaaagtgagccggatggaacgcctcgtctacgaggtgcggcagaagtgcagaaacatcgaggacatctgcatctcctgcggatctctgaacgtgaccctggagcacccactgttcatcggcggcatgtgccagaactgtaaaaactgttttctggagtgtgcctatcaatacgacgatgacggctaccagagctactgcaccatctgttgcggcggaagagaggtgctgatgtgtggaaataacaactgctgccggtgcttctgcgtggaatgcgtggacctgctggtgggccccggcgccgcccaggccgctattaaggaagatccttggaactgctacatgtgcggccacaagggcacatacggcctgctgagacggagagaggactggcctagcagactgcagatgttcttcgccaataaccacgaccaggagttcgacccccctaaggtgtaccctcccgtccccgccgagaagagaaagcccatccgggtcctgagcctgttcgatggcatcgccaccggtctgctggtgctgaaggacctgggcatccaggtggataggtacattgcctccgaggtgtgcgaggactccatcaccgtgggaatggtgcgtcatcagggcaagatcatgtacgtgggcgacgtgcggagcgtgacacagaagcatatccaggagtggggccctttcgacctggtgatcggcggcagcccttgcaatgacctgagcatcgtgaacccagcccggaagggcctgtacgagggaaccggcagactgttcttcgagttttacagactgctgcacgacgcccggcctaaggaaggcgacgaccggcccttcttttggctgttcgagaatgtggtggccatgggagtcagcgacaagcgggatattagccggttcctggagagcaaccccgtgatgatcgatgccaaggaagtgagcgccgcccaccgggccagatacttctggggcaatctgcctggcatgaacagacccctggccagcaccgtgaacgacaagctggagctgcaggagtgcctggagcacggccggatcgccaagttcagcaaggtgagaaccatcaccacccgaagcaacagcatcaaacaaggcaaggaccagcactttcctgtgttcatgaacgagaaggaggacatcctgtggtgtaccgagatggagagagtgttcgggttcccagtccactacacagatgtcagcaacatgtctagactggccagacagagactgctgggaagaagctggtccgtccctgtgatcagacacctgttcgcccctctgaaggagtacttcgcctgcgtgagcagcggcaacagcaacgccaacagccggggccccagcttctctagcggcctggtgccactgtccctgagagggagccacatgggccccatggagatctacaaaaccgtgagcgcctggaagcggcagcctgtgcgcgtgctgagcctgtttcggaatatcgataaagtcctgaaaagcctgggattcctggagagcggctctggctccggcggtggcaccctgaagtacgtggaggatgtgacaaacgtggtcagacgggatgtggagaagtggggccccttcgatctggtgtacggcagcacccaacccctgggcagctcttgtgaccggtgccctggctggtacatgtttcagttccaccggatcctgcagtacgccctgccgagacaggagtcccagcggccattcttttggattttcatggacaacttgctgctgaccgaggatgaccaggaaactaccactcggttcctgcagaccgaagccgtgaccctgcaggacgtgagaggccgggactaccagaacgccatgcgggtgtggtccaacatccctggactgaaaagcaagcacgcacctctgacccctaaagaagaggagtacctgcaggcccaggtgcggagcagaagcaagctggacgcccctaaggtggatctgctggtgaagaattgcctcctgcccctgagagagtacttcaagtatttcagccagaatagtctgcccctgggcggcccaagcagcggcgcccctcctcccagcggcggcagcccagccggctccccaacctctaccgaggagggcacctctgagtccgccacccccgagagcggccctggcacctccaccgagcccagcgagggcagcgcacccggcagccctgccggcagccccacctccacagaggagggaaccagcaccgagcccagcgaaggcagcgccccaggcaccagcaccgagcctagtgagggcggctctggcggcggcagcgcccaggagattaaacggatcaacaagatcagaagaagacttgtgaaagacagcaacaccaagaaggccggcaagacaggccccatgaaaaccctgctggttagagtgatgacacccgatctgagagagcggctggaaaacctgagaaagaagcctgaaaatatcccccagcccatcagcaatacatctagagccaacctgaataagctgctgaccgattacaccgaaatgaagaaggcgatcctgcatgtgtactgggaagagttccagaaggaccctgtgggcctgatgagccgggtggcccagcctgccagcaagaagatcgatcagaacaagctgaaacctgagatggacgagaagggcaacctgaccaccgccggctttgcctgctctcagtgtggccagcccctgttcgtgtacaagctggagcaggtgtctgagaagggcaaggcttacaccaactacttcggacggtgcaatgtggccgagcacgaaaagctgatcctgctggcccagctgaagcccgagaaggatagcgacgaagccgtgacatatagcctgggaaagtttgggcagagggccctggatttctacagcattcatgtgaccaaggagtccacccaccccgtgaagcccctggcccagatcgccggaaacagatacgcctccggacctgtgggaaaggccctgagcgacgcatgtatgggcacaatcgcctccttcctgtctaagtaccaggacatcatcatcgaacaccagaaggtggtgaagggcaaccagaagagactggagagcctgcgggagctggccggcaaggaaaacctggaataccctagcgtgaccctgccacctcagcctcacaccaaggagggcgttgatgcctacaacgaagtgatcgcccgggtgcgaatgtgggtgaacctgaacctgtggcagaagctgaagctaagcagagatgatgccaagcctctgctgagactgaagggattcccttcctttcctctggtcgagagacaggccaacgaagtggactggtgggacatggtgtgtaacgtgaagaagctgatcaacgagaaaaaggaggatggcaaggtgttttggcagaatctggctggctacaagagacaggaagccctgagaccatacctgagcagcgaggaagatcggaagaagggaaagaaattcgctcggtaccagctgggcgacctgctgctgcacctggaaaagaagcacggcgaggactggggaaaggtgtacgacgaggcctgggagcggattgacaagaaagtggaaggcctgagcaagcacatcaagctggaagaggaacggagaagcgaggacgcccagagcaaggccgccctgaccgactggctgcgggctaaggccagcttcgtgatcgagggcctgaaggaggccgacaaggacgagttctgcagatgcgagctgaagctgcagaagtggtacggggacctgcggggaaagcccttcgccatcgaagccgagaacagcatcctggacatcagcggcttcagcaagcagtacaactgtgccttcatctggcagaaggacggcgtgaagaagctgaacctgtacctgatcatcaactacttcaagggcggcaagctgcggttcaagaagatcaaacctgaagccttcgaagccaacagattctacaccgtgatcaacaaaaagagcggcgagatcgtgcccatggaggtgaacttcaacttcgacgaccccaacctgatcatcctgcctctggcctttggcaagagacagggcagagaattcatctggaacgacctgctgtccctggaaaccggcagcctgaagctggccaacggaagagtgatcgagaagacactgtacaacagaagaacccggcaggatgagcctgccctgttcgtggccctgaccttcgagcggcgggaggtcctggactcctccaatatcaaaccaatgaacctgatcggcgtggcaagaggcgaaaacatccccgccgtgatcgccctgaccgaccccgagggctgcccactgagccggtttaaggatagcctgggaaacccaacccacatcctgagaatcggcgagagctataaggagaagcagcggaccatccaggccaagaaggaggtggagcagcggagagccggcggctacagccggaagtacgccagcaaagccaagaatctggcagacgatatggtgagaaacaccgctagagatctgctgtactacgccgtgacccaggatgccatgctgatcttcgccaacctgagccggggcttcggccggcagggcaagcggaccttcatggccgagagacagtacacacggatggaggactggctgaccgccaagctggcctacgagggcctgagcaagacctacctgtccaagacactggcccagtacacctccaagacatgcagcaactgtgggtttaccatcaccagcgccgactacgacagggtgctggagaagctgaagaagacagcaacaggctggatgaccacaattaacggcaaggagctgaaggtggagggccagattacctactacaacagatacaagagacagaacgtagtcaaggacctgtccgtcgagctggatagactgagcgaagaatctgtgaacaacgacatctcctcctggacaaagggcagaagcggagaagctctgagcctcctgaagaaaagattctcccatagacccgtgcaggagaagttcgtgtgcctgaactgcggcttcgagacacacgcagccgagcaagccgccctgaacatcgccagatcctggctgttcctgcggagccaggagtacaagaaataccagacaaacaagacaaccggcaacaccgataagagagccttcgtcgagacctggcagtccttttaccggaagaagcttaaggaggtgtggaaacctgccgtgcggtctggcggatctggcggaggctccacaagcccccaggagcccgtgaccttcgccgacgtggccgtgctgttcacccccgaggagtggctgttcctggacagcgcccagaagagcctgtacagggacgtgatgctggagaactacaggaacctggccagcgtgggcgaccagctgtgcaagaccaggatgagcagccacatggagcagagggaggagctgtgcgtgaccgagaggggcgtgttccccggcgcccacctgggcccccacctgcagaccagccccaagaaaaagagaaaagtctaagctgccttctgcggggcttgccttctggccatgcccttcttctctcccttgcacctgtacctcttggtctttgaataaagcctgagtaggaaggctagcaaaaaaaaaaaaaaaaaaaaaaaaaaaaaaaaaaaaaaaaaaaaaaaaaaaaaaaaaaaaaaaaaaaaaaaaaaaaaaaa

SEQ ID NO: 7195 - RNA, 5797 nt, synthetic construct
  source 1..5797: mol_type = other RNA
aggaaataagagagaaaagaagagtaagaagaaatataagagccaccatggcccctaagaagaagcgtaaagtgagccggatggaacgcctcgtctacgaggtgcggcagaagtgcagaaacatcgaggacatctgcatctcctgcggatctctgaacgtgaccctggagcacccactgttcatcggcggcatgtgccagaactgtaaaaactgttttctggagtgtgcctatcaatacgacgatgacggctaccagagctactgcaccatctgttgcggcggaagagaggtgctgatgtgtggaaataacaactgctgccggtgcttctgcgtggaatgcgtggacctgctggtgggccccggcgccgcccaggccgctattaaggaagatccttggaactgctacatgtgcggccacaagggcacatacggcctgctgagacggagagaggactggcctagcagactgcagatgttcttcgccaataaccacgaccaggagttcgacccccctaaggtgtaccctcccgtccccgccgagaagagaaagcccatccgggtcctgagcctgttcgatggcatcgccaccggtctgctggtgctgaaggacctgggcatccaggtggataggtacattgcctccgaggtgtgcgaggactccatcaccgtgggaatggtgcgtcatcagggcaagatcatgtacgtgggcgacgtgcggagcgtgacacagaagcatatccaggagtggggccctttcgacctggtgatcggcggcagcccttgcaatgacctgagcatcgtgaacccagcccggaagggcctgtacgagggaaccggcagactgttcttcgagttttacagactgctgcacgacgcccggcctaaggaaggcgacgaccggcccttcttttggctgttcgagaatgtggtggccatgggagtcagcgacaagcgggatattagccggttcctggagagcaaccccgtgatgatcgatgccaaggaagtgagcgccgcccaccgggccagatacttctggggcaatctgcctggcatgaacagacccctggccagcaccgtgaacgacaagctggagctgcaggagtgcctggagcacggccggatcgccaagttcagcaaggtgagaaccatcaccacccgaagcaacagcatcaaacaaggcaaggaccagcactttcctgtgttcatgaacgagaaggaggacatcctgtggtgtaccgagatggagagagtgttcgggttcccagtccactacacagatgtcagcaacatgtctagactggccagacagagactgctgggaagaagctggtccgtccctgtgatcagacacctgttcgcccctctgaaggagtacttcgcctgcgtgagcagcggcaacagcaacgccaacagccggggccccagcttctctagcggcctggtgccactgtccctgagagggagccacatgggccccatggagatctacaaaaccgtgagcgcctggaagcggcagcctgtgcgcgtgctgagcctgtttcggaatatcgataaagtcctgaaaagcctgggattcctggagagcggctctggctccggcggtggcaccctgaagtacgtggaggatgtgacaaacgtggtcagacgggatgtggagaagtggggccccttcgatctggtgtacggcagcacccaacccctgggcagctcttgtgaccggtgccctggctggtacatgtttcagttccaccggatcctgcagtacgccctgccgagacaggagtcccagcggccattcttttggattttcatggacaacttgctgctgaccgaggatgaccaggaaactaccactcggttcctgcagaccgaagccgtgaccctgcaggacgtgagaggccgggactaccagaacgccatgcgggtgtggtccaacatccctggactgaaaagcaagcacgcacctctgacccctaaagaagaggagtacctgcaggcccaggtgcggagcagaagcaagctggacgcccctaaggtggatctgctggtgaagaattgcctcctgcccctgagagagtacttcaagtatttcagccagaatagtctgcccctgggcggcccaagcagcggcgcccctcctcccagcggcggcagcccagccggctccccaacctctaccgaggagggcacctctgagtccgccacccccgagagcggccctggcacctccaccgagcccagcgagggcagcgcacccggcagccctgccggcagccccacctccacagaggagggaaccagcaccgagcccagcgaaggcagcgccccaggcaccagcaccgagcctagtgagggcggctctggcggcggcagcgcccaggagattaaacggatcaacaagatcagaagaagacttgtgaaagacagcaacaccaagaaggccggcaagacaggccccatgaaaaccctgctggttagagtgatgacacccgatctgagagagcggctggaaaacctgagaaagaagcctgaaaatatcccccagcccatcagcaatacatctagagccaacctgaataagctgctgaccgattacaccgaaatgaagaaggcgatcctgcatgtgtactgggaagagttccagaaggaccctgtgggcctgatgagccgggtggcccagcctgccagcaagaagatcgatcagaacaagctgaaacctgagatggacgagaagggcaacctgaccaccgccggctttgcctgctctcagtgtggccagcccctgttcgtgtacaagctggagcaggtgtctgagaagggcaaggcttacaccaactacttcggacggtgcaatgtggccgagcacgaaaagctgatcctgctggcccagctgaagcccgagaaggatagcgacgaagccgtgacatatagcctgggaaagtttgggcagagggccctggatttctacagcattcatgtgaccaaggagtccacccaccccgtgaagcccctggcccagatcgccggaaacagatacgcctccggacctgtgggaaaggccctgagcgacgcatgtatgggcacaatcgcctccttcctgtctaagtaccaggacatcatcatcgaacaccagaaggtggtgaagggcaaccagaagagactggagagcctgcgggagctggccggcaaggaaaacctggaataccctagcgtgaccctgccacctcagcctcacaccaaggagggcgttgatgcctacaacgaagtgatcgcccgggtgcgaatgtgggtgaacctgaacctgtggcagaagctgaagctaagcagagatgatgccaagcctctgctgagactgaagggattcccttcctttcctctggtcgagagacaggccaacgaagtggactggtgggacatggtgtgtaacgtgaagaagctgatcaacgagaaaaaggaggatggcaaggtgttttggcagaatctggctggctacaagagacaggaagccctgagaccatacctgagcagcgaggaagatcggaagaagggaaagaaattcgctcggtaccagctgggcgacctgctgctgcacctggaaaagaagcacggcgaggactggggaaaggtgtacgacgaggcctgggagcggattgacaagaaagtggaaggcctgagcaagcacatcaagctggaagaggaacggagaagcgaggacgcccagagcaaggccgccctgaccgactggctgcgggctaaggccagcttcgtgatcgagggcctgaaggaggccgacaaggacgagttctgcagatgcgagctgaagctgcagaagtggtacggggacctgcggggaaagcccttcgccatcgaagccgagaacagcatcctggacatcagcggcttcagcaagcagtacaactgtgccttcatctggcagaaggacggcgtgaagaagctgaacctgtacctgatcatcaactacttcaagggcggcaagctgcggttcaagaagatcaaacctgaagccttcgaagccaacagattctacaccgtgatcaacaaaaagagcggcgagatcgtgcccatggaggtgaacttcaacttcgacgaccccaacctgatcatcctgcctctggcctttggcaagagacagggcagagaattcatctggaacgacctgctgtccctggaaaccggcagcctgaagctggccaacggaagagtgatcgagaagacactgtacaacagaagaacccggcaggatgagcctgccctgttcgtggccctgaccttcgagcggcgggaggtcctggactcctccaatatcaaaccaatgaacctgatcggcgtggcaagaggcgaaaacatccccgccgtgatcgccctgaccgaccccgagggctgcccactgagccggtttaaggatagcctgggaaacccaacccacatcctgagaatcggcgagagctataaggagaagcagcggaccatccaggccaagaaggaggtggagcagcggagagccggcggctacagccggaagtacgccagcaaagccaagaatctggcagacgatatggtgagaaacaccgctagagatctgctgtactacgccgtgacccaggatgccatgctgatcttcgccaacctgagccggggcttcggccggcagggcaagcggaccttcatggccgagagacagtacacacggatggaggactggctgaccgccaagctggcctacgagggcctgagcaagacctacctgtccaagacactggcccagtacacctccaagacatgcagcaactgtgggtttaccatcaccagcgccgactacgacagggtgctggagaagctgaagaagacagcaacaggctggatgaccacaattaacggcaaggagctgaaggtggagggccagattacctactacaacagatacaagagacagaacgtagtcaaggacctgtccgtcgagctggatagactgagcgaagaatctgtgaacaacgacatctcctcctggacaaagggcagaagcggagaagctctgagcctcctgaagaaaagattctcccatagacccgtgcaggagaagttcgtgtgcctgaactgcggcttcgagacacacgcagccgagcaagccgccctgaacatcgccagatcctggctgttcctgcggagccaggagtacaagaaataccagacaaacaagacaaccggcaacaccgataagagagccttcgtcgagacctggcagtccttttaccggaagaagcttaaggaggtgtggaaacctgccgtgcggtctggcggatctggcggaggctccacaagcagggagcccgcccaggtgctggtggccgccgagagcctgatcgacaacgaggagggctacgtgaccttcgaggacgtggccgtgtacttcagccaggaggagtggaggctgctggacgaggcccagaggctgctgtacaggaacgtgatgctggagaacttcagcctgatggccagcctgggcctggccagcagcaagacccacgagatcacccagctggagagctgggaggagcccttcgtgaccagccccaagaaaaagagaaaagtctaagctgccttctgcggggcttgccttctggccatgcccttcttctctcccttgcacctgtacctcttggtctttgaataaagcctgagtaggaaggctagcaaaaaaaaaaaaaaaaaaaaaaaaaaaaaaaaaaaaaaaaaaaaaaaaaaaaaaaaaaaaaaaaaaaaaaaaaaaaaaaa

SEQ ID NO: 7196 - RNA, 5797 nt, synthetic construct
  source 1..5797: mol_type = other RNA
aggaaataagagagaaaagaagagtaagaagaaatataagagccaccatggcccctaagaagaagcgtaaagtgagccggatggaacgcctcgtctacgaggtgcggcagaagtgcagaaacatcgaggacatctgcatctcctgcggatctctgaacgtgaccctggagcacccactgttcatcggcggcatgtgccagaactgtaaaaactgttttctggagtgtgcctatcaatacgacgatgacggctaccagagctactgcaccatctgttgcggcggaagagaggtgctgatgtgtggaaataacaactgctgccggtgcttctgcgtggaatgcgtggacctgctggtgggccccggcgccgcccaggccgctattaaggaagatccttggaactgctacatgtgcggccacaagggcacatacggcctgctgagacggagagaggactggcctagcagactgcagatgttcttcgccaataaccacgaccaggagttcgacccccctaaggtgtaccctcccgtccccgccgagaagagaaagcccatccgggtcctgagcctgttcgatggcatcgccaccggtctgctggtgctgaaggacctgggcatccaggtggataggtacattgcctccgaggtgtgcgaggactccatcaccgtgggaatggtgcgtcatcagggcaagatcatgtacgtgggcgacgtgcggagcgtgacacagaagcatatccaggagtggggccctttcgacctggtgatcggcggcagcccttgcaatgacctgagcatcgtgaacccagcccggaagggcctgtacgagggaaccggcagactgttcttcgagttttacagactgctgcacgacgcccggcctaaggaaggcgacgaccggcccttcttttggctgttcgagaatgtggtggccatgggagtcagcgacaagcgggatattagccggttcctggagagcaaccccgtgatgatcgatgccaaggaagtgagcgccgcccaccgggccagatacttctggggcaatctgcctggcatgaacagacccctggccagcaccgtgaacgacaagctggagctgcaggagtgcctggagcacggccggatcgccaagttcagcaaggtgagaaccatcaccacccgaagcaacagcatcaaacaaggcaaggaccagcactttcctgtgttcatgaacgagaaggaggacatcctgtggtgtaccgagatggagagagtgttcgggttcccagtccactacacagatgtcagcaacatgtctagactggccagacagagactgctgggaagaagctggtccgtccctgtgatcagacacctgttcgcccctctgaaggagtacttcgcctgcgtgagcagcggcaacagcaacgccaacagccggggccccagcttctctagcggcctggtgccactgtccctgagagggagccacatgggccccatggagatctacaaaaccgtgagcgcctggaagcggcagcctgtgcgcgtgctgagcctgtttcggaatatcgataaagtcctgaaaagcctgggattcctggagagcggctctggctccggcggtggcaccctgaagtacgtggaggatgtgacaaacgtggtcagacgggatgtggagaagtggggccccttcgatctggtgtacggcagcacccaacccctgggcagctcttgtgaccggtgccctggctggtacatgtttcagttccaccggatcctgcagtacgccctgccgagacaggagtcccagcggccattcttttggattttcatggacaacttgctgctgaccgaggatgaccaggaaactaccactcggttcctgcagaccgaagccgtgaccctgcaggacgtgagaggccgggactaccagaacgccatgcgggtgtggtccaacatccctggactgaaaagcaagcacgcacctctgacccctaaagaagaggagtacctgcaggcccaggtgcggagcagaagcaagctggacgcccctaaggtggatctgctggtgaagaattgcctcctgcccctgagagagtacttcaagtatttcagccagaatagtctgcccctgggcggcccaagcagcggcgcccctcctcccagcggcggcagcccagccggctccccaacctctaccgaggagggcacctctgagtccgccacccccgagagcggccctggcacctccaccgagcccagcgagggcagcgcacccggcagccctgccggcagccccacctccacagaggagggaaccagcaccgagcccagcgaaggcagcgccccaggcaccagcaccgagcctagtgagggcggctctggcggcggcagcgcccaggagattaaacggatcaacaagatcagaagaagacttgtgaaagacagcaacaccaagaaggccggcaagacaggccccatgaaaaccctgctggttagagtgatgacacccgatctgagagagcggctggaaaacctgagaaagaagcctgaaaatatcccccagcccatcagcaatacatctagagccaacctgaataagctgctgaccgattacaccgaaatgaagaaggcgatcctgcatgtgtactgggaagagttccagaaggaccctgtgggcctgatgagccgggtggcccagcctgccagcaagaagatcgatcagaacaagctgaaacctgagatggacgagaagggcaacctgaccaccgccggctttgcctgctctcagtgtggccagcccctgttcgtgtacaagctggagcaggtgtctgagaagggcaaggcttacaccaactacttcggacggtgcaatgtggccgagcacgaaaagctgatcctgctggcccagctgaagcccgagaaggatagcgacgaagccgtgacatatagcctgggaaagtttgggcagagggccctggatttctacagcattcatgtgaccaaggagtccacccaccccgtgaagcccctggcccagatcgccggaaacagatacgcctccggacctgtgggaaaggccctgagcgacgcatgtatgggcacaatcgcctccttcctgtctaagtaccaggacatcatcatcgaacaccagaaggtggtgaagggcaaccagaagagactggagagcctgcgggagctggccggcaaggaaaacctggaataccctagcgtgaccctgccacctcagcctcacaccaaggagggcgttgatgcctacaacgaagtgatcgcccgggtgcgaatgtgggtgaacctgaacctgtggcagaagctgaagctaagcagagatgatgccaagcctctgctgagactgaagggattcccttcctttcctctggtcgagagacaggccaacgaagtggactggtgggacatggtgtgtaacgtgaagaagctgatcaacgagaaaaaggaggatggcaaggtgttttggcagaatctggctggctacaagagacaggaagccctgagaccatacctgagcagcgaggaagatcggaagaagggaaagaaattcgctcggtaccagctgggcgacctgctgctgcacctggaaaagaagcacggcgaggactggggaaaggtgtacgacgaggcctgggagcggattgacaagaaagtggaaggcctgagcaagcacatcaagctggaagaggaacggagaagcgaggacgcccagagcaaggccgccctgaccgactggctgcgggctaaggccagcttcgtgatcgagggcctgaaggaggccgacaaggacgagttctgcagatgcgagctgaagctgcagaagtggtacggggacctgcggggaaagcccttcgccatcgaagccgagaacagcatcctggacatcagcggcttcagcaagcagtacaactgtgccttcatctggcagaaggacggcgtgaagaagctgaacctgtacctgatcatcaactacttcaagggcggcaagctgcggttcaagaagatcaaacctgaagccttcgaagccaacagattctacaccgtgatcaacaaaaagagcggcgagatcgtgcccatggaggtgaacttcaacttcgacgaccccaacctgatcatcctgcctctggcctttggcaagagacagggcagagaattcatctggaacgacctgctgtccctggaaaccggcagcctgaagctggccaacggaagagtgatcgagaagacactgtacaacagaagaacccggcaggatgagcctgccctgttcgtggccctgaccttcgagcggcgggaggtcctggactcctccaatatcaaaccaatgaacctgatcggcgtggcaagaggcgaaaacatccccgccgtgatcgccctgaccgaccccgagggctgcccactgagccggtttaaggatagcctgggaaacccaacccacatcctgagaatcggcgagagctataaggagaagcagcggaccatccaggccaagaaggaggtggagcagcggagagccggcggctacagccggaagtacgccagcaaagccaagaatctggcagacgatatggtgagaaacaccgctagagatctgctgtactacgccgtgacccaggatgccatgctgatcttcgccaacctgagccggggcttcggccggcagggcaagcggaccttcatggccgagagacagtacacacggatggaggactggctgaccgccaagctggcctacgagggcctgagcaagacctacctgtccaagacactggcccagtacacctccaagacatgcagcaactgtgggtttaccatcaccagcgccgactacgacagggtgctggagaagctgaagaagacagcaacaggctggatgaccacaattaacggcaaggagctgaaggtggagggccagattacctactacaacagatacaagagacagaacgtagtcaaggacctgtccgtcgagctggatagactgagcgaagaatctgtgaacaacgacatctcctcctggacaaagggcagaagcggagaagctctgagcctcctgaagaaaagattctcccatagacccgtgcaggagaagttcgtgtgcctgaactgcggcttcgagacacacgcagccgagcaagccgccctgaacatcgccagatcctggctgttcctgcggagccaggagtacaagaaataccagacaaacaagacaaccggcaacaccgataagagagccttcgtcgagacctggcagtccttttaccggaagaagcttaaggaggtgtggaaacctgccgtgcggtctggcggatctggcggaggctccacaagcttccaggccagcgtggtgttcgaggacgtggccgtgaagttcacccccgaggagtgggccctgctggacaggggccagaggaagctgtacagggacgtgatgctggagacctgcaggaacctgagcagcgtggagaagcagaagttccacagcaacggcgacctgaccaggatgcaggagggcctgctgaggagccccctggtggagagcgtgtgcgagaggatcgagggcgaccagtgcggcaccagccccaagaaaaagagaaaagtctaagctgccttctgcggggcttgccttctggccatgcccttcttctctcccttgcacctgtacctcttggtctttgaataaagcctgagtaggaaggctagcaaaaaaaaaaaaaaaaaaaaaaaaaaaaaaaaaaaaaaaaaaaaaaaaaaaaaaaaaaaaaaaaaaaaaaaaaaaaaaaa

SEQ ID NO: 7197 - RNA, 5797 nt, synthetic construct
  source 1..5797: mol_type = other RNA
aggaaataagagagaaaagaagagtaagaagaaatataagagccaccatggcccctaagaagaagcgtaaagtgagccggatggaacgcctcgtctacgaggtgcggcagaagtgcagaaacatcgaggacatctgcatctcctgcggatctctgaacgtgaccctggagcacccactgttcatcggcggcatgtgccagaactgtaaaaactgttttctggagtgtgcctatcaatacgacgatgacggctaccagagctactgcaccatctgttgcggcggaagagaggtgctgatgtgtggaaataacaactgctgccggtgcttctgcgtggaatgcgtggacctgctggtgggccccggcgccgcccaggccgctattaaggaagatccttggaactgctacatgtgcggccacaagggcacatacggcctgctgagacggagagaggactggcctagcagactgcagatgttcttcgccaataaccacgaccaggagttcgacccccctaaggtgtaccctcccgtccccgccgagaagagaaagcccatccgggtcctgagcctgttcgatggcatcgccaccggtctgctggtgctgaaggacctgggcatccaggtggataggtacattgcctccgaggtgtgcgaggactccatcaccgtgggaatggtgcgtcatcagggcaagatcatgtacgtgggcgacgtgcggagcgtgacacagaagcatatccaggagtggggccctttcgacctggtgatcggcggcagcccttgcaatgacctgagcatcgtgaacccagcccggaagggcctgtacgagggaaccggcagactgttcttcgagttttacagactgctgcacgacgcccggcctaaggaaggcgacgaccggcccttcttttggctgttcgagaatgtggtggccatgggagtcagcgacaagcgggatattagccggttcctggagagcaaccccgtgatgatcgatgccaaggaagtgagcgccgcccaccgggccagatacttctggggcaatctgcctggcatgaacagacccctggccagcaccgtgaacgacaagctggagctgcaggagtgcctggagcacggccggatcgccaagttcagcaaggtgagaaccatcaccacccgaagcaacagcatcaaacaaggcaaggaccagcactttcctgtgttcatgaacgagaaggaggacatcctgtggtgtaccgagatggagagagtgttcgggttcccagtccactacacagatgtcagcaacatgtctagactggccagacagagactgctgggaagaagctggtccgtccctgtgatcagacacctgttcgcccctctgaaggagtacttcgcctgcgtgagcagcggcaacagcaacgccaacagccggggccccagcttctctagcggcctggtgccactgtccctgagagggagccacatgggccccatggagatctacaaaaccgtgagcgcctggaagcggcagcctgtgcgcgtgctgagcctgtttcggaatatcgataaagtcctgaaaagcctgggattcctggagagcggctctggctccggcggtggcaccctgaagtacgtggaggatgtgacaaacgtggtcagacgggatgtggagaagtggggccccttcgatctggtgtacggcagcacccaacccctgggcagctcttgtgaccggtgccctggctggtacatgtttcagttccaccggatcctgcagtacgccctgccgagacaggagtcccagcggccattcttttggattttcatggacaacttgctgctgaccgaggatgaccaggaaactaccactcggttcctgcagaccgaagccgtgaccctgcaggacgtgagaggccgggactaccagaacgccatgcgggtgtggtccaacatccctggactgaaaagcaagcacgcacctctgacccctaaagaagaggagtacctgcaggcccaggtgcggagcagaagcaagctggacgcccctaaggtggatctgctggtgaagaattgcctcctgcccctgagagagtacttcaagtatttcagccagaatagtctgcccctgggcggcccaagcagcggcgcccctcctcccagcggcggcagcccagccggctccccaacctctaccgaggagggcacctctgagtccgccacccccgagagcggccctggcacctccaccgagcccagcgagggcagcgcacccggcagccctgccggcagccccacctccacagaggagggaaccagcaccgagcccagcgaaggcagcgccccaggcaccagcaccgagcctagtgagggcggctctggcggcggcagcgcccaggagattaaacggatcaacaagatcagaagaagacttgtgaaagacagcaacaccaagaaggccggcaagacaggccccatgaaaaccctgctggttagagtgatgacacccgatctgagagagcggctggaaaacctgagaaagaagcctgaaaatatcccccagcccatcagcaatacatctagagccaacctgaataagctgctgaccgattacaccgaaatgaagaaggcgatcctgcatgtgtactgggaagagttccagaaggaccctgtgggcctgatgagccgggtggcccagcctgccagcaagaagatcgatcagaacaagctgaaacctgagatggacgagaagggcaacctgaccaccgccggctttgcctgctctcagtgtggccagcccctgttcgtgtacaagctggagcaggtgtctgagaagggcaaggcttacaccaactacttcggacggtgcaatgtggccgagcacgaaaagctgatcctgctggcccagctgaagcccgagaaggatagcgacgaagccgtgacatatagcctgggaaagtttgggcagagggccctggatttctacagcattcatgtgaccaaggagtccacccaccccgtgaagcccctggcccagatcgccggaaacagatacgcctccggacctgtgggaaaggccctgagcgacgcatgtatgggcacaatcgcctccttcctgtctaagtaccaggacatcatcatcgaacaccagaaggtggtgaagggcaaccagaagagactggagagcctgcgggagctggccggcaaggaaaacctggaataccctagcgtgaccctgccacctcagcctcacaccaaggagggcgttgatgcctacaacgaagtgatcgcccgggtgcgaatgtgggtgaacctgaacctgtggcagaagctgaagctaagcagagatgatgccaagcctctgctgagactgaagggattcccttcctttcctctggtcgagagacaggccaacgaagtggactggtgggacatggtgtgtaacgtgaagaagctgatcaacgagaaaaaggaggatggcaaggtgttttggcagaatctggctggctacaagagacaggaagccctgagaccatacctgagcagcgaggaagatcggaagaagggaaagaaattcgctcggtaccagctgggcgacctgctgctgcacctggaaaagaagcacggcgaggactggggaaaggtgtacgacgaggcctgggagcggattgacaagaaagtggaaggcctgagcaagcacatcaagctggaagaggaacggagaagcgaggacgcccagagcaaggccgccctgaccgactggctgcgggctaaggccagcttcgtgatcgagggcctgaaggaggccgacaaggacgagttctgcagatgcgagctgaagctgcagaagtggtacggggacctgcggggaaagcccttcgccatcgaagccgagaacagcatcctggacatcagcggcttcagcaagcagtacaactgtgccttcatctggcagaaggacggcgtgaagaagctgaacctgtacctgatcatcaactacttcaagggcggcaagctgcggttcaagaagatcaaacctgaagccttcgaagccaacagattctacaccgtgatcaacaaaaagagcggcgagatcgtgcccatggaggtgaacttcaacttcgacgaccccaacctgatcatcctgcctctggcctttggcaagagacagggcagagaattcatctggaacgacctgctgtccctggaaaccggcagcctgaagctggccaacggaagagtgatcgagaagacactgtacaacagaagaacccggcaggatgagcctgccctgttcgtggccctgaccttcgagcggcgggaggtcctggactcctccaatatcaaaccaatgaacctgatcggcgtggcaagaggcgaaaacatccccgccgtgatcgccctgaccgaccccgagggctgcccactgagccggtttaaggatagcctgggaaacccaacccacatcctgagaatcggcgagagctataaggagaagcagcggaccatccaggccaagaaggaggtggagcagcggagagccggcggctacagccggaagtacgccagcaaagccaagaatctggcagacgatatggtgagaaacaccgctagagatctgctgtactacgccgtgacccaggatgccatgctgatcttcgccaacctgagccggggcttcggccggcagggcaagcggaccttcatggccgagagacagtacacacggatggaggactggctgaccgccaagctggcctacgagggcctgagcaagacctacctgtccaagacactggcccagtacacctccaagacatgcagcaactgtgggtttaccatcaccagcgccgactacgacagggtgctggagaagctgaagaagacagcaacaggctggatgaccacaattaacggcaaggagctgaaggtggagggccagattacctactacaacagatacaagagacagaacgtagtcaaggacctgtccgtcgagctggatagactgagcgaagaatctgtgaacaacgacatctcctcctggacaaagggcagaagcggagaagctctgagcctcctgaagaaaagattctcccatagacccgtgcaggagaagttcgtgtgcctgaactgcggcttcgagacacacgcagccgagcaagccgccctgaacatcgccagatcctggctgttcctgcggagccaggagtacaagaaataccagacaaacaagacaaccggcaacaccgataagagagccttcgtcgagacctggcagtccttttaccggaagaagcttaaggaggtgtggaaacctgccgtgcggtctggcggatctggcggaggctccacaagccagtgcctgctgaccttcaaggacgtgttcctggacttcagcagcgaggagtgggagtgcctgaacttcgcccagaggaccctgtacatggacgtgatgctggagaactacaacaacctgctgttcgtggagaaccactgcatctgcggcaactacgagaaggagaaggtgctggagcaggacacccagcacatcgtgaacgagcacggccacaacaggaagaagagcagcaagtgcaacgagaccagccccaagaaaaagagaaaagtctaagctgccttctgcggggcttgccttctggccatgcccttcttctctcccttgcacctgtacctcttggtctttgaataaagcctgagtaggaaggctagcaaaaaaaaaaaaaaaaaaaaaaaaaaaaaaaaaaaaaaaaaaaaaaaaaaaaaaaaaaaaaaaaaaaaaaaaaaaaaaaa

SEQ ID NO: 7198 - RNA, 5797 nt, synthetic construct
  source 1..5797: mol_type = other RNA
aggaaataagagagaaaagaagagtaagaagaaatataagagccaccatggcccctaagaagaagcgtaaagtgagccggatggaacgcctcgtctacgaggtgcggcagaagtgcagaaacatcgaggacatctgcatctcctgcggatctctgaacgtgaccctggagcacccactgttcatcggcggcatgtgccagaactgtaaaaactgttttctggagtgtgcctatcaatacgacgatgacggctaccagagctactgcaccatctgttgcggcggaagagaggtgctgatgtgtggaaataacaactgctgccggtgcttctgcgtggaatgcgtggacctgctggtgggccccggcgccgcccaggccgctattaaggaagatccttggaactgctacatgtgcggccacaagggcacatacggcctgctgagacggagagaggactggcctagcagactgcagatgttcttcgccaataaccacgaccaggagttcgacccccctaaggtgtaccctcccgtccccgccgagaagagaaagcccatccgggtcctgagcctgttcgatggcatcgccaccggtctgctggtgctgaaggacctgggcatccaggtggataggtacattgcctccgaggtgtgcgaggactccatcaccgtgggaatggtgcgtcatcagggcaagatcatgtacgtgggcgacgtgcggagcgtgacacagaagcatatccaggagtggggccctttcgacctggtgatcggcggcagcccttgcaatgacctgagcatcgtgaacccagcccggaagggcctgtacgagggaaccggcagactgttcttcgagttttacagactgctgcacgacgcccggcctaaggaaggcgacgaccggcccttcttttggctgttcgagaatgtggtggccatgggagtcagcgacaagcgggatattagccggttcctggagagcaaccccgtgatgatcgatgccaaggaagtgagcgccgcccaccgggccagatacttctggggcaatctgcctggcatgaacagacccctggccagcaccgtgaacgacaagctggagctgcaggagtgcctggagcacggccggatcgccaagttcagcaaggtgagaaccatcaccacccgaagcaacagcatcaaacaaggcaaggaccagcactttcctgtgttcatgaacgagaaggaggacatcctgtggtgtaccgagatggagagagtgttcgggttcccagtccactacacagatgtcagcaacatgtctagactggccagacagagactgctgggaagaagctggtccgtccctgtgatcagacacctgttcgcccctctgaaggagtacttcgcctgcgtgagcagcggcaacagcaacgccaacagccggggccccagcttctctagcggcctggtgccactgtccctgagagggagccacatgggccccatggagatctacaaaaccgtgagcgcctggaagcggcagcctgtgcgcgtgctgagcctgtttcggaatatcgataaagtcctgaaaagcctgggattcctggagagcggctctggctccggcggtggcaccctgaagtacgtggaggatgtgacaaacgtggtcagacgggatgtggagaagtggggccccttcgatctggtgtacggcagcacccaacccctgggcagctcttgtgaccggtgccctggctggtacatgtttcagttccaccggatcctgcagtacgccctgccgagacaggagtcccagcggccattcttttggattttcatggacaacttgctgctgaccgaggatgaccaggaaactaccactcggttcctgcagaccgaagccgtgaccctgcaggacgtgagaggccgggactaccagaacgccatgcgggtgtggtccaacatccctggactgaaaagcaagcacgcacctctgacccctaaagaagaggagtacctgcaggcccaggtgcggagcagaagcaagctggacgcccctaaggtggatctgctggtgaagaattgcctcctgcccctgagagagtacttcaagtatttcagccagaatagtctgcccctgggcggcccaagcagcggcgcccctcctcccagcggcggcagcccagccggctccccaacctctaccgaggagggcacctctgagtccgccacccccgagagcggccctggcacctccaccgagcccagcgagggcagcgcacccggcagccctgccggcagccccacctccacagaggagggaaccagcaccgagcccagcgaaggcagcgccccaggcaccagcaccgagcctagtgagggcggctctggcggcggcagcgcccaggagattaaacggatcaacaagatcagaagaagacttgtgaaagacagcaacaccaagaaggccggcaagacaggccccatgaaaaccctgctggttagagtgatgacacccgatctgagagagcggctggaaaacctgagaaagaagcctgaaaatatcccccagcccatcagcaatacatctagagccaacctgaataagctgctgaccgattacaccgaaatgaagaaggcgatcctgcatgtgtactgggaagagttccagaaggaccctgtgggcctgatgagccgggtggcccagcctgccagcaagaagatcgatcagaacaagctgaaacctgagatggacgagaagggcaacctgaccaccgccggctttgcctgctctcagtgtggccagcccctgttcgtgtacaagctggagcaggtgtctgagaagggcaaggcttacaccaactacttcggacggtgcaatgtggccgagcacgaaaagctgatcctgctggcccagctgaagcccgagaaggatagcgacgaagccgtgacatatagcctgggaaagtttgggcagagggccctggatttctacagcattcatgtgaccaaggagtccacccaccccgtgaagcccctggcccagatcgccggaaacagatacgcctccggacctgtgggaaaggccctgagcgacgcatgtatgggcacaatcgcctccttcctgtctaagtaccaggacatcatcatcgaacaccagaaggtggtgaagggcaaccagaagagactggagagcctgcgggagctggccggcaaggaaaacctggaataccctagcgtgaccctgccacctcagcctcacaccaaggagggcgttgatgcctacaacgaagtgatcgcccgggtgcgaatgtgggtgaacctgaacctgtggcagaagctgaagctaagcagagatgatgccaagcctctgctgagactgaagggattcccttcctttcctctggtcgagagacaggccaacgaagtggactggtgggacatggtgtgtaacgtgaagaagctgatcaacgagaaaaaggaggatggcaaggtgttttggcagaatctggctggctacaagagacaggaagccctgagaccatacctgagcagcgaggaagatcggaagaagggaaagaaattcgctcggtaccagctgggcgacctgctgctgcacctggaaaagaagcacggcgaggactggggaaaggtgtacgacgaggcctgggagcggattgacaagaaagtggaaggcctgagcaagcacatcaagctggaagaggaacggagaagcgaggacgcccagagcaaggccgccctgaccgactggctgcgggctaaggccagcttcgtgatcgagggcctgaaggaggccgacaaggacgagttctgcagatgcgagctgaagctgcagaagtggtacggggacctgcggggaaagcccttcgccatcgaagccgagaacagcatcctggacatcagcggcttcagcaagcagtacaactgtgccttcatctggcagaaggacggcgtgaagaagctgaacctgtacctgatcatcaactacttcaagggcggcaagctgcggttcaagaagatcaaacctgaagccttcgaagccaacagattctacaccgtgatcaacaaaaagagcggcgagatcgtgcccatggaggtgaacttcaacttcgacgaccccaacctgatcatcctgcctctggcctttggcaagagacagggcagagaattcatctggaacgacctgctgtccctggaaaccggcagcctgaagctggccaacggaagagtgatcgagaagacactgtacaacagaagaacccggcaggatgagcctgccctgttcgtggccctgaccttcgagcggcgggaggtcctggactcctccaatatcaaaccaatgaacctgatcggcgtggcaagaggcgaaaacatccccgccgtgatcgccctgaccgaccccgagggctgcccactgagccggtttaaggatagcctgggaaacccaacccacatcctgagaatcggcgagagctataaggagaagcagcggaccatccaggccaagaaggaggtggagcagcggagagccggcggctacagccggaagtacgccagcaaagccaagaatctggcagacgatatggtgagaaacaccgctagagatctgctgtactacgccgtgacccaggatgccatgctgatcttcgccaacctgagccggggcttcggccggcagggcaagcggaccttcatggccgagagacagtacacacggatggaggactggctgaccgccaagctggcctacgagggcctgagcaagacctacctgtccaagacactggcccagtacacctccaagacatgcagcaactgtgggtttaccatcaccagcgccgactacgacagggtgctggagaagctgaagaagacagcaacaggctggatgaccacaattaacggcaaggagctgaaggtggagggccagattacctactacaacagatacaagagacagaacgtagtcaaggacctgtccgtcgagctggatagactgagcgaagaatctgtgaacaacgacatctcctcctggacaaagggcagaagcggagaagctctgagcctcctgaagaaaagattctcccatagacccgtgcaggagaagttcgtgtgcctgaactgcggcttcgagacacacgcagccgagcaagccgccctgaacatcgccagatcctggctgttcctgcggagccaggagtacaagaaataccagacaaacaagacaaccggcaacaccgataagagagccttcgtcgagacctggcagtccttttaccggaagaagcttaaggaggtgtggaaacctgccgtgcggtctggcggatctggcggaggctccacaagcagccaggccagcgtgagcttcaaggacgtgaccatcgagttcacccaggaggagtggcagcagatggcccccgtgcagaagaacctgtacagggacgtgatgctggagaactacagcaacctggtgagcgtgggctactgctgcttcaagcccgaggtgatcttcaagctggagcagggcgaggagccctggttcagcgaggaggagttcagcaaccagagccaccccaaggactacaggggcaccagccccaagaaaaagagaaaagtctaagctgccttctgcggggcttgccttctggccatgcccttcttctctcccttgcacctgtacctcttggtctttgaataaagcctgagtaggaaggctagcaaaaaaaaaaaaaaaaaaaaaaaaaaaaaaaaaaaaaaaaaaaaaaaaaaaaaaaaaaaaaaaaaaaaaaaaaaaaaaaa

SEQ ID NO: 7199 - RNA, 5797 nt, synthetic construct
  source 1..5797: mol_type = other RNA
aggaaataagagagaaaagaagagtaagaagaaatataagagccaccatggcccctaagaagaagcgtaaagtgagccggatggaacgcctcgtctacgaggtgcggcagaagtgcagaaacatcgaggacatctgcatctcctgcggatctctgaacgtgaccctggagcacccactgttcatcggcggcatgtgccagaactgtaaaaactgttttctggagtgtgcctatcaatacgacgatgacggctaccagagctactgcaccatctgttgcggcggaagagaggtgctgatgtgtggaaataacaactgctgccggtgcttctgcgtggaatgcgtggacctgctggtgggccccggcgccgcccaggccgctattaaggaagatccttggaactgctacatgtgcggccacaagggcacatacggcctgctgagacggagagaggactggcctagcagactgcagatgttcttcgccaataaccacgaccaggagttcgacccccctaaggtgtaccctcccgtccccgccgagaagagaaagcccatccgggtcctgagcctgttcgatggcatcgccaccggtctgctggtgctgaaggacctgggcatccaggtggataggtacattgcctccgaggtgtgcgaggactccatcaccgtgggaatggtgcgtcatcagggcaagatcatgtacgtgggcgacgtgcggagcgtgacacagaagcatatccaggagtggggccctttcgacctggtgatcggcggcagcccttgcaatgacctgagcatcgtgaacccagcccggaagggcctgtacgagggaaccggcagactgttcttcgagttttacagactgctgcacgacgcccggcctaaggaaggcgacgaccggcccttcttttggctgttcgagaatgtggtggccatgggagtcagcgacaagcgggatattagccggttcctggagagcaaccccgtgatgatcgatgccaaggaagtgagcgccgcccaccgggccagatacttctggggcaatctgcctggcatgaacagacccctggccagcaccgtgaacgacaagctggagctgcaggagtgcctggagcacggccggatcgccaagttcagcaaggtgagaaccatcaccacccgaagcaacagcatcaaacaaggcaaggaccagcactttcctgtgttcatgaacgagaaggaggacatcctgtggtgtaccgagatggagagagtgttcgggttcccagtccactacacagatgtcagcaacatgtctagactggccagacagagactgctgggaagaagctggtccgtccctgtgatcagacacctgttcgcccctctgaaggagtacttcgcctgcgtgagcagcggcaacagcaacgccaacagccggggccccagcttctctagcggcctggtgccactgtccctgagagggagccacatgggccccatggagatctacaaaaccgtgagcgcctggaagcggcagcctgtgcgcgtgctgagcctgtttcggaatatcgataaagtcctgaaaagcctgggattcctggagagcggctctggctccggcggtggcaccctgaagtacgtggaggatgtgacaaacgtggtcagacgggatgtggagaagtggggccccttcgatctggtgtacggcagcacccaacccctgggcagctcttgtgaccggtgccctggctggtacatgtttcagttccaccggatcctgcagtacgccctgccgagacaggagtcccagcggccattcttttggattttcatggacaacttgctgctgaccgaggatgaccaggaaactaccactcggttcctgcagaccgaagccgtgaccctgcaggacgtgagaggccgggactaccagaacgccatgcgggtgtggtccaacatccctggactgaaaagcaagcacgcacctctgacccctaaagaagaggagtacctgcaggcccaggtgcggagcagaagcaagctggacgcccctaaggtggatctgctggtgaagaattgcctcctgcccctgagagagtacttcaagtatttcagccagaatagtctgcccctgggcggcccaagcagcggcgcccctcctcccagcggcggcagcccagccggctccccaacctctaccgaggagggcacctctgagtccgccacccccgagagcggccctggcacctccaccgagcccagcgagggcagcgcacccggcagccctgccggcagccccacctccacagaggagggaaccagcaccgagcccagcgaaggcagcgccccaggcaccagcaccgagcctagtgagggcggctctggcggcggcagcgcccaggagattaaacggatcaacaagatcagaagaagacttgtgaaagacagcaacaccaagaaggccggcaagacaggccccatgaaaaccctgctggttagagtgatgacacccgatctgagagagcggctggaaaacctgagaaagaagcctgaaaatatcccccagcccatcagcaatacatctagagccaacctgaataagctgctgaccgattacaccgaaatgaagaaggcgatcctgcatgtgtactgggaagagttccagaaggaccctgtgggcctgatgagccgggtggcccagcctgccagcaagaagatcgatcagaacaagctgaaacctgagatggacgagaagggcaacctgaccaccgccggctttgcctgctctcagtgtggccagcccctgttcgtgtacaagctggagcaggtgtctgagaagggcaaggcttacaccaactacttcggacggtgcaatgtggccgagcacgaaaagctgatcctgctggcccagctgaagcccgagaaggatagcgacgaagccgtgacatatagcctgggaaagtttgggcagagggccctggatttctacagcattcatgtgaccaaggagtccacccaccccgtgaagcccctggcccagatcgccggaaacagatacgcctccggacctgtgggaaaggccctgagcgacgcatgtatgggcacaatcgcctccttcctgtctaagtaccaggacatcatcatcgaacaccagaaggtggtgaagggcaaccagaagagactggagagcctgcgggagctggccggcaaggaaaacctggaataccctagcgtgaccctgccacctcagcctcacaccaaggagggcgttgatgcctacaacgaagtgatcgcccgggtgcgaatgtgggtgaacctgaacctgtggcagaagctgaagctaagcagagatgatgccaagcctctgctgagactgaagggattcccttcctttcctctggtcgagagacaggccaacgaagtggactggtgggacatggtgtgtaacgtgaagaagctgatcaacgagaaaaaggaggatggcaaggtgttttggcagaatctggctggctacaagagacaggaagccctgagaccatacctgagcagcgaggaagatcggaagaagggaaagaaattcgctcggtaccagctgggcgacctgctgctgcacctggaaaagaagcacggcgaggactggggaaaggtgtacgacgaggcctgggagcggattgacaagaaagtggaaggcctgagcaagcacatcaagctggaagaggaacggagaagcgaggacgcccagagcaaggccgccctgaccgactggctgcgggctaaggccagcttcgtgatcgagggcctgaaggaggccgacaaggacgagttctgcagatgcgagctgaagctgcagaagtggtacggggacctgcggggaaagcccttcgccatcgaagccgagaacagcatcctggacatcagcggcttcagcaagcagtacaactgtgccttcatctggcagaaggacggcgtgaagaagctgaacctgtacctgatcatcaactacttcaagggcggcaagctgcggttcaagaagatcaaacctgaagccttcgaagccaacagattctacaccgtgatcaacaaaaagagcggcgagatcgtgcccatggaggtgaacttcaacttcgacgaccccaacctgatcatcctgcctctggcctttggcaagagacagggcagagaattcatctggaacgacctgctgtccctggaaaccggcagcctgaagctggccaacggaagagtgatcgagaagacactgtacaacagaagaacccggcaggatgagcctgccctgttcgtggccctgaccttcgagcggcgggaggtcctggactcctccaatatcaaaccaatgaacctgatcggcgtggcaagaggcgaaaacatccccgccgtgatcgccctgaccgaccccgagggctgcccactgagccggtttaaggatagcctgggaaacccaacccacatcctgagaatcggcgagagctataaggagaagcagcggaccatccaggccaagaaggaggtggagcagcggagagccggcggctacagccggaagtacgccagcaaagccaagaatctggcagacgatatggtgagaaacaccgctagagatctgctgtactacgccgtgacccaggatgccatgctgatcttcgccaacctgagccggggcttcggccggcagggcaagcggaccttcatggccgagagacagtacacacggatggaggactggctgaccgccaagctggcctacgagggcctgagcaagacctacctgtccaagacactggcccagtacacctccaagacatgcagcaactgtgggtttaccatcaccagcgccgactacgacagggtgctggagaagctgaagaagacagcaacaggctggatgaccacaattaacggcaaggagctgaaggtggagggccagattacctactacaacagatacaagagacagaacgtagtcaaggacctgtccgtcgagctggatagactgagcgaagaatctgtgaacaacgacatctcctcctggacaaagggcagaagcggagaagctctgagcctcctgaagaaaagattctcccatagacccgtgcaggagaagttcgtgtgcctgaactgcggcttcgagacacacgcagccgagcaagccgccctgaacatcgccagatcctggctgttcctgcggagccaggagtacaagaaataccagacaaacaagacaaccggcaacaccgataagagagccttcgtcgagacctggcagtccttttaccggaagaagcttaaggaggtgtggaaacctgccgtgcggtctggcggatctggcggaggctccacaagcgtgaaggagagcgtgaccttcaaggacgtggccatcgacttcaccctggaggagtggaggctgatggaccccacccagaggaacctgcacaaggacgtgatgctggagaactacaggaacctggtgagcctgggcctggccgtgagcaagcccgacatgatcagccacctggagaacggcaagggcccctggcccaagcccgccaccaagaacgccaccaggaccaaggacatcagcgaggacaccagccccaagaaaaagagaaaagtctaagctgccttctgcggggcttgccttctggccatgcccttcttctctcccttgcacctgtacctcttggtctttgaataaagcctgagtaggaaggctagcaaaaaaaaaaaaaaaaaaaaaaaaaaaaaaaaaaaaaaaaaaaaaaaaaaaaaaaaaaaaaaaaaaaaaaaaaaaaaaaa

SEQ ID NO: 7200 - RNA, 5797 nt, synthetic construct
  source 1..5797: mol_type = other RNA
aggaaataagagagaaaagaagagtaagaagaaatataagagccaccatggcccctaagaagaagcgtaaagtgagccggatggaacgcctcgtctacgaggtgcggcagaagtgcagaaacatcgaggacatctgcatctcctgcggatctctgaacgtgaccctggagcacccactgttcatcggcggcatgtgccagaactgtaaaaactgttttctggagtgtgcctatcaatacgacgatgacggctaccagagctactgcaccatctgttgcggcggaagagaggtgctgatgtgtggaaataacaactgctgccggtgcttctgcgtggaatgcgtggacctgctggtgggccccggcgccgcccaggccgctattaaggaagatccttggaactgctacatgtgcggccacaagggcacatacggcctgctgagacggagagaggactggcctagcagactgcagatgttcttcgccaataaccacgaccaggagttcgacccccctaaggtgtaccctcccgtccccgccgagaagagaaagcccatccgggtcctgagcctgttcgatggcatcgccaccggtctgctggtgctgaaggacctgggcatccaggtggataggtacattgcctccgaggtgtgcgaggactccatcaccgtgggaatggtgcgtcatcagggcaagatcatgtacgtgggcgacgtgcggagcgtgacacagaagcatatccaggagtggggccctttcgacctggtgatcggcggcagcccttgcaatgacctgagcatcgtgaacccagcccggaagggcctgtacgagggaaccggcagactgttcttcgagttttacagactgctgcacgacgcccggcctaaggaaggcgacgaccggcccttcttttggctgttcgagaatgtggtggccatgggagtcagcgacaagcgggatattagccggttcctggagagcaaccccgtgatgatcgatgccaaggaagtgagcgccgcccaccgggccagatacttctggggcaatctgcctggcatgaacagacccctggccagcaccgtgaacgacaagctggagctgcaggagtgcctggagcacggccggatcgccaagttcagcaaggtgagaaccatcaccacccgaagcaacagcatcaaacaaggcaaggaccagcactttcctgtgttcatgaacgagaaggaggacatcctgtggtgtaccgagatggagagagtgttcgggttcccagtccactacacagatgtcagcaacatgtctagactggccagacagagactgctgggaagaagctggtccgtccctgtgatcagacacctgttcgcccctctgaaggagtacttcgcctgcgtgagcagcggcaacagcaacgccaacagccggggccccagcttctctagcggcctggtgccactgtccctgagagggagccacatgggccccatggagatctacaaaaccgtgagcgcctggaagcggcagcctgtgcgcgtgctgagcctgtttcggaatatcgataaagtcctgaaaagcctgggattcctggagagcggctctggctccggcggtggcaccctgaagtacgtggaggatgtgacaaacgtggtcagacgggatgtggagaagtggggccccttcgatctggtgtacggcagcacccaacccctgggcagctcttgtgaccggtgccctggctggtacatgtttcagttccaccggatcctgcagtacgccctgccgagacaggagtcccagcggccattcttttggattttcatggacaacttgctgctgaccgaggatgaccaggaaactaccactcggttcctgcagaccgaagccgtgaccctgcaggacgtgagaggccgggactaccagaacgccatgcgggtgtggtccaacatccctggactgaaaagcaagcacgcacctctgacccctaaagaagaggagtacctgcaggcccaggtgcggagcagaagcaagctggacgcccctaaggtggatctgctggtgaagaattgcctcctgcccctgagagagtacttcaagtatttcagccagaatagtctgcccctgggcggcccaagcagcggcgcccctcctcccagcggcggcagcccagccggctccccaacctctaccgaggagggcacctctgagtccgccacccccgagagcggccctggcacctccaccgagcccagcgagggcagcgcacccggcagccctgccggcagccccacctccacagaggagggaaccagcaccgagcccagcgaaggcagcgccccaggcaccagcaccgagcctagtgagggcggctctggcggcggcagcgcccaggagattaaacggatcaacaagatcagaagaagacttgtgaaagacagcaacaccaagaaggccggcaagacaggccccatgaaaaccctgctggttagagtgatgacacccgatctgagagagcggctggaaaacctgagaaagaagcctgaaaatatcccccagcccatcagcaatacatctagagccaacctgaataagctgctgaccgattacaccgaaatgaagaaggcgatcctgcatgtgtactgggaagagttccagaaggaccctgtgggcctgatgagccgggtggcccagcctgccagcaagaagatcgatcagaacaagctgaaacctgagatggacgagaagggcaacctgaccaccgccggctttgcctgctctcagtgtggccagcccctgttcgtgtacaagctggagcaggtgtctgagaagggcaaggcttacaccaactacttcggacggtgcaatgtggccgagcacgaaaagctgatcctgctggcccagctgaagcccgagaaggatagcgacgaagccgtgacatatagcctgggaaagtttgggcagagggccctggatttctacagcattcatgtgaccaaggagtccacccaccccgtgaagcccctggcccagatcgccggaaacagatacgcctccggacctgtgggaaaggccctgagcgacgcatgtatgggcacaatcgcctccttcctgtctaagtaccaggacatcatcatcgaacaccagaaggtggtgaagggcaaccagaagagactggagagcctgcgggagctggccggcaaggaaaacctggaataccctagcgtgaccctgccacctcagcctcacaccaaggagggcgttgatgcctacaacgaagtgatcgcccgggtgcgaatgtgggtgaacctgaacctgtggcagaagctgaagctaagcagagatgatgccaagcctctgctgagactgaagggattcccttcctttcctctggtcgagagacaggccaacgaagtggactggtgggacatggtgtgtaacgtgaagaagctgatcaacgagaaaaaggaggatggcaaggtgttttggcagaatctggctggctacaagagacaggaagccctgagaccatacctgagcagcgaggaagatcggaagaagggaaagaaattcgctcggtaccagctgggcgacctgctgctgcacctggaaaagaagcacggcgaggactggggaaaggtgtacgacgaggcctgggagcggattgacaagaaagtggaaggcctgagcaagcacatcaagctggaagaggaacggagaagcgaggacgcccagagcaaggccgccctgaccgactggctgcgggctaaggccagcttcgtgatcgagggcctgaaggaggccgacaaggacgagttctgcagatgcgagctgaagctgcagaagtggtacggggacctgcggggaaagcccttcgccatcgaagccgagaacagcatcctggacatcagcggcttcagcaagcagtacaactgtgccttcatctggcagaaggacggcgtgaagaagctgaacctgtacctgatcatcaactacttcaagggcggcaagctgcggttcaagaagatcaaacctgaagccttcgaagccaacagattctacaccgtgatcaacaaaaagagcggcgagatcgtgcccatggaggtgaacttcaacttcgacgaccccaacctgatcatcctgcctctggcctttggcaagagacagggcagagaattcatctggaacgacctgctgtccctggaaaccggcagcctgaagctggccaacggaagagtgatcgagaagacactgtacaacagaagaacccggcaggatgagcctgccctgttcgtggccctgaccttcgagcggcgggaggtcctggactcctccaatatcaaaccaatgaacctgatcggcgtggcaagaggcgaaaacatccccgccgtgatcgccctgaccgaccccgagggctgcccactgagccggtttaaggatagcctgggaaacccaacccacatcctgagaatcggcgagagctataaggagaagcagcggaccatccaggccaagaaggaggtggagcagcggagagccggcggctacagccggaagtacgccagcaaagccaagaatctggcagacgatatggtgagaaacaccgctagagatctgctgtactacgccgtgacccaggatgccatgctgatcttcgccaacctgagccggggcttcggccggcagggcaagcggaccttcatggccgagagacagtacacacggatggaggactggctgaccgccaagctggcctacgagggcctgagcaagacctacctgtccaagacactggcccagtacacctccaagacatgcagcaactgtgggtttaccatcaccagcgccgactacgacagggtgctggagaagctgaagaagacagcaacaggctggatgaccacaattaacggcaaggagctgaaggtggagggccagattacctactacaacagatacaagagacagaacgtagtcaaggacctgtccgtcgagctggatagactgagcgaagaatctgtgaacaacgacatctcctcctggacaaagggcagaagcggagaagctctgagcctcctgaagaaaagattctcccatagacccgtgcaggagaagttcgtgtgcctgaactgcggcttcgagacacacgcagccgagcaagccgccctgaacatcgccagatcctggctgttcctgcggagccaggagtacaagaaataccagacaaacaagacaaccggcaacaccgataagagagccttcgtcgagacctggcagtccttttaccggaagaagcttaaggaggtgtggaaacctgccgtgcggtctggcggatctggcggaggctccacaagcgcccaggagatggtgaccttccaggacgtggccgtggacttcaccagggaggagtggtgcctgctgagccccccccagaaggagctgtacaaggaggtgatgctggagaacgccaggaacctgctgagcgtgggcctgcccgccctgcccgaggacgtgatcagctacctggagcagagggaggccccctggatgctggagagggagggccccaggagctgctgccccggcgagatcctgctgaccagccccaagaaaaagagaaaagtctaagctgccttctgcggggcttgccttctggccatgcccttcttctctcccttgcacctgtacctcttggtctttgaataaagcctgagtaggaaggctagcaaaaaaaaaaaaaaaaaaaaaaaaaaaaaaaaaaaaaaaaaaaaaaaaaaaaaaaaaaaaaaaaaaaaaaaaaaaaaaaa

SEQ ID NO: 7201 - RNA, 5797 nt, synthetic construct
  source 1..5797: mol_type = other RNA
aggaaataagagagaaaagaagagtaagaagaaatataagagccaccatggcccctaagaagaagcgtaaagtgagccggatggaacgcctcgtctacgaggtgcggcagaagtgcagaaacatcgaggacatctgcatctcctgcggatctctgaacgtgaccctggagcacccactgttcatcggcggcatgtgccagaactgtaaaaactgttttctggagtgtgcctatcaatacgacgatgacggctaccagagctactgcaccatctgttgcggcggaagagaggtgctgatgtgtggaaataacaactgctgccggtgcttctgcgtggaatgcgtggacctgctggtgggccccggcgccgcccaggccgctattaaggaagatccttggaactgctacatgtgcggccacaagggcacatacggcctgctgagacggagagaggactggcctagcagactgcagatgttcttcgccaataaccacgaccaggagttcgacccccctaaggtgtaccctcccgtccccgccgagaagagaaagcccatccgggtcctgagcctgttcgatggcatcgccaccggtctgctggtgctgaaggacctgggcatccaggtggataggtacattgcctccgaggtgtgcgaggactccatcaccgtgggaatggtgcgtcatcagggcaagatcatgtacgtgggcgacgtgcggagcgtgacacagaagcatatccaggagtggggccctttcgacctggtgatcggcggcagcccttgcaatgacctgagcatcgtgaacccagcccggaagggcctgtacgagggaaccggcagactgttcttcgagttttacagactgctgcacgacgcccggcctaaggaaggcgacgaccggcccttcttttggctgttcgagaatgtggtggccatgggagtcagcgacaagcgggatattagccggttcctggagagcaaccccgtgatgatcgatgccaaggaagtgagcgccgcccaccgggccagatacttctggggcaatctgcctggcatgaacagacccctggccagcaccgtgaacgacaagctggagctgcaggagtgcctggagcacggccggatcgccaagttcagcaaggtgagaaccatcaccacccgaagcaacagcatcaaacaaggcaaggaccagcactttcctgtgttcatgaacgagaaggaggacatcctgtggtgtaccgagatggagagagtgttcgggttcccagtccactacacagatgtcagcaacatgtctagactggccagacagagactgctgggaagaagctggtccgtccctgtgatcagacacctgttcgcccctctgaaggagtacttcgcctgcgtgagcagcggcaacagcaacgccaacagccggggccccagcttctctagcggcctggtgccactgtccctgagagggagccacatgggccccatggagatctacaaaaccgtgagcgcctggaagcggcagcctgtgcgcgtgctgagcctgtttcggaatatcgataaagtcctgaaaagcctgggattcctggagagcggctctggctccggcggtggcaccctgaagtacgtggaggatgtgacaaacgtggtcagacgggatgtggagaagtggggccccttcgatctggtgtacggcagcacccaacccctgggcagctcttgtgaccggtgccctggctggtacatgtttcagttccaccggatcctgcagtacgccctgccgagacaggagtcccagcggccattcttttggattttcatggacaacttgctgctgaccgaggatgaccaggaaactaccactcggttcctgcagaccgaagccgtgaccctgcaggacgtgagaggccgggactaccagaacgccatgcgggtgtggtccaacatccctggactgaaaagcaagcacgcacctctgacccctaaagaagaggagtacctgcaggcccaggtgcggagcagaagcaagctggacgcccctaaggtggatctgctggtgaagaattgcctcctgcccctgagagagtacttcaagtatttcagccagaatagtctgcccctgggcggcccaagcagcggcgcccctcctcccagcggcggcagcccagccggctccccaacctctaccgaggagggcacctctgagtccgccacccccgagagcggccctggcacctccaccgagcccagcgagggcagcgcacccggcagccctgccggcagccccacctccacagaggagggaaccagcaccgagcccagcgaaggcagcgccccaggcaccagcaccgagcctagtgagggcggctctggcggcggcagcgcccaggagattaaacggatcaacaagatcagaagaagacttgtgaaagacagcaacaccaagaaggccggcaagacaggccccatgaaaaccctgctggttagagtgatgacacccgatctgagagagcggctggaaaacctgagaaagaagcctgaaaatatcccccagcccatcagcaatacatctagagccaacctgaataagctgctgaccgattacaccgaaatgaagaaggcgatcctgcatgtgtactgggaagagttccagaaggaccctgtgggcctgatgagccgggtggcccagcctgccagcaagaagatcgatcagaacaagctgaaacctgagatggacgagaagggcaacctgaccaccgccggctttgcctgctctcagtgtggccagcccctgttcgtgtacaagctggagcaggtgtctgagaagggcaaggcttacaccaactacttcggacggtgcaatgtggccgagcacgaaaagctgatcctgctggcccagctgaagcccgagaaggatagcgacgaagccgtgacatatagcctgggaaagtttgggcagagggccctggatttctacagcattcatgtgaccaaggagtccacccaccccgtgaagcccctggcccagatcgccggaaacagatacgcctccggacctgtgggaaaggccctgagcgacgcatgtatgggcacaatcgcctccttcctgtctaagtaccaggacatcatcatcgaacaccagaaggtggtgaagggcaaccagaagagactggagagcctgcgggagctggccggcaaggaaaacctggaataccctagcgtgaccctgccacctcagcctcacaccaaggagggcgttgatgcctacaacgaagtgatcgcccgggtgcgaatgtgggtgaacctgaacctgtggcagaagctgaagctaagcagagatgatgccaagcctctgctgagactgaagggattcccttcctttcctctggtcgagagacaggccaacgaagtggactggtgggacatggtgtgtaacgtgaagaagctgatcaacgagaaaaaggaggatggcaaggtgttttggcagaatctggctggctacaagagacaggaagccctgagaccatacctgagcagcgaggaagatcggaagaagggaaagaaattcgctcggtaccagctgggcgacctgctgctgcacctggaaaagaagcacggcgaggactggggaaaggtgtacgacgaggcctgggagcggattgacaagaaagtggaaggcctgagcaagcacatcaagctggaagaggaacggagaagcgaggacgcccagagcaaggccgccctgaccgactggctgcgggctaaggccagcttcgtgatcgagggcctgaaggaggccgacaaggacgagttctgcagatgcgagctgaagctgcagaagtggtacggggacctgcggggaaagcccttcgccatcgaagccgagaacagcatcctggacatcagcggcttcagcaagcagtacaactgtgccttcatctggcagaaggacggcgtgaagaagctgaacctgtacctgatcatcaactacttcaagggcggcaagctgcggttcaagaagatcaaacctgaagccttcgaagccaacagattctacaccgtgatcaacaaaaagagcggcgagatcgtgcccatggaggtgaacttcaacttcgacgaccccaacctgatcatcctgcctctggcctttggcaagagacagggcagagaattcatctggaacgacctgctgtccctggaaaccggcagcctgaagctggccaacggaagagtgatcgagaagacactgtacaacagaagaacccggcaggatgagcctgccctgttcgtggccctgaccttcgagcggcgggaggtcctggactcctccaatatcaaaccaatgaacctgatcggcgtggcaagaggcgaaaacatccccgccgtgatcgccctgaccgaccccgagggctgcccactgagccggtttaaggatagcctgggaaacccaacccacatcctgagaatcggcgagagctataaggagaagcagcggaccatccaggccaagaaggaggtggagcagcggagagccggcggctacagccggaagtacgccagcaaagccaagaatctggcagacgatatggtgagaaacaccgctagagatctgctgtactacgccgtgacccaggatgccatgctgatcttcgccaacctgagccggggcttcggccggcagggcaagcggaccttcatggccgagagacagtacacacggatggaggactggctgaccgccaagctggcctacgagggcctgagcaagacctacctgtccaagacactggcccagtacacctccaagacatgcagcaactgtgggtttaccatcaccagcgccgactacgacagggtgctggagaagctgaagaagacagcaacaggctggatgaccacaattaacggcaaggagctgaaggtggagggccagattacctactacaacagatacaagagacagaacgtagtcaaggacctgtccgtcgagctggatagactgagcgaagaatctgtgaacaacgacatctcctcctggacaaagggcagaagcggagaagctctgagcctcctgaagaaaagattctcccatagacccgtgcaggagaagttcgtgtgcctgaactgcggcttcgagacacacgcagccgagcaagccgccctgaacatcgccagatcctggctgttcctgcggagccaggagtacaagaaataccagacaaacaagacaaccggcaacaccgataagagagccttcgtcgagacctggcagtccttttaccggaagaagcttaaggaggtgtggaaacctgccgtgcggtctggcggatctggcggaggctccacaagcgtgagcttcgaggacgtggccgtgtacttcacccaggaggagtggaccctgctggacagcgcccagagggacctgtacagggacgtgatgctggagacctgcgagaacctggccagcatcggcaacctgctgaaccacagcgtgatgtactggctggagggcgaggagaacctgggcaccgtgcaggagggcgacccccaggagtggaggctgaagaccaagggcagcaccctgaggcccgacaccagccccaagaaaaagagaaaagtctaagctgccttctgcggggcttgccttctggccatgcccttcttctctcccttgcacctgtacctcttggtctttgaataaagcctgagtaggaaggctagcaaaaaaaaaaaaaaaaaaaaaaaaaaaaaaaaaaaaaaaaaaaaaaaaaaaaaaaaaaaaaaaaaaaaaaaaaaaaaaaa

SEQ ID NO: 7202 - RNA, 5797 nt, synthetic construct
  source 1..5797: mol_type = other RNA
aggaaataagagagaaaagaagagtaagaagaaatataagagccaccatggcccctaagaagaagcgtaaagtgagccggatggaacgcctcgtctacgaggtgcggcagaagtgcagaaacatcgaggacatctgcatctcctgcggatctctgaacgtgaccctggagcacccactgttcatcggcggcatgtgccagaactgtaaaaactgttttctggagtgtgcctatcaatacgacgatgacggctaccagagctactgcaccatctgttgcggcggaagagaggtgctgatgtgtggaaataacaactgctgccggtgcttctgcgtggaatgcgtggacctgctggtgggccccggcgccgcccaggccgctattaaggaagatccttggaactgctacatgtgcggccacaagggcacatacggcctgctgagacggagagaggactggcctagcagactgcagatgttcttcgccaataaccacgaccaggagttcgacccccctaaggtgtaccctcccgtccccgccgagaagagaaagcccatccgggtcctgagcctgttcgatggcatcgccaccggtctgctggtgctgaaggacctgggcatccaggtggataggtacattgcctccgaggtgtgcgaggactccatcaccgtgggaatggtgcgtcatcagggcaagatcatgtacgtgggcgacgtgcggagcgtgacacagaagcatatccaggagtggggccctttcgacctggtgatcggcggcagcccttgcaatgacctgagcatcgtgaacccagcccggaagggcctgtacgagggaaccggcagactgttcttcgagttttacagactgctgcacgacgcccggcctaaggaaggcgacgaccggcccttcttttggctgttcgagaatgtggtggccatgggagtcagcgacaagcgggatattagccggttcctggagagcaaccccgtgatgatcgatgccaaggaagtgagcgccgcccaccgggccagatacttctggggcaatctgcctggcatgaacagacccctggccagcaccgtgaacgacaagctggagctgcaggagtgcctggagcacggccggatcgccaagttcagcaaggtgagaaccatcaccacccgaagcaacagcatcaaacaaggcaaggaccagcactttcctgtgttcatgaacgagaaggaggacatcctgtggtgtaccgagatggagagagtgttcgggttcccagtccactacacagatgtcagcaacatgtctagactggccagacagagactgctgggaagaagctggtccgtccctgtgatcagacacctgttcgcccctctgaaggagtacttcgcctgcgtgagcagcggcaacagcaacgccaacagccggggccccagcttctctagcggcctggtgccactgtccctgagagggagccacatgggccccatggagatctacaaaaccgtgagcgcctggaagcggcagcctgtgcgcgtgctgagcctgtttcggaatatcgataaagtcctgaaaagcctgggattcctggagagcggctctggctccggcggtggcaccctgaagtacgtggaggatgtgacaaacgtggtcagacgggatgtggagaagtggggccccttcgatctggtgtacggcagcacccaacccctgggcagctcttgtgaccggtgccctggctggtacatgtttcagttccaccggatcctgcagtacgccctgccgagacaggagtcccagcggccattcttttggattttcatggacaacttgctgctgaccgaggatgaccaggaaactaccactcggttcctgcagaccgaagccgtgaccctgcaggacgtgagaggccgggactaccagaacgccatgcgggtgtggtccaacatccctggactgaaaagcaagcacgcacctctgacccctaaagaagaggagtacctgcaggcccaggtgcggagcagaagcaagctggacgcccctaaggtggatctgctggtgaagaattgcctcctgcccctgagagagtacttcaagtatttcagccagaatagtctgcccctgggcggcccaagcagcggcgcccctcctcccagcggcggcagcccagccggctccccaacctctaccgaggagggcacctctgagtccgccacccccgagagcggccctggcacctccaccgagcccagcgagggcagcgcacccggcagccctgccggcagccccacctccacagaggagggaaccagcaccgagcccagcgaaggcagcgccccaggcaccagcaccgagcctagtgagggcggctctggcggcggcagcgcccaggagattaaacggatcaacaagatcagaagaagacttgtgaaagacagcaacaccaagaaggccggcaagacaggccccatgaaaaccctgctggttagagtgatgacacccgatctgagagagcggctggaaaacctgagaaagaagcctgaaaatatcccccagcccatcagcaatacatctagagccaacctgaataagctgctgaccgattacaccgaaatgaagaaggcgatcctgcatgtgtactgggaagagttccagaaggaccctgtgggcctgatgagccgggtggcccagcctgccagcaagaagatcgatcagaacaagctgaaacctgagatggacgagaagggcaacctgaccaccgccggctttgcctgctctcagtgtggccagcccctgttcgtgtacaagctggagcaggtgtctgagaagggcaaggcttacaccaactacttcggacggtgcaatgtggccgagcacgaaaagctgatcctgctggcccagctgaagcccgagaaggatagcgacgaagccgtgacatatagcctgggaaagtttgggcagagggccctggatttctacagcattcatgtgaccaaggagtccacccaccccgtgaagcccctggcccagatcgccggaaacagatacgcctccggacctgtgggaaaggccctgagcgacgcatgtatgggcacaatcgcctccttcctgtctaagtaccaggacatcatcatcgaacaccagaaggtggtgaagggcaaccagaagagactggagagcctgcgggagctggccggcaaggaaaacctggaataccctagcgtgaccctgccacctcagcctcacaccaaggagggcgttgatgcctacaacgaagtgatcgcccgggtgcgaatgtgggtgaacctgaacctgtggcagaagctgaagctaagcagagatgatgccaagcctctgctgagactgaagggattcccttcctttcctctggtcgagagacaggccaacgaagtggactggtgggacatggtgtgtaacgtgaagaagctgatcaacgagaaaaaggaggatggcaaggtgttttggcagaatctggctggctacaagagacaggaagccctgagaccatacctgagcagcgaggaagatcggaagaagggaaagaaattcgctcggtaccagctgggcgacctgctgctgcacctggaaaagaagcacggcgaggactggggaaaggtgtacgacgaggcctgggagcggattgacaagaaagtggaaggcctgagcaagcacatcaagctggaagaggaacggagaagcgaggacgcccagagcaaggccgccctgaccgactggctgcgggctaaggccagcttcgtgatcgagggcctgaaggaggccgacaaggacgagttctgcagatgcgagctgaagctgcagaagtggtacggggacctgcggggaaagcccttcgccatcgaagccgagaacagcatcctggacatcagcggcttcagcaagcagtacaactgtgccttcatctggcagaaggacggcgtgaagaagctgaacctgtacctgatcatcaactacttcaagggcggcaagctgcggttcaagaagatcaaacctgaagccttcgaagccaacagattctacaccgtgatcaacaaaaagagcggcgagatcgtgcccatggaggtgaacttcaacttcgacgaccccaacctgatcatcctgcctctggcctttggcaagagacagggcagagaattcatctggaacgacctgctgtccctggaaaccggcagcctgaagctggccaacggaagagtgatcgagaagacactgtacaacagaagaacccggcaggatgagcctgccctgttcgtggccctgaccttcgagcggcgggaggtcctggactcctccaatatcaaaccaatgaacctgatcggcgtggcaagaggcgaaaacatccccgccgtgatcgccctgaccgaccccgagggctgcccactgagccggtttaaggatagcctgggaaacccaacccacatcctgagaatcggcgagagctataaggagaagcagcggaccatccaggccaagaaggaggtggagcagcggagagccggcggctacagccggaagtacgccagcaaagccaagaatctggcagacgatatggtgagaaacaccgctagagatctgctgtactacgccgtgacccaggatgccatgctgatcttcgccaacctgagccggggcttcggccggcagggcaagcggaccttcatggccgagagacagtacacacggatggaggactggctgaccgccaagctggcctacgagggcctgagcaagacctacctgtccaagacactggcccagtacacctccaagacatgcagcaactgtgggtttaccatcaccagcgccgactacgacagggtgctggagaagctgaagaagacagcaacaggctggatgaccacaattaacggcaaggagctgaaggtggagggccagattacctactacaacagatacaagagacagaacgtagtcaaggacctgtccgtcgagctggatagactgagcgaagaatctgtgaacaacgacatctcctcctggacaaagggcagaagcggagaagctctgagcctcctgaagaaaagattctcccatagacccgtgcaggagaagttcgtgtgcctgaactgcggcttcgagacacacgcagccgagcaagccgccctgaacatcgccagatcctggctgttcctgcggagccaggagtacaagaaataccagacaaacaagacaaccggcaacaccgataagagagccttcgtcgagacctggcagtccttttaccggaagaagcttaaggaggtgtggaaacctgccgtgcggtctggcggatctggcggaggctccacaagcgcctgggcccccctgagcttcgaggacgtggccgtgggcttcagctgggaggagtggcagctgctggcccccagccagaaggacctgtacagggacgtgatgctggagaactacaggaacctggtgagcgtgggctaccaggccagcaagcccgacagcgtgttccagctggagcagggcgagcccccctggatcgtggagggcgccgcccagagccagacctgccaggaggagatctgggagaccagccccaagaaaaagagaaaagtctaagctgccttctgcggggcttgccttctggccatgcccttcttctctcccttgcacctgtacctcttggtctttgaataaagcctgagtaggaaggctagcaaaaaaaaaaaaaaaaaaaaaaaaaaaaaaaaaaaaaaaaaaaaaaaaaaaaaaaaaaaaaaaaaaaaaaaaaaaaaaaa

SEQ ID NO: 7203 - RNA, 5797 nt, synthetic construct
  source 1..5797: mol_type = other RNA
aggaaataagagagaaaagaagagtaagaagaaatataagagccaccatggcccctaagaagaagcgtaaagtgagccggatggaacgcctcgtctacgaggtgcggcagaagtgcagaaacatcgaggacatctgcatctcctgcggatctctgaacgtgaccctggagcacccactgttcatcggcggcatgtgccagaactgtaaaaactgttttctggagtgtgcctatcaatacgacgatgacggctaccagagctactgcaccatctgttgcggcggaagagaggtgctgatgtgtggaaataacaactgctgccggtgcttctgcgtggaatgcgtggacctgctggtgggccccggcgccgcccaggccgctattaaggaagatccttggaactgctacatgtgcggccacaagggcacatacggcctgctgagacggagagaggactggcctagcagactgcagatgttcttcgccaataaccacgaccaggagttcgacccccctaaggtgtaccctcccgtccccgccgagaagagaaagcccatccgggtcctgagcctgttcgatggcatcgccaccggtctgctggtgctgaaggacctgggcatccaggtggataggtacattgcctccgaggtgtgcgaggactccatcaccgtgggaatggtgcgtcatcagggcaagatcatgtacgtgggcgacgtgcggagcgtgacacagaagcatatccaggagtggggccctttcgacctggtgatcggcggcagcccttgcaatgacctgagcatcgtgaacccagcccggaagggcctgtacgagggaaccggcagactgttcttcgagttttacagactgctgcacgacgcccggcctaaggaaggcgacgaccggcccttcttttggctgttcgagaatgtggtggccatgggagtcagcgacaagcgggatattagccggttcctggagagcaaccccgtgatgatcgatgccaaggaagtgagcgccgcccaccgggccagatacttctggggcaatctgcctggcatgaacagacccctggccagcaccgtgaacgacaagctggagctgcaggagtgcctggagcacggccggatcgccaagttcagcaaggtgagaaccatcaccacccgaagcaacagcatcaaacaaggcaaggaccagcactttcctgtgttcatgaacgagaaggaggacatcctgtggtgtaccgagatggagagagtgttcgggttcccagtccactacacagatgtcagcaacatgtctagactggccagacagagactgctgggaagaagctggtccgtccctgtgatcagacacctgttcgcccctctgaaggagtacttcgcctgcgtgagcagcggcaacagcaacgccaacagccggggccccagcttctctagcggcctggtgccactgtccctgagagggagccacatgggccccatggagatctacaaaaccgtgagcgcctggaagcggcagcctgtgcgcgtgctgagcctgtttcggaatatcgataaagtcctgaaaagcctgggattcctggagagcggctctggctccggcggtggcaccctgaagtacgtggaggatgtgacaaacgtggtcagacgggatgtggagaagtggggccccttcgatctggtgtacggcagcacccaacccctgggcagctcttgtgaccggtgccctggctggtacatgtttcagttccaccggatcctgcagtacgccctgccgagacaggagtcccagcggccattcttttggattttcatggacaacttgctgctgaccgaggatgaccaggaaactaccactcggttcctgcagaccgaagccgtgaccctgcaggacgtgagaggccgggactaccagaacgccatgcgggtgtggtccaacatccctggactgaaaagcaagcacgcacctctgacccctaaagaagaggagtacctgcaggcccaggtgcggagcagaagcaagctggacgcccctaaggtggatctgctggtgaagaattgcctcctgcccctgagagagtacttcaagtatttcagccagaatagtctgcccctgggcggcccaagcagcggcgcccctcctcccagcggcggcagcccagccggctccccaacctctaccgaggagggcacctctgagtccgccacccccgagagcggccctggcacctccaccgagcccagcgagggcagcgcacccggcagccctgccggcagccccacctccacagaggagggaaccagcaccgagcccagcgaaggcagcgccccaggcaccagcaccgagcctagtgagggcggctctggcggcggcagcgcccaggagattaaacggatcaacaagatcagaagaagacttgtgaaagacagcaacaccaagaaggccggcaagacaggccccatgaaaaccctgctggttagagtgatgacacccgatctgagagagcggctggaaaacctgagaaagaagcctgaaaatatcccccagcccatcagcaatacatctagagccaacctgaataagctgctgaccgattacaccgaaatgaagaaggcgatcctgcatgtgtactgggaagagttccagaaggaccctgtgggcctgatgagccgggtggcccagcctgccagcaagaagatcgatcagaacaagctgaaacctgagatggacgagaagggcaacctgaccaccgccggctttgcctgctctcagtgtggccagcccctgttcgtgtacaagctggagcaggtgtctgagaagggcaaggcttacaccaactacttcggacggtgcaatgtggccgagcacgaaaagctgatcctgctggcccagctgaagcccgagaaggatagcgacgaagccgtgacatatagcctgggaaagtttgggcagagggccctggatttctacagcattcatgtgaccaaggagtccacccaccccgtgaagcccctggcccagatcgccggaaacagatacgcctccggacctgtgggaaaggccctgagcgacgcatgtatgggcacaatcgcctccttcctgtctaagtaccaggacatcatcatcgaacaccagaaggtggtgaagggcaaccagaagagactggagagcctgcgggagctggccggcaaggaaaacctggaataccctagcgtgaccctgccacctcagcctcacaccaaggagggcgttgatgcctacaacgaagtgatcgcccgggtgcgaatgtgggtgaacctgaacctgtggcagaagctgaagctaagcagagatgatgccaagcctctgctgagactgaagggattcccttcctttcctctggtcgagagacaggccaacgaagtggactggtgggacatggtgtgtaacgtgaagaagctgatcaacgagaaaaaggaggatggcaaggtgttttggcagaatctggctggctacaagagacaggaagccctgagaccatacctgagcagcgaggaagatcggaagaagggaaagaaattcgctcggtaccagctgggcgacctgctgctgcacctggaaaagaagcacggcgaggactggggaaaggtgtacgacgaggcctgggagcggattgacaagaaagtggaaggcctgagcaagcacatcaagctggaagaggaacggagaagcgaggacgcccagagcaaggccgccctgaccgactggctgcgggctaaggccagcttcgtgatcgagggcctgaaggaggccgacaaggacgagttctgcagatgcgagctgaagctgcagaagtggtacggggacctgcggggaaagcccttcgccatcgaagccgagaacagcatcctggacatcagcggcttcagcaagcagtacaactgtgccttcatctggcagaaggacggcgtgaagaagctgaacctgtacctgatcatcaactacttcaagggcggcaagctgcggttcaagaagatcaaacctgaagccttcgaagccaacagattctacaccgtgatcaacaaaaagagcggcgagatcgtgcccatggaggtgaacttcaacttcgacgaccccaacctgatcatcctgcctctggcctttggcaagagacagggcagagaattcatctggaacgacctgctgtccctggaaaccggcagcctgaagctggccaacggaagagtgatcgagaagacactgtacaacagaagaacccggcaggatgagcctgccctgttcgtggccctgaccttcgagcggcgggaggtcctggactcctccaatatcaaaccaatgaacctgatcggcgtggcaagaggcgaaaacatccccgccgtgatcgccctgaccgaccccgagggctgcccactgagccggtttaaggatagcctgggaaacccaacccacatcctgagaatcggcgagagctataaggagaagcagcggaccatccaggccaagaaggaggtggagcagcggagagccggcggctacagccggaagtacgccagcaaagccaagaatctggcagacgatatggtgagaaacaccgctagagatctgctgtactacgccgtgacccaggatgccatgctgatcttcgccaacctgagccggggcttcggccggcagggcaagcggaccttcatggccgagagacagtacacacggatggaggactggctgaccgccaagctggcctacgagggcctgagcaagacctacctgtccaagacactggcccagtacacctccaagacatgcagcaactgtgggtttaccatcaccagcgccgactacgacagggtgctggagaagctgaagaagacagcaacaggctggatgaccacaattaacggcaaggagctgaaggtggagggccagattacctactacaacagatacaagagacagaacgtagtcaaggacctgtccgtcgagctggatagactgagcgaagaatctgtgaacaacgacatctcctcctggacaaagggcagaagcggagaagctctgagcctcctgaagaaaagattctcccatagacccgtgcaggagaagttcgtgtgcctgaactgcggcttcgagacacacgcagccgagcaagccgccctgaacatcgccagatcctggctgttcctgcggagccaggagtacaagaaataccagacaaacaagacaaccggcaacaccgataagagagccttcgtcgagacctggcagtccttttaccggaagaagcttaaggaggtgtggaaacctgccgtgcggtctggcggatctggcggaggctccacaagcatgctgatgatgttcagggacgtggccgtggacttcagccaggaggagtgggagtgcctggacctggagcagaggggcctgtacagggacgtgatgctggagaactacagcaacatggtgagcctgggcctgtgcatctaccagcccgaggccttcagcctgctggagaagggcaaggagccctggaagatcctgagggacgagaccaggggcccctgccccgacatgcagagcaggtgccagaccagccccaagaaaaagagaaaagtctaagctgccttctgcggggcttgccttctggccatgcccttcttctctcccttgcacctgtacctcttggtctttgaataaagcctgagtaggaaggctagcaaaaaaaaaaaaaaaaaaaaaaaaaaaaaaaaaaaaaaaaaaaaaaaaaaaaaaaaaaaaaaaaaaaaaaaaaaaaaaaa

SEQ ID NO: 7204 - RNA, 5797 nt, synthetic construct
  source 1..5797: mol_type = other RNA
aggaaataagagagaaaagaagagtaagaagaaatataagagccaccatggcccctaagaagaagcgtaaagtgagccggatggaacgcctcgtctacgaggtgcggcagaagtgcagaaacatcgaggacatctgcatctcctgcggatctctgaacgtgaccctggagcacccactgttcatcggcggcatgtgccagaactgtaaaaactgttttctggagtgtgcctatcaatacgacgatgacggctaccagagctactgcaccatctgttgcggcggaagagaggtgctgatgtgtggaaataacaactgctgccggtgcttctgcgtggaatgcgtggacctgctggtgggccccggcgccgcccaggccgctattaaggaagatccttggaactgctacatgtgcggccacaagggcacatacggcctgctgagacggagagaggactggcctagcagactgcagatgttcttcgccaataaccacgaccaggagttcgacccccctaaggtgtaccctcccgtccccgccgagaagagaaagcccatccgggtcctgagcctgttcgatggcatcgccaccggtctgctggtgctgaaggacctgggcatccaggtggataggtacattgcctccgaggtgtgcgaggactccatcaccgtgggaatggtgcgtcatcagggcaagatcatgtacgtgggcgacgtgcggagcgtgacacagaagcatatccaggagtggggccctttcgacctggtgatcggcggcagcccttgcaatgacctgagcatcgtgaacccagcccggaagggcctgtacgagggaaccggcagactgttcttcgagttttacagactgctgcacgacgcccggcctaaggaaggcgacgaccggcccttcttttggctgttcgagaatgtggtggccatgggagtcagcgacaagcgggatattagccggttcctggagagcaaccccgtgatgatcgatgccaaggaagtgagcgccgcccaccgggccagatacttctggggcaatctgcctggcatgaacagacccctggccagcaccgtgaacgacaagctggagctgcaggagtgcctggagcacggccggatcgccaagttcagcaaggtgagaaccatcaccacccgaagcaacagcatcaaacaaggcaaggaccagcactttcctgtgttcatgaacgagaaggaggacatcctgtggtgtaccgagatggagagagtgttcgggttcccagtccactacacagatgtcagcaacatgtctagactggccagacagagactgctgggaagaagctggtccgtccctgtgatcagacacctgttcgcccctctgaaggagtacttcgcctgcgtgagcagcggcaacagcaacgccaacagccggggccccagcttctctagcggcctggtgccactgtccctgagagggagccacatgggccccatggagatctacaaaaccgtgagcgcctggaagcggcagcctgtgcgcgtgctgagcctgtttcggaatatcgataaagtcctgaaaagcctgggattcctggagagcggctctggctccggcggtggcaccctgaagtacgtggaggatgtgacaaacgtggtcagacgggatgtggagaagtggggccccttcgatctggtgtacggcagcacccaacccctgggcagctcttgtgaccggtgccctggctggtacatgtttcagttccaccggatcctgcagtacgccctgccgagacaggagtcccagcggccattcttttggattttcatggacaacttgctgctgaccgaggatgaccaggaaactaccactcggttcctgcagaccgaagccgtgaccctgcaggacgtgagaggccgggactaccagaacgccatgcgggtgtggtccaacatccctggactgaaaagcaagcacgcacctctgacccctaaagaagaggagtacctgcaggcccaggtgcggagcagaagcaagctggacgcccctaaggtggatctgctggtgaagaattgcctcctgcccctgagagagtacttcaagtatttcagccagaatagtctgcccctgggcggcccaagcagcggcgcccctcctcccagcggcggcagcccagccggctccccaacctctaccgaggagggcacctctgagtccgccacccccgagagcggccctggcacctccaccgagcccagcgagggcagcgcacccggcagccctgccggcagccccacctccacagaggagggaaccagcaccgagcccagcgaaggcagcgccccaggcaccagcaccgagcctagtgagggcggctctggcggcggcagcgcccaggagattaaacggatcaacaagatcagaagaagacttgtgaaagacagcaacaccaagaaggccggcaagacaggccccatgaaaaccctgctggttagagtgatgacacccgatctgagagagcggctggaaaacctgagaaagaagcctgaaaatatcccccagcccatcagcaatacatctagagccaacctgaataagctgctgaccgattacaccgaaatgaagaaggcgatcctgcatgtgtactgggaagagttccagaaggaccctgtgggcctgatgagccgggtggcccagcctgccagcaagaagatcgatcagaacaagctgaaacctgagatggacgagaagggcaacctgaccaccgccggctttgcctgctctcagtgtggccagcccctgttcgtgtacaagctggagcaggtgtctgagaagggcaaggcttacaccaactacttcggacggtgcaatgtggccgagcacgaaaagctgatcctgctggcccagctgaagcccgagaaggatagcgacgaagccgtgacatatagcctgggaaagtttgggcagagggccctggatttctacagcattcatgtgaccaaggagtccacccaccccgtgaagcccctggcccagatcgccggaaacagatacgcctccggacctgtgggaaaggccctgagcgacgcatgtatgggcacaatcgcctccttcctgtctaagtaccaggacatcatcatcgaacaccagaaggtggtgaagggcaaccagaagagactggagagcctgcgggagctggccggcaaggaaaacctggaataccctagcgtgaccctgccacctcagcctcacaccaaggagggcgttgatgcctacaacgaagtgatcgcccgggtgcgaatgtgggtgaacctgaacctgtggcagaagctgaagctaagcagagatgatgccaagcctctgctgagactgaagggattcccttcctttcctctggtcgagagacaggccaacgaagtggactggtgggacatggtgtgtaacgtgaagaagctgatcaacgagaaaaaggaggatggcaaggtgttttggcagaatctggctggctacaagagacaggaagccctgagaccatacctgagcagcgaggaagatcggaagaagggaaagaaattcgctcggtaccagctgggcgacctgctgctgcacctggaaaagaagcacggcgaggactggggaaaggtgtacgacgaggcctgggagcggattgacaagaaagtggaaggcctgagcaagcacatcaagctggaagaggaacggagaagcgaggacgcccagagcaaggccgccctgaccgactggctgcgggctaaggccagcttcgtgatcgagggcctgaaggaggccgacaaggacgagttctgcagatgcgagctgaagctgcagaagtggtacggggacctgcggggaaagcccttcgccatcgaagccgagaacagcatcctggacatcagcggcttcagcaagcagtacaactgtgccttcatctggcagaaggacggcgtgaagaagctgaacctgtacctgatcatcaactacttcaagggcggcaagctgcggttcaagaagatcaaacctgaagccttcgaagccaacagattctacaccgtgatcaacaaaaagagcggcgagatcgtgcccatggaggtgaacttcaacttcgacgaccccaacctgatcatcctgcctctggcctttggcaagagacagggcagagaattcatctggaacgacctgctgtccctggaaaccggcagcctgaagctggccaacggaagagtgatcgagaagacactgtacaacagaagaacccggcaggatgagcctgccctgttcgtggccctgaccttcgagcggcgggaggtcctggactcctccaatatcaaaccaatgaacctgatcggcgtggcaagaggcgaaaacatccccgccgtgatcgccctgaccgaccccgagggctgcccactgagccggtttaaggatagcctgggaaacccaacccacatcctgagaatcggcgagagctataaggagaagcagcggaccatccaggccaagaaggaggtggagcagcggagagccggcggctacagccggaagtacgccagcaaagccaagaatctggcagacgatatggtgagaaacaccgctagagatctgctgtactacgccgtgacccaggatgccatgctgatcttcgccaacctgagccggggcttcggccggcagggcaagcggaccttcatggccgagagacagtacacacggatggaggactggctgaccgccaagctggcctacgagggcctgagcaagacctacctgtccaagacactggcccagtacacctccaagacatgcagcaactgtgggtttaccatcaccagcgccgactacgacagggtgctggagaagctgaagaagacagcaacaggctggatgaccacaattaacggcaaggagctgaaggtggagggccagattacctactacaacagatacaagagacagaacgtagtcaaggacctgtccgtcgagctggatagactgagcgaagaatctgtgaacaacgacatctcctcctggacaaagggcagaagcggagaagctctgagcctcctgaagaaaagattctcccatagacccgtgcaggagaagttcgtgtgcctgaactgcggcttcgagacacacgcagccgagcaagccgccctgaacatcgccagatcctggctgttcctgcggagccaggagtacaagaaataccagacaaacaagacaaccggcaacaccgataagagagccttcgtcgagacctggcagtccttttaccggaagaagcttaaggaggtgtggaaacctgccgtgcggtctggcggatctggcggaggctccacaagcgagcccggcgccgtgaccttcggcgacgtggccgtgtacttcagcagggaggagtggggctgcctgaggcccgcccagagggccctgtacagggacgtgaccagggagacctacagccacctgggcgccctgggcgtgggcggcagcaagcccgccctgatcagctggatggaggaggaggccgagctgtggggccccgccgcccaggaccccgaggtggccaagtgccccaccgaggccgacaccagccccaagaaaaagagaaaagtctaagctgccttctgcggggcttgccttctggccatgcccttcttctctcccttgcacctgtacctcttggtctttgaataaagcctgagtaggaaggctagcaaaaaaaaaaaaaaaaaaaaaaaaaaaaaaaaaaaaaaaaaaaaaaaaaaaaaaaaaaaaaaaaaaaaaaaaaaaaaaaa

SEQ ID NO: 7205 - RNA, 5797 nt, synthetic construct
  source 1..5797: mol_type = other RNA
aggaaataagagagaaaagaagagtaagaagaaatataagagccaccatggcccctaagaagaagcgtaaagtgagccggatggaacgcctcgtctacgaggtgcggcagaagtgcagaaacatcgaggacatctgcatctcctgcggatctctgaacgtgaccctggagcacccactgttcatcggcggcatgtgccagaactgtaaaaactgttttctggagtgtgcctatcaatacgacgatgacggctaccagagctactgcaccatctgttgcggcggaagagaggtgctgatgtgtggaaataacaactgctgccggtgcttctgcgtggaatgcgtggacctgctggtgggccccggcgccgcccaggccgctattaaggaagatccttggaactgctacatgtgcggccacaagggcacatacggcctgctgagacggagagaggactggcctagcagactgcagatgttcttcgccaataaccacgaccaggagttcgacccccctaaggtgtaccctcccgtccccgccgagaagagaaagcccatccgggtcctgagcctgttcgatggcatcgccaccggtctgctggtgctgaaggacctgggcatccaggtggataggtacattgcctccgaggtgtgcgaggactccatcaccgtgggaatggtgcgtcatcagggcaagatcatgtacgtgggcgacgtgcggagcgtgacacagaagcatatccaggagtggggccctttcgacctggtgatcggcggcagcccttgcaatgacctgagcatcgtgaacccagcccggaagggcctgtacgagggaaccggcagactgttcttcgagttttacagactgctgcacgacgcccggcctaaggaaggcgacgaccggcccttcttttggctgttcgagaatgtggtggccatgggagtcagcgacaagcgggatattagccggttcctggagagcaaccccgtgatgatcgatgccaaggaagtgagcgccgcccaccgggccagatacttctggggcaatctgcctggcatgaacagacccctggccagcaccgtgaacgacaagctggagctgcaggagtgcctggagcacggccggatcgccaagttcagcaaggtgagaaccatcaccacccgaagcaacagcatcaaacaaggcaaggaccagcactttcctgtgttcatgaacgagaaggaggacatcctgtggtgtaccgagatggagagagtgttcgggttcccagtccactacacagatgtcagcaacatgtctagactggccagacagagactgctgggaagaagctggtccgtccctgtgatcagacacctgttcgcccctctgaaggagtacttcgcctgcgtgagcagcggcaacagcaacgccaacagccggggccccagcttctctagcggcctggtgccactgtccctgagagggagccacatgggccccatggagatctacaaaaccgtgagcgcctggaagcggcagcctgtgcgcgtgctgagcctgtttcggaatatcgataaagtcctgaaaagcctgggattcctggagagcggctctggctccggcggtggcaccctgaagtacgtggaggatgtgacaaacgtggtcagacgggatgtggagaagtggggccccttcgatctggtgtacggcagcacccaacccctgggcagctcttgtgaccggtgccctggctggtacatgtttcagttccaccggatcctgcagtacgccctgccgagacaggagtcccagcggccattcttttggattttcatggacaacttgctgctgaccgaggatgaccaggaaactaccactcggttcctgcagaccgaagccgtgaccctgcaggacgtgagaggccgggactaccagaacgccatgcgggtgtggtccaacatccctggactgaaaagcaagcacgcacctctgacccctaaagaagaggagtacctgcaggcccaggtgcggagcagaagcaagctggacgcccctaaggtggatctgctggtgaagaattgcctcctgcccctgagagagtacttcaagtatttcagccagaatagtctgcccctgggcggcccaagcagcggcgcccctcctcccagcggcggcagcccagccggctccccaacctctaccgaggagggcacctctgagtccgccacccccgagagcggccctggcacctccaccgagcccagcgagggcagcgcacccggcagccctgccggcagccccacctccacagaggagggaaccagcaccgagcccagcgaaggcagcgccccaggcaccagcaccgagcctagtgagggcggctctggcggcggcagcgcccaggagattaaacggatcaacaagatcagaagaagacttgtgaaagacagcaacaccaagaaggccggcaagacaggccccatgaaaaccctgctggttagagtgatgacacccgatctgagagagcggctggaaaacctgagaaagaagcctgaaaatatcccccagcccatcagcaatacatctagagccaacctgaataagctgctgaccgattacaccgaaatgaagaaggcgatcctgcatgtgtactgggaagagttccagaaggaccctgtgggcctgatgagccgggtggcccagcctgccagcaagaagatcgatcagaacaagctgaaacctgagatggacgagaagggcaacctgaccaccgccggctttgcctgctctcagtgtggccagcccctgttcgtgtacaagctggagcaggtgtctgagaagggcaaggcttacaccaactacttcggacggtgcaatgtggccgagcacgaaaagctgatcctgctggcccagctgaagcccgagaaggatagcgacgaagccgtgacatatagcctgggaaagtttgggcagagggccctggatttctacagcattcatgtgaccaaggagtccacccaccccgtgaagcccctggcccagatcgccggaaacagatacgcctccggacctgtgggaaaggccctgagcgacgcatgtatgggcacaatcgcctccttcctgtctaagtaccaggacatcatcatcgaacaccagaaggtggtgaagggcaaccagaagagactggagagcctgcgggagctggccggcaaggaaaacctggaataccctagcgtgaccctgccacctcagcctcacaccaaggagggcgttgatgcctacaacgaagtgatcgcccgggtgcgaatgtgggtgaacctgaacctgtggcagaagctgaagctaagcagagatgatgccaagcctctgctgagactgaagggattcccttcctttcctctggtcgagagacaggccaacgaagtggactggtgggacatggtgtgtaacgtgaagaagctgatcaacgagaaaaaggaggatggcaaggtgttttggcagaatctggctggctacaagagacaggaagccctgagaccatacctgagcagcgaggaagatcggaagaagggaaagaaattcgctcggtaccagctgggcgacctgctgctgcacctggaaaagaagcacggcgaggactggggaaaggtgtacgacgaggcctgggagcggattgacaagaaagtggaaggcctgagcaagcacatcaagctggaagaggaacggagaagcgaggacgcccagagcaaggccgccctgaccgactggctgcgggctaaggccagcttcgtgatcgagggcctgaaggaggccgacaaggacgagttctgcagatgcgagctgaagctgcagaagtggtacggggacctgcggggaaagcccttcgccatcgaagccgagaacagcatcctggacatcagcggcttcagcaagcagtacaactgtgccttcatctggcagaaggacggcgtgaagaagctgaacctgtacctgatcatcaactacttcaagggcggcaagctgcggttcaagaagatcaaacctgaagccttcgaagccaacagattctacaccgtgatcaacaaaaagagcggcgagatcgtgcccatggaggtgaacttcaacttcgacgaccccaacctgatcatcctgcctctggcctttggcaagagacagggcagagaattcatctggaacgacctgctgtccctggaaaccggcagcctgaagctggccaacggaagagtgatcgagaagacactgtacaacagaagaacccggcaggatgagcctgccctgttcgtggccctgaccttcgagcggcgggaggtcctggactcctccaatatcaaaccaatgaacctgatcggcgtggcaagaggcgaaaacatccccgccgtgatcgccctgaccgaccccgagggctgcccactgagccggtttaaggatagcctgggaaacccaacccacatcctgagaatcggcgagagctataaggagaagcagcggaccatccaggccaagaaggaggtggagcagcggagagccggcggctacagccggaagtacgccagcaaagccaagaatctggcagacgatatggtgagaaacaccgctagagatctgctgtactacgccgtgacccaggatgccatgctgatcttcgccaacctgagccggggcttcggccggcagggcaagcggaccttcatggccgagagacagtacacacggatggaggactggctgaccgccaagctggcctacgagggcctgagcaagacctacctgtccaagacactggcccagtacacctccaagacatgcagcaactgtgggtttaccatcaccagcgccgactacgacagggtgctggagaagctgaagaagacagcaacaggctggatgaccacaattaacggcaaggagctgaaggtggagggccagattacctactacaacagatacaagagacagaacgtagtcaaggacctgtccgtcgagctggatagactgagcgaagaatctgtgaacaacgacatctcctcctggacaaagggcagaagcggagaagctctgagcctcctgaagaaaagattctcccatagacccgtgcaggagaagttcgtgtgcctgaactgcggcttcgagacacacgcagccgagcaagccgccctgaacatcgccagatcctggctgttcctgcggagccaggagtacaagaaataccagacaaacaagacaaccggcaacaccgataagagagccttcgtcgagacctggcagtccttttaccggaagaagcttaaggaggtgtggaaacctgccgtgcggtctggcggatctggcggaggctccacaagcttccaggacagcgtgaccttcgaggacgtggccgtgaggttcagcagcggcgagtggcagtgcctgaccagggcccagaggcacctgtacgccgacgtgatgctggagaactacggcaacatgatcagcgtgggcttcgccgtgcccaagccccccctgatcagccacctggagcagggcgccgagccctgcgtgcaggacctgcaggacggcggcttcctgagctgcagcttccccgtgagcaccagccccaagaaaaagagaaaagtctaagctgccttctgcggggcttgccttctggccatgcccttcttctctcccttgcacctgtacctcttggtctttgaataaagcctgagtaggaaggctagcaaaaaaaaaaaaaaaaaaaaaaaaaaaaaaaaaaaaaaaaaaaaaaaaaaaaaaaaaaaaaaaaaaaaaaaaaaaaaaaa

SEQ ID NO: 7206 - RNA, 5797 nt, synthetic construct
  source 1..5797: mol_type = other RNA
aggaaataagagagaaaagaagagtaagaagaaatataagagccaccatggcccctaagaagaagcgtaaagtgagccggatggaacgcctcgtctacgaggtgcggcagaagtgcagaaacatcgaggacatctgcatctcctgcggatctctgaacgtgaccctggagcacccactgttcatcggcggcatgtgccagaactgtaaaaactgttttctggagtgtgcctatcaatacgacgatgacggctaccagagctactgcaccatctgttgcggcggaagagaggtgctgatgtgtggaaataacaactgctgccggtgcttctgcgtggaatgcgtggacctgctggtgggccccggcgccgcccaggccgctattaaggaagatccttggaactgctacatgtgcggccacaagggcacatacggcctgctgagacggagagaggactggcctagcagactgcagatgttcttcgccaataaccacgaccaggagttcgacccccctaaggtgtaccctcccgtccccgccgagaagagaaagcccatccgggtcctgagcctgttcgatggcatcgccaccggtctgctggtgctgaaggacctgggcatccaggtggataggtacattgcctccgaggtgtgcgaggactccatcaccgtgggaatggtgcgtcatcagggcaagatcatgtacgtgggcgacgtgcggagcgtgacacagaagcatatccaggagtggggccctttcgacctggtgatcggcggcagcccttgcaatgacctgagcatcgtgaacccagcccggaagggcctgtacgagggaaccggcagactgttcttcgagttttacagactgctgcacgacgcccggcctaaggaaggcgacgaccggcccttcttttggctgttcgagaatgtggtggccatgggagtcagcgacaagcgggatattagccggttcctggagagcaaccccgtgatgatcgatgccaaggaagtgagcgccgcccaccgggccagatacttctggggcaatctgcctggcatgaacagacccctggccagcaccgtgaacgacaagctggagctgcaggagtgcctggagcacggccggatcgccaagttcagcaaggtgagaaccatcaccacccgaagcaacagcatcaaacaaggcaaggaccagcactttcctgtgttcatgaacgagaaggaggacatcctgtggtgtaccgagatggagagagtgttcgggttcccagtccactacacagatgtcagcaacatgtctagactggccagacagagactgctgggaagaagctggtccgtccctgtgatcagacacctgttcgcccctctgaaggagtacttcgcctgcgtgagcagcggcaacagcaacgccaacagccggggccccagcttctctagcggcctggtgccactgtccctgagagggagccacatgggccccatggagatctacaaaaccgtgagcgcctggaagcggcagcctgtgcgcgtgctgagcctgtttcggaatatcgataaagtcctgaaaagcctgggattcctggagagcggctctggctccggcggtggcaccctgaagtacgtggaggatgtgacaaacgtggtcagacgggatgtggagaagtggggccccttcgatctggtgtacggcagcacccaacccctgggcagctcttgtgaccggtgccctggctggtacatgtttcagttccaccggatcctgcagtacgccctgccgagacaggagtcccagcggccattcttttggattttcatggacaacttgctgctgaccgaggatgaccaggaaactaccactcggttcctgcagaccgaagccgtgaccctgcaggacgtgagaggccgggactaccagaacgccatgcgggtgtggtccaacatccctggactgaaaagcaagcacgcacctctgacccctaaagaagaggagtacctgcaggcccaggtgcggagcagaagcaagctggacgcccctaaggtggatctgctggtgaagaattgcctcctgcccctgagagagtacttcaagtatttcagccagaatagtctgcccctgggcggcccaagcagcggcgcccctcctcccagcggcggcagcccagccggctccccaacctctaccgaggagggcacctctgagtccgccacccccgagagcggccctggcacctccaccgagcccagcgagggcagcgcacccggcagccctgccggcagccccacctccacagaggagggaaccagcaccgagcccagcgaaggcagcgccccaggcaccagcaccgagcctagtgagggcggctctggcggcggcagcgcccaggagattaaacggatcaacaagatcagaagaagacttgtgaaagacagcaacaccaagaaggccggcaagacaggccccatgaaaaccctgctggttagagtgatgacacccgatctgagagagcggctggaaaacctgagaaagaagcctgaaaatatcccccagcccatcagcaatacatctagagccaacctgaataagctgctgaccgattacaccgaaatgaagaaggcgatcctgcatgtgtactgggaagagttccagaaggaccctgtgggcctgatgagccgggtggcccagcctgccagcaagaagatcgatcagaacaagctgaaacctgagatggacgagaagggcaacctgaccaccgccggctttgcctgctctcagtgtggccagcccctgttcgtgtacaagctggagcaggtgtctgagaagggcaaggcttacaccaactacttcggacggtgcaatgtggccgagcacgaaaagctgatcctgctggcccagctgaagcccgagaaggatagcgacgaagccgtgacatatagcctgggaaagtttgggcagagggccctggatttctacagcattcatgtgaccaaggagtccacccaccccgtgaagcccctggcccagatcgccggaaacagatacgcctccggacctgtgggaaaggccctgagcgacgcatgtatgggcacaatcgcctccttcctgtctaagtaccaggacatcatcatcgaacaccagaaggtggtgaagggcaaccagaagagactggagagcctgcgggagctggccggcaaggaaaacctggaataccctagcgtgaccctgccacctcagcctcacaccaaggagggcgttgatgcctacaacgaagtgatcgcccgggtgcgaatgtgggtgaacctgaacctgtggcagaagctgaagctaagcagagatgatgccaagcctctgctgagactgaagggattcccttcctttcctctggtcgagagacaggccaacgaagtggactggtgggacatggtgtgtaacgtgaagaagctgatcaacgagaaaaaggaggatggcaaggtgttttggcagaatctggctggctacaagagacaggaagccctgagaccatacctgagcagcgaggaagatcggaagaagggaaagaaattcgctcggtaccagctgggcgacctgctgctgcacctggaaaagaagcacggcgaggactggggaaaggtgtacgacgaggcctgggagcggattgacaagaaagtggaaggcctgagcaagcacatcaagctggaagaggaacggagaagcgaggacgcccagagcaaggccgccctgaccgactggctgcgggctaaggccagcttcgtgatcgagggcctgaaggaggccgacaaggacgagttctgcagatgcgagctgaagctgcagaagtggtacggggacctgcggggaaagcccttcgccatcgaagccgagaacagcatcctggacatcagcggcttcagcaagcagtacaactgtgccttcatctggcagaaggacggcgtgaagaagctgaacctgtacctgatcatcaactacttcaagggcggcaagctgcggttcaagaagatcaaacctgaagccttcgaagccaacagattctacaccgtgatcaacaaaaagagcggcgagatcgtgcccatggaggtgaacttcaacttcgacgaccccaacctgatcatcctgcctctggcctttggcaagagacagggcagagaattcatctggaacgacctgctgtccctggaaaccggcagcctgaagctggccaacggaagagtgatcgagaagacactgtacaacagaagaacccggcaggatgagcctgccctgttcgtggccctgaccttcgagcggcgggaggtcctggactcctccaatatcaaaccaatgaacctgatcggcgtggcaagaggcgaaaacatccccgccgtgatcgccctgaccgaccccgagggctgcccactgagccggtttaaggatagcctgggaaacccaacccacatcctgagaatcggcgagagctataaggagaagcagcggaccatccaggccaagaaggaggtggagcagcggagagccggcggctacagccggaagtacgccagcaaagccaagaatctggcagacgatatggtgagaaacaccgctagagatctgctgtactacgccgtgacccaggatgccatgctgatcttcgccaacctgagccggggcttcggccggcagggcaagcggaccttcatggccgagagacagtacacacggatggaggactggctgaccgccaagctggcctacgagggcctgagcaagacctacctgtccaagacactggcccagtacacctccaagacatgcagcaactgtgggtttaccatcaccagcgccgactacgacagggtgctggagaagctgaagaagacagcaacaggctggatgaccacaattaacggcaaggagctgaaggtggagggccagattacctactacaacagatacaagagacagaacgtagtcaaggacctgtccgtcgagctggatagactgagcgaagaatctgtgaacaacgacatctcctcctggacaaagggcagaagcggagaagctctgagcctcctgaagaaaagattctcccatagacccgtgcaggagaagttcgtgtgcctgaactgcggcttcgagacacacgcagccgagcaagccgccctgaacatcgccagatcctggctgttcctgcggagccaggagtacaagaaataccagacaaacaagacaaccggcaacaccgataagagagccttcgtcgagacctggcagtccttttaccggaagaagcttaaggaggtgtggaaacctgccgtgcggtctggcggatctggcggaggctccacaagcatgaccttcgaggacgtggccgtggagttcacccagtgggagtggggccagctggaccccgcccagcaggacctgtacagggaggtgatgctggagaacttcaagaacctggccagcctgggcctgcccgtgagcaagccctacgtgatcacccagctggaggagggcaaggacccctgcgtgctggacggcgagatcagcaccgagtacctgagccccccccccgactgggagaagaggcccaccagccccaagaaaaagagaaaagtctaagctgccttctgcggggcttgccttctggccatgcccttcttctctcccttgcacctgtacctcttggtctttgaataaagcctgagtaggaaggctagcaaaaaaaaaaaaaaaaaaaaaaaaaaaaaaaaaaaaaaaaaaaaaaaaaaaaaaaaaaaaaaaaaaaaaaaaaaaaaaaa

SEQ ID NO: 7207 - RNA, 5797 nt, synthetic construct
  source 1..5797: mol_type = other RNA
aggaaataagagagaaaagaagagtaagaagaaatataagagccaccatggcccctaagaagaagcgtaaagtgagccggatggaacgcctcgtctacgaggtgcggcagaagtgcagaaacatcgaggacatctgcatctcctgcggatctctgaacgtgaccctggagcacccactgttcatcggcggcatgtgccagaactgtaaaaactgttttctggagtgtgcctatcaatacgacgatgacggctaccagagctactgcaccatctgttgcggcggaagagaggtgctgatgtgtggaaataacaactgctgccggtgcttctgcgtggaatgcgtggacctgctggtgggccccggcgccgcccaggccgctattaaggaagatccttggaactgctacatgtgcggccacaagggcacatacggcctgctgagacggagagaggactggcctagcagactgcagatgttcttcgccaataaccacgaccaggagttcgacccccctaaggtgtaccctcccgtccccgccgagaagagaaagcccatccgggtcctgagcctgttcgatggcatcgccaccggtctgctggtgctgaaggacctgggcatccaggtggataggtacattgcctccgaggtgtgcgaggactccatcaccgtgggaatggtgcgtcatcagggcaagatcatgtacgtgggcgacgtgcggagcgtgacacagaagcatatccaggagtggggccctttcgacctggtgatcggcggcagcccttgcaatgacctgagcatcgtgaacccagcccggaagggcctgtacgagggaaccggcagactgttcttcgagttttacagactgctgcacgacgcccggcctaaggaaggcgacgaccggcccttcttttggctgttcgagaatgtggtggccatgggagtcagcgacaagcgggatattagccggttcctggagagcaaccccgtgatgatcgatgccaaggaagtgagcgccgcccaccgggccagatacttctggggcaatctgcctggcatgaacagacccctggccagcaccgtgaacgacaagctggagctgcaggagtgcctggagcacggccggatcgccaagttcagcaaggtgagaaccatcaccacccgaagcaacagcatcaaacaaggcaaggaccagcactttcctgtgttcatgaacgagaaggaggacatcctgtggtgtaccgagatggagagagtgttcgggttcccagtccactacacagatgtcagcaacatgtctagactggccagacagagactgctgggaagaagctggtccgtccctgtgatcagacacctgttcgcccctctgaaggagtacttcgcctgcgtgagcagcggcaacagcaacgccaacagccggggccccagcttctctagcggcctggtgccactgtccctgagagggagccacatgggccccatggagatctacaaaaccgtgagcgcctggaagcggcagcctgtgcgcgtgctgagcctgtttcggaatatcgataaagtcctgaaaagcctgggattcctggagagcggctctggctccggcggtggcaccctgaagtacgtggaggatgtgacaaacgtggtcagacgggatgtggagaagtggggccccttcgatctggtgtacggcagcacccaacccctgggcagctcttgtgaccggtgccctggctggtacatgtttcagttccaccggatcctgcagtacgccctgccgagacaggagtcccagcggccattcttttggattttcatggacaacttgctgctgaccgaggatgaccaggaaactaccactcggttcctgcagaccgaagccgtgaccctgcaggacgtgagaggccgggactaccagaacgccatgcgggtgtggtccaacatccctggactgaaaagcaagcacgcacctctgacccctaaagaagaggagtacctgcaggcccaggtgcggagcagaagcaagctggacgcccctaaggtggatctgctggtgaagaattgcctcctgcccctgagagagtacttcaagtatttcagccagaatagtctgcccctgggcggcccaagcagcggcgcccctcctcccagcggcggcagcccagccggctccccaacctctaccgaggagggcacctctgagtccgccacccccgagagcggccctggcacctccaccgagcccagcgagggcagcgcacccggcagccctgccggcagccccacctccacagaggagggaaccagcaccgagcccagcgaaggcagcgccccaggcaccagcaccgagcctagtgagggcggctctggcggcggcagcgcccaggagattaaacggatcaacaagatcagaagaagacttgtgaaagacagcaacaccaagaaggccggcaagacaggccccatgaaaaccctgctggttagagtgatgacacccgatctgagagagcggctggaaaacctgagaaagaagcctgaaaatatcccccagcccatcagcaatacatctagagccaacctgaataagctgctgaccgattacaccgaaatgaagaaggcgatcctgcatgtgtactgggaagagttccagaaggaccctgtgggcctgatgagccgggtggcccagcctgccagcaagaagatcgatcagaacaagctgaaacctgagatggacgagaagggcaacctgaccaccgccggctttgcctgctctcagtgtggccagcccctgttcgtgtacaagctggagcaggtgtctgagaagggcaaggcttacaccaactacttcggacggtgcaatgtggccgagcacgaaaagctgatcctgctggcccagctgaagcccgagaaggatagcgacgaagccgtgacatatagcctgggaaagtttgggcagagggccctggatttctacagcattcatgtgaccaaggagtccacccaccccgtgaagcccctggcccagatcgccggaaacagatacgcctccggacctgtgggaaaggccctgagcgacgcatgtatgggcacaatcgcctccttcctgtctaagtaccaggacatcatcatcgaacaccagaaggtggtgaagggcaaccagaagagactggagagcctgcgggagctggccggcaaggaaaacctggaataccctagcgtgaccctgccacctcagcctcacaccaaggagggcgttgatgcctacaacgaagtgatcgcccgggtgcgaatgtgggtgaacctgaacctgtggcagaagctgaagctaagcagagatgatgccaagcctctgctgagactgaagggattcccttcctttcctctggtcgagagacaggccaacgaagtggactggtgggacatggtgtgtaacgtgaagaagctgatcaacgagaaaaaggaggatggcaaggtgttttggcagaatctggctggctacaagagacaggaagccctgagaccatacctgagcagcgaggaagatcggaagaagggaaagaaattcgctcggtaccagctgggcgacctgctgctgcacctggaaaagaagcacggcgaggactggggaaaggtgtacgacgaggcctgggagcggattgacaagaaagtggaaggcctgagcaagcacatcaagctggaagaggaacggagaagcgaggacgcccagagcaaggccgccctgaccgactggctgcgggctaaggccagcttcgtgatcgagggcctgaaggaggccgacaaggacgagttctgcagatgcgagctgaagctgcagaagtggtacggggacctgcggggaaagcccttcgccatcgaagccgagaacagcatcctggacatcagcggcttcagcaagcagtacaactgtgccttcatctggcagaaggacggcgtgaagaagctgaacctgtacctgatcatcaactacttcaagggcggcaagctgcggttcaagaagatcaaacctgaagccttcgaagccaacagattctacaccgtgatcaacaaaaagagcggcgagatcgtgcccatggaggtgaacttcaacttcgacgaccccaacctgatcatcctgcctctggcctttggcaagagacagggcagagaattcatctggaacgacctgctgtccctggaaaccggcagcctgaagctggccaacggaagagtgatcgagaagacactgtacaacagaagaacccggcaggatgagcctgccctgttcgtggccctgaccttcgagcggcgggaggtcctggactcctccaatatcaaaccaatgaacctgatcggcgtggcaagaggcgaaaacatccccgccgtgatcgccctgaccgaccccgagggctgcccactgagccggtttaaggatagcctgggaaacccaacccacatcctgagaatcggcgagagctataaggagaagcagcggaccatccaggccaagaaggaggtggagcagcggagagccggcggctacagccggaagtacgccagcaaagccaagaatctggcagacgatatggtgagaaacaccgctagagatctgctgtactacgccgtgacccaggatgccatgctgatcttcgccaacctgagccggggcttcggccggcagggcaagcggaccttcatggccgagagacagtacacacggatggaggactggctgaccgccaagctggcctacgagggcctgagcaagacctacctgtccaagacactggcccagtacacctccaagacatgcagcaactgtgggtttaccatcaccagcgccgactacgacagggtgctggagaagctgaagaagacagcaacaggctggatgaccacaattaacggcaaggagctgaaggtggagggccagattacctactacaacagatacaagagacagaacgtagtcaaggacctgtccgtcgagctggatagactgagcgaagaatctgtgaacaacgacatctcctcctggacaaagggcagaagcggagaagctctgagcctcctgaagaaaagattctcccatagacccgtgcaggagaagttcgtgtgcctgaactgcggcttcgagacacacgcagccgagcaagccgccctgaacatcgccagatcctggctgttcctgcggagccaggagtacaagaaataccagacaaacaagacaaccggcaacaccgataagagagccttcgtcgagacctggcagtccttttaccggaagaagcttaaggaggtgtggaaacctgccgtgcggtctggcggatctggcggaggctccacaagcatgctgcagaccgcctggccccagaggctgagcaggaacctgtggttccaggagagcgtggccttcgaggacgtggccgtgtacttcacccagaaccagtgggccagcctggaccccgcccagagggccctgtacagggaggtgatgctggagaactacgccaacgtgaccagcctggtggccttccccttccccaagcccgccctgatcagccacctggagaagggcgaggccccctggggcaccagccccaagaaaaagagaaaagtctaagctgccttctgcggggcttgccttctggccatgcccttcttctctcccttgcacctgtacctcttggtctttgaataaagcctgagtaggaaggctagcaaaaaaaaaaaaaaaaaaaaaaaaaaaaaaaaaaaaaaaaaaaaaaaaaaaaaaaaaaaaaaaaaaaaaaaaaaaaaaaa

SEQ ID NO: 7208 - RNA, 5797 nt, synthetic construct
  source 1..5797: mol_type = other RNA
aggaaataagagagaaaagaagagtaagaagaaatataagagccaccatggcccctaagaagaagcgtaaagtgagccggatggaacgcctcgtctacgaggtgcggcagaagtgcagaaacatcgaggacatctgcatctcctgcggatctctgaacgtgaccctggagcacccactgttcatcggcggcatgtgccagaactgtaaaaactgttttctggagtgtgcctatcaatacgacgatgacggctaccagagctactgcaccatctgttgcggcggaagagaggtgctgatgtgtggaaataacaactgctgccggtgcttctgcgtggaatgcgtggacctgctggtgggccccggcgccgcccaggccgctattaaggaagatccttggaactgctacatgtgcggccacaagggcacatacggcctgctgagacggagagaggactggcctagcagactgcagatgttcttcgccaataaccacgaccaggagttcgacccccctaaggtgtaccctcccgtccccgccgagaagagaaagcccatccgggtcctgagcctgttcgatggcatcgccaccggtctgctggtgctgaaggacctgggcatccaggtggataggtacattgcctccgaggtgtgcgaggactccatcaccgtgggaatggtgcgtcatcagggcaagatcatgtacgtgggcgacgtgcggagcgtgacacagaagcatatccaggagtggggccctttcgacctggtgatcggcggcagcccttgcaatgacctgagcatcgtgaacccagcccggaagggcctgtacgagggaaccggcagactgttcttcgagttttacagactgctgcacgacgcccggcctaaggaaggcgacgaccggcccttcttttggctgttcgagaatgtggtggccatgggagtcagcgacaagcgggatattagccggttcctggagagcaaccccgtgatgatcgatgccaaggaagtgagcgccgcccaccgggccagatacttctggggcaatctgcctggcatgaacagacccctggccagcaccgtgaacgacaagctggagctgcaggagtgcctggagcacggccggatcgccaagttcagcaaggtgagaaccatcaccacccgaagcaacagcatcaaacaaggcaaggaccagcactttcctgtgttcatgaacgagaaggaggacatcctgtggtgtaccgagatggagagagtgttcgggttcccagtccactacacagatgtcagcaacatgtctagactggccagacagagactgctgggaagaagctggtccgtccctgtgatcagacacctgttcgcccctctgaaggagtacttcgcctgcgtgagcagcggcaacagcaacgccaacagccggggccccagcttctctagcggcctggtgccactgtccctgagagggagccacatgggccccatggagatctacaaaaccgtgagcgcctggaagcggcagcctgtgcgcgtgctgagcctgtttcggaatatcgataaagtcctgaaaagcctgggattcctggagagcggctctggctccggcggtggcaccctgaagtacgtggaggatgtgacaaacgtggtcagacgggatgtggagaagtggggccccttcgatctggtgtacggcagcacccaacccctgggcagctcttgtgaccggtgccctggctggtacatgtttcagttccaccggatcctgcagtacgccctgccgagacaggagtcccagcggccattcttttggattttcatggacaacttgctgctgaccgaggatgaccaggaaactaccactcggttcctgcagaccgaagccgtgaccctgcaggacgtgagaggccgggactaccagaacgccatgcgggtgtggtccaacatccctggactgaaaagcaagcacgcacctctgacccctaaagaagaggagtacctgcaggcccaggtgcggagcagaagcaagctggacgcccctaaggtggatctgctggtgaagaattgcctcctgcccctgagagagtacttcaagtatttcagccagaatagtctgcccctgggcggcccaagcagcggcgcccctcctcccagcggcggcagcccagccggctccccaacctctaccgaggagggcacctctgagtccgccacccccgagagcggccctggcacctccaccgagcccagcgagggcagcgcacccggcagccctgccggcagccccacctccacagaggagggaaccagcaccgagcccagcgaaggcagcgccccaggcaccagcaccgagcctagtgagggcggctctggcggcggcagcgcccaggagattaaacggatcaacaagatcagaagaagacttgtgaaagacagcaacaccaagaaggccggcaagacaggccccatgaaaaccctgctggttagagtgatgacacccgatctgagagagcggctggaaaacctgagaaagaagcctgaaaatatcccccagcccatcagcaatacatctagagccaacctgaataagctgctgaccgattacaccgaaatgaagaaggcgatcctgcatgtgtactgggaagagttccagaaggaccctgtgggcctgatgagccgggtggcccagcctgccagcaagaagatcgatcagaacaagctgaaacctgagatggacgagaagggcaacctgaccaccgccggctttgcctgctctcagtgtggccagcccctgttcgtgtacaagctggagcaggtgtctgagaagggcaaggcttacaccaactacttcggacggtgcaatgtggccgagcacgaaaagctgatcctgctggcccagctgaagcccgagaaggatagcgacgaagccgtgacatatagcctgggaaagtttgggcagagggccctggatttctacagcattcatgtgaccaaggagtccacccaccccgtgaagcccctggcccagatcgccggaaacagatacgcctccggacctgtgggaaaggccctgagcgacgcatgtatgggcacaatcgcctccttcctgtctaagtaccaggacatcatcatcgaacaccagaaggtggtgaagggcaaccagaagagactggagagcctgcgggagctggccggcaaggaaaacctggaataccctagcgtgaccctgccacctcagcctcacaccaaggagggcgttgatgcctacaacgaagtgatcgcccgggtgcgaatgtgggtgaacctgaacctgtggcagaagctgaagctaagcagagatgatgccaagcctctgctgagactgaagggattcccttcctttcctctggtcgagagacaggccaacgaagtggactggtgggacatggtgtgtaacgtgaagaagctgatcaacgagaaaaaggaggatggcaaggtgttttggcagaatctggctggctacaagagacaggaagccctgagaccatacctgagcagcgaggaagatcggaagaagggaaagaaattcgctcggtaccagctgggcgacctgctgctgcacctggaaaagaagcacggcgaggactggggaaaggtgtacgacgaggcctgggagcggattgacaagaaagtggaaggcctgagcaagcacatcaagctggaagaggaacggagaagcgaggacgcccagagcaaggccgccctgaccgactggctgcgggctaaggccagcttcgtgatcgagggcctgaaggaggccgacaaggacgagttctgcagatgcgagctgaagctgcagaagtggtacggggacctgcggggaaagcccttcgccatcgaagccgagaacagcatcctggacatcagcggcttcagcaagcagtacaactgtgccttcatctggcagaaggacggcgtgaagaagctgaacctgtacctgatcatcaactacttcaagggcggcaagctgcggttcaagaagatcaaacctgaagccttcgaagccaacagattctacaccgtgatcaacaaaaagagcggcgagatcgtgcccatggaggtgaacttcaacttcgacgaccccaacctgatcatcctgcctctggcctttggcaagagacagggcagagaattcatctggaacgacctgctgtccctggaaaccggcagcctgaagctggccaacggaagagtgatcgagaagacactgtacaacagaagaacccggcaggatgagcctgccctgttcgtggccctgaccttcgagcggcgggaggtcctggactcctccaatatcaaaccaatgaacctgatcggcgtggcaagaggcgaaaacatccccgccgtgatcgccctgaccgaccccgagggctgcccactgagccggtttaaggatagcctgggaaacccaacccacatcctgagaatcggcgagagctataaggagaagcagcggaccatccaggccaagaaggaggtggagcagcggagagccggcggctacagccggaagtacgccagcaaagccaagaatctggcagacgatatggtgagaaacaccgctagagatctgctgtactacgccgtgacccaggatgccatgctgatcttcgccaacctgagccggggcttcggccggcagggcaagcggaccttcatggccgagagacagtacacacggatggaggactggctgaccgccaagctggcctacgagggcctgagcaagacctacctgtccaagacactggcccagtacacctccaagacatgcagcaactgtgggtttaccatcaccagcgccgactacgacagggtgctggagaagctgaagaagacagcaacaggctggatgaccacaattaacggcaaggagctgaaggtggagggccagattacctactacaacagatacaagagacagaacgtagtcaaggacctgtccgtcgagctggatagactgagcgaagaatctgtgaacaacgacatctcctcctggacaaagggcagaagcggagaagctctgagcctcctgaagaaaagattctcccatagacccgtgcaggagaagttcgtgtgcctgaactgcggcttcgagacacacgcagccgagcaagccgccctgaacatcgccagatcctggctgttcctgcggagccaggagtacaagaaataccagacaaacaagacaaccggcaacaccgataagagagccttcgtcgagacctggcagtccttttaccggaagaagcttaaggaggtgtggaaacctgccgtgcggtctggcggatctggcggaggctccacaagcatggagcccctgaagttcagggacgtggccatcgagttcagcctggaggagtggcagtgcctggacagcatccagcagaacctgtacaggaacgtgatgctggagaactacaggaacctggtgttcctgggcatcgccgccagcaagcccgacctgatcatctgcctggagcaggagaaggagccctggagcaggaagaggaggaggatggtggccgagctgcccgtgatctgcagccacttcaccagccccaagaaaaagagaaaagtctaagctgccttctgcggggcttgccttctggccatgcccttcttctctcccttgcacctgtacctcttggtctttgaataaagcctgagtaggaaggctagcaaaaaaaaaaaaaaaaaaaaaaaaaaaaaaaaaaaaaaaaaaaaaaaaaaaaaaaaaaaaaaaaaaaaaaaaaaaaaaaa

SEQ ID NO: 7209 - RNA, 5797 nt, synthetic construct
  source 1..5797: mol_type = other RNA
aggaaataagagagaaaagaagagtaagaagaaatataagagccaccatggcccctaagaagaagcgtaaagtgagccggatggaacgcctcgtctacgaggtgcggcagaagtgcagaaacatcgaggacatctgcatctcctgcggatctctgaacgtgaccctggagcacccactgttcatcggcggcatgtgccagaactgtaaaaactgttttctggagtgtgcctatcaatacgacgatgacggctaccagagctactgcaccatctgttgcggcggaagagaggtgctgatgtgtggaaataacaactgctgccggtgcttctgcgtggaatgcgtggacctgctggtgggccccggcgccgcccaggccgctattaaggaagatccttggaactgctacatgtgcggccacaagggcacatacggcctgctgagacggagagaggactggcctagcagactgcagatgttcttcgccaataaccacgaccaggagttcgacccccctaaggtgtaccctcccgtccccgccgagaagagaaagcccatccgggtcctgagcctgttcgatggcatcgccaccggtctgctggtgctgaaggacctgggcatccaggtggataggtacattgcctccgaggtgtgcgaggactccatcaccgtgggaatggtgcgtcatcagggcaagatcatgtacgtgggcgacgtgcggagcgtgacacagaagcatatccaggagtggggccctttcgacctggtgatcggcggcagcccttgcaatgacctgagcatcgtgaacccagcccggaagggcctgtacgagggaaccggcagactgttcttcgagttttacagactgctgcacgacgcccggcctaaggaaggcgacgaccggcccttcttttggctgttcgagaatgtggtggccatgggagtcagcgacaagcgggatattagccggttcctggagagcaaccccgtgatgatcgatgccaaggaagtgagcgccgcccaccgggccagatacttctggggcaatctgcctggcatgaacagacccctggccagcaccgtgaacgacaagctggagctgcaggagtgcctggagcacggccggatcgccaagttcagcaaggtgagaaccatcaccacccgaagcaacagcatcaaacaaggcaaggaccagcactttcctgtgttcatgaacgagaaggaggacatcctgtggtgtaccgagatggagagagtgttcgggttcccagtccactacacagatgtcagcaacatgtctagactggccagacagagactgctgggaagaagctggtccgtccctgtgatcagacacctgttcgcccctctgaaggagtacttcgcctgcgtgagcagcggcaacagcaacgccaacagccggggccccagcttctctagcggcctggtgccactgtccctgagagggagccacatgggccccatggagatctacaaaaccgtgagcgcctggaagcggcagcctgtgcgcgtgctgagcctgtttcggaatatcgataaagtcctgaaaagcctgggattcctggagagcggctctggctccggcggtggcaccctgaagtacgtggaggatgtgacaaacgtggtcagacgggatgtggagaagtggggccccttcgatctggtgtacggcagcacccaacccctgggcagctcttgtgaccggtgccctggctggtacatgtttcagttccaccggatcctgcagtacgccctgccgagacaggagtcccagcggccattcttttggattttcatggacaacttgctgctgaccgaggatgaccaggaaactaccactcggttcctgcagaccgaagccgtgaccctgcaggacgtgagaggccgggactaccagaacgccatgcgggtgtggtccaacatccctggactgaaaagcaagcacgcacctctgacccctaaagaagaggagtacctgcaggcccaggtgcggagcagaagcaagctggacgcccctaaggtggatctgctggtgaagaattgcctcctgcccctgagagagtacttcaagtatttcagccagaatagtctgcccctgggcggcccaagcagcggcgcccctcctcccagcggcggcagcccagccggctccccaacctctaccgaggagggcacctctgagtccgccacccccgagagcggccctggcacctccaccgagcccagcgagggcagcgcacccggcagccctgccggcagccccacctccacagaggagggaaccagcaccgagcccagcgaaggcagcgccccaggcaccagcaccgagcctagtgagggcggctctggcggcggcagcgcccaggagattaaacggatcaacaagatcagaagaagacttgtgaaagacagcaacaccaagaaggccggcaagacaggccccatgaaaaccctgctggttagagtgatgacacccgatctgagagagcggctggaaaacctgagaaagaagcctgaaaatatcccccagcccatcagcaatacatctagagccaacctgaataagctgctgaccgattacaccgaaatgaagaaggcgatcctgcatgtgtactgggaagagttccagaaggaccctgtgggcctgatgagccgggtggcccagcctgccagcaagaagatcgatcagaacaagctgaaacctgagatggacgagaagggcaacctgaccaccgccggctttgcctgctctcagtgtggccagcccctgttcgtgtacaagctggagcaggtgtctgagaagggcaaggcttacaccaactacttcggacggtgcaatgtggccgagcacgaaaagctgatcctgctggcccagctgaagcccgagaaggatagcgacgaagccgtgacatatagcctgggaaagtttgggcagagggccctggatttctacagcattcatgtgaccaaggagtccacccaccccgtgaagcccctggcccagatcgccggaaacagatacgcctccggacctgtgggaaaggccctgagcgacgcatgtatgggcacaatcgcctccttcctgtctaagtaccaggacatcatcatcgaacaccagaaggtggtgaagggcaaccagaagagactggagagcctgcgggagctggccggcaaggaaaacctggaataccctagcgtgaccctgccacctcagcctcacaccaaggagggcgttgatgcctacaacgaagtgatcgcccgggtgcgaatgtgggtgaacctgaacctgtggcagaagctgaagctaagcagagatgatgccaagcctctgctgagactgaagggattcccttcctttcctctggtcgagagacaggccaacgaagtggactggtgggacatggtgtgtaacgtgaagaagctgatcaacgagaaaaaggaggatggcaaggtgttttggcagaatctggctggctacaagagacaggaagccctgagaccatacctgagcagcgaggaagatcggaagaagggaaagaaattcgctcggtaccagctgggcgacctgctgctgcacctggaaaagaagcacggcgaggactggggaaaggtgtacgacgaggcctgggagcggattgacaagaaagtggaaggcctgagcaagcacatcaagctggaagaggaacggagaagcgaggacgcccagagcaaggccgccctgaccgactggctgcgggctaaggccagcttcgtgatcgagggcctgaaggaggccgacaaggacgagttctgcagatgcgagctgaagctgcagaagtggtacggggacctgcggggaaagcccttcgccatcgaagccgagaacagcatcctggacatcagcggcttcagcaagcagtacaactgtgccttcatctggcagaaggacggcgtgaagaagctgaacctgtacctgatcatcaactacttcaagggcggcaagctgcggttcaagaagatcaaacctgaagccttcgaagccaacagattctacaccgtgatcaacaaaaagagcggcgagatcgtgcccatggaggtgaacttcaacttcgacgaccccaacctgatcatcctgcctctggcctttggcaagagacagggcagagaattcatctggaacgacctgctgtccctggaaaccggcagcctgaagctggccaacggaagagtgatcgagaagacactgtacaacagaagaacccggcaggatgagcctgccctgttcgtggccctgaccttcgagcggcgggaggtcctggactcctccaatatcaaaccaatgaacctgatcggcgtggcaagaggcgaaaacatccccgccgtgatcgccctgaccgaccccgagggctgcccactgagccggtttaaggatagcctgggaaacccaacccacatcctgagaatcggcgagagctataaggagaagcagcggaccatccaggccaagaaggaggtggagcagcggagagccggcggctacagccggaagtacgccagcaaagccaagaatctggcagacgatatggtgagaaacaccgctagagatctgctgtactacgccgtgacccaggatgccatgctgatcttcgccaacctgagccggggcttcggccggcagggcaagcggaccttcatggccgagagacagtacacacggatggaggactggctgaccgccaagctggcctacgagggcctgagcaagacctacctgtccaagacactggcccagtacacctccaagacatgcagcaactgtgggtttaccatcaccagcgccgactacgacagggtgctggagaagctgaagaagacagcaacaggctggatgaccacaattaacggcaaggagctgaaggtggagggccagattacctactacaacagatacaagagacagaacgtagtcaaggacctgtccgtcgagctggatagactgagcgaagaatctgtgaacaacgacatctcctcctggacaaagggcagaagcggagaagctctgagcctcctgaagaaaagattctcccatagacccgtgcaggagaagttcgtgtgcctgaactgcggcttcgagacacacgcagccgagcaagccgccctgaacatcgccagatcctggctgttcctgcggagccaggagtacaagaaataccagacaaacaagacaaccggcaacaccgataagagagccttcgtcgagacctggcagtccttttaccggaagaagcttaaggaggtgtggaaacctgccgtgcggtctggcggatctggcggaggctccacaagcatggagagcgtgagcttcgaggacgtggccgtgaacttcacccccgaggagtgggccctgctgaacagcagccagaagaggctgcacagggacgtgatgcaggagaacttcaggaacctggccgccatcgccaagaaccaggaggaccccaccctggaggacgactacgagtacctgaggaagatcctgcccttcgccgtgcagaccggctacaggctgtgcgagaaccaggactacgccgagaccagccccaagaaaaagagaaaagtctaagctgccttctgcggggcttgccttctggccatgcccttcttctctcccttgcacctgtacctcttggtctttgaataaagcctgagtaggaaggctagcaaaaaaaaaaaaaaaaaaaaaaaaaaaaaaaaaaaaaaaaaaaaaaaaaaaaaaaaaaaaaaaaaaaaaaaaaaaaaaaa

SEQ ID NO: 7210 - RNA, 5797 nt, synthetic construct
  source 1..5797: mol_type = other RNA
aggaaataagagagaaaagaagagtaagaagaaatataagagccaccatggcccctaagaagaagcgtaaagtgagccggatggaacgcctcgtctacgaggtgcggcagaagtgcagaaacatcgaggacatctgcatctcctgcggatctctgaacgtgaccctggagcacccactgttcatcggcggcatgtgccagaactgtaaaaactgttttctggagtgtgcctatcaatacgacgatgacggctaccagagctactgcaccatctgttgcggcggaagagaggtgctgatgtgtggaaataacaactgctgccggtgcttctgcgtggaatgcgtggacctgctggtgggccccggcgccgcccaggccgctattaaggaagatccttggaactgctacatgtgcggccacaagggcacatacggcctgctgagacggagagaggactggcctagcagactgcagatgttcttcgccaataaccacgaccaggagttcgacccccctaaggtgtaccctcccgtccccgccgagaagagaaagcccatccgggtcctgagcctgttcgatggcatcgccaccggtctgctggtgctgaaggacctgggcatccaggtggataggtacattgcctccgaggtgtgcgaggactccatcaccgtgggaatggtgcgtcatcagggcaagatcatgtacgtgggcgacgtgcggagcgtgacacagaagcatatccaggagtggggccctttcgacctggtgatcggcggcagcccttgcaatgacctgagcatcgtgaacccagcccggaagggcctgtacgagggaaccggcagactgttcttcgagttttacagactgctgcacgacgcccggcctaaggaaggcgacgaccggcccttcttttggctgttcgagaatgtggtggccatgggagtcagcgacaagcgggatattagccggttcctggagagcaaccccgtgatgatcgatgccaaggaagtgagcgccgcccaccgggccagatacttctggggcaatctgcctggcatgaacagacccctggccagcaccgtgaacgacaagctggagctgcaggagtgcctggagcacggccggatcgccaagttcagcaaggtgagaaccatcaccacccgaagcaacagcatcaaacaaggcaaggaccagcactttcctgtgttcatgaacgagaaggaggacatcctgtggtgtaccgagatggagagagtgttcgggttcccagtccactacacagatgtcagcaacatgtctagactggccagacagagactgctgggaagaagctggtccgtccctgtgatcagacacctgttcgcccctctgaaggagtacttcgcctgcgtgagcagcggcaacagcaacgccaacagccggggccccagcttctctagcggcctggtgccactgtccctgagagggagccacatgggccccatggagatctacaaaaccgtgagcgcctggaagcggcagcctgtgcgcgtgctgagcctgtttcggaatatcgataaagtcctgaaaagcctgggattcctggagagcggctctggctccggcggtggcaccctgaagtacgtggaggatgtgacaaacgtggtcagacgggatgtggagaagtggggccccttcgatctggtgtacggcagcacccaacccctgggcagctcttgtgaccggtgccctggctggtacatgtttcagttccaccggatcctgcagtacgccctgccgagacaggagtcccagcggccattcttttggattttcatggacaacttgctgctgaccgaggatgaccaggaaactaccactcggttcctgcagaccgaagccgtgaccctgcaggacgtgagaggccgggactaccagaacgccatgcgggtgtggtccaacatccctggactgaaaagcaagcacgcacctctgacccctaaagaagaggagtacctgcaggcccaggtgcggagcagaagcaagctggacgcccctaaggtggatctgctggtgaagaattgcctcctgcccctgagagagtacttcaagtatttcagccagaatagtctgcccctgggcggcccaagcagcggcgcccctcctcccagcggcggcagcccagccggctccccaacctctaccgaggagggcacctctgagtccgccacccccgagagcggccctggcacctccaccgagcccagcgagggcagcgcacccggcagccctgccggcagccccacctccacagaggagggaaccagcaccgagcccagcgaaggcagcgccccaggcaccagcaccgagcctagtgagggcggctctggcggcggcagcgcccaggagattaaacggatcaacaagatcagaagaagacttgtgaaagacagcaacaccaagaaggccggcaagacaggccccatgaaaaccctgctggttagagtgatgacacccgatctgagagagcggctggaaaacctgagaaagaagcctgaaaatatcccccagcccatcagcaatacatctagagccaacctgaataagctgctgaccgattacaccgaaatgaagaaggcgatcctgcatgtgtactgggaagagttccagaaggaccctgtgggcctgatgagccgggtggcccagcctgccagcaagaagatcgatcagaacaagctgaaacctgagatggacgagaagggcaacctgaccaccgccggctttgcctgctctcagtgtggccagcccctgttcgtgtacaagctggagcaggtgtctgagaagggcaaggcttacaccaactacttcggacggtgcaatgtggccgagcacgaaaagctgatcctgctggcccagctgaagcccgagaaggatagcgacgaagccgtgacatatagcctgggaaagtttgggcagagggccctggatttctacagcattcatgtgaccaaggagtccacccaccccgtgaagcccctggcccagatcgccggaaacagatacgcctccggacctgtgggaaaggccctgagcgacgcatgtatgggcacaatcgcctccttcctgtctaagtaccaggacatcatcatcgaacaccagaaggtggtgaagggcaaccagaagagactggagagcctgcgggagctggccggcaaggaaaacctggaataccctagcgtgaccctgccacctcagcctcacaccaaggagggcgttgatgcctacaacgaagtgatcgcccgggtgcgaatgtgggtgaacctgaacctgtggcagaagctgaagctaagcagagatgatgccaagcctctgctgagactgaagggattcccttcctttcctctggtcgagagacaggccaacgaagtggactggtgggacatggtgtgtaacgtgaagaagctgatcaacgagaaaaaggaggatggcaaggtgttttggcagaatctggctggctacaagagacaggaagccctgagaccatacctgagcagcgaggaagatcggaagaagggaaagaaattcgctcggtaccagctgggcgacctgctgctgcacctggaaaagaagcacggcgaggactggggaaaggtgtacgacgaggcctgggagcggattgacaagaaagtggaaggcctgagcaagcacatcaagctggaagaggaacggagaagcgaggacgcccagagcaaggccgccctgaccgactggctgcgggctaaggccagcttcgtgatcgagggcctgaaggaggccgacaaggacgagttctgcagatgcgagctgaagctgcagaagtggtacggggacctgcggggaaagcccttcgccatcgaagccgagaacagcatcctggacatcagcggcttcagcaagcagtacaactgtgccttcatctggcagaaggacggcgtgaagaagctgaacctgtacctgatcatcaactacttcaagggcggcaagctgcggttcaagaagatcaaacctgaagccttcgaagccaacagattctacaccgtgatcaacaaaaagagcggcgagatcgtgcccatggaggtgaacttcaacttcgacgaccccaacctgatcatcctgcctctggcctttggcaagagacagggcagagaattcatctggaacgacctgctgtccctggaaaccggcagcctgaagctggccaacggaagagtgatcgagaagacactgtacaacagaagaacccggcaggatgagcctgccctgttcgtggccctgaccttcgagcggcgggaggtcctggactcctccaatatcaaaccaatgaacctgatcggcgtggcaagaggcgaaaacatccccgccgtgatcgccctgaccgaccccgagggctgcccactgagccggtttaaggatagcctgggaaacccaacccacatcctgagaatcggcgagagctataaggagaagcagcggaccatccaggccaagaaggaggtggagcagcggagagccggcggctacagccggaagtacgccagcaaagccaagaatctggcagacgatatggtgagaaacaccgctagagatctgctgtactacgccgtgacccaggatgccatgctgatcttcgccaacctgagccggggcttcggccggcagggcaagcggaccttcatggccgagagacagtacacacggatggaggactggctgaccgccaagctggcctacgagggcctgagcaagacctacctgtccaagacactggcccagtacacctccaagacatgcagcaactgtgggtttaccatcaccagcgccgactacgacagggtgctggagaagctgaagaagacagcaacaggctggatgaccacaattaacggcaaggagctgaaggtggagggccagattacctactacaacagatacaagagacagaacgtagtcaaggacctgtccgtcgagctggatagactgagcgaagaatctgtgaacaacgacatctcctcctggacaaagggcagaagcggagaagctctgagcctcctgaagaaaagattctcccatagacccgtgcaggagaagttcgtgtgcctgaactgcggcttcgagacacacgcagccgagcaagccgccctgaacatcgccagatcctggctgttcctgcggagccaggagtacaagaaataccagacaaacaagacaaccggcaacaccgataagagagccttcgtcgagacctggcagtccttttaccggaagaagcttaaggaggtgtggaaacctgccgtgcggtctggcggatctggcggaggctccacaagcaccccccagaccctgaagcccagggcccccggcgcctgcagcagggccaggagccccggccccggcatccaggacagcgacgccgtgggcagcgtgaccttcgaggacgtggccgtgtacttcagctgggaggagtgggccctgctggacgaggcccagaggtgcctgtaccacgacgtgatgctggagaacttcgccctgaccagcagcctgggcggccccaccggcggcggcagggtggtgaccagccccaagaaaaagagaaaagtctaagctgccttctgcggggcttgccttctggccatgcccttcttctctcccttgcacctgtacctcttggtctttgaataaagcctgagtaggaaggctagcaaaaaaaaaaaaaaaaaaaaaaaaaaaaaaaaaaaaaaaaaaaaaaaaaaaaaaaaaaaaaaaaaaaaaaaaaaaaaaaa

SEQ ID NO: 7211 - RNA, 5797 nt, synthetic construct
  source 1..5797: mol_type = other RNA
aggaaataagagagaaaagaagagtaagaagaaatataagagccaccatggcccctaagaagaagcgtaaagtgagccggatggaacgcctcgtctacgaggtgcggcagaagtgcagaaacatcgaggacatctgcatctcctgcggatctctgaacgtgaccctggagcacccactgttcatcggcggcatgtgccagaactgtaaaaactgttttctggagtgtgcctatcaatacgacgatgacggctaccagagctactgcaccatctgttgcggcggaagagaggtgctgatgtgtggaaataacaactgctgccggtgcttctgcgtggaatgcgtggacctgctggtgggccccggcgccgcccaggccgctattaaggaagatccttggaactgctacatgtgcggccacaagggcacatacggcctgctgagacggagagaggactggcctagcagactgcagatgttcttcgccaataaccacgaccaggagttcgacccccctaaggtgtaccctcccgtccccgccgagaagagaaagcccatccgggtcctgagcctgttcgatggcatcgccaccggtctgctggtgctgaaggacctgggcatccaggtggataggtacattgcctccgaggtgtgcgaggactccatcaccgtgggaatggtgcgtcatcagggcaagatcatgtacgtgggcgacgtgcggagcgtgacacagaagcatatccaggagtggggccctttcgacctggtgatcggcggcagcccttgcaatgacctgagcatcgtgaacccagcccggaagggcctgtacgagggaaccggcagactgttcttcgagttttacagactgctgcacgacgcccggcctaaggaaggcgacgaccggcccttcttttggctgttcgagaatgtggtggccatgggagtcagcgacaagcgggatattagccggttcctggagagcaaccccgtgatgatcgatgccaaggaagtgagcgccgcccaccgggccagatacttctggggcaatctgcctggcatgaacagacccctggccagcaccgtgaacgacaagctggagctgcaggagtgcctggagcacggccggatcgccaagttcagcaaggtgagaaccatcaccacccgaagcaacagcatcaaacaaggcaaggaccagcactttcctgtgttcatgaacgagaaggaggacatcctgtggtgtaccgagatggagagagtgttcgggttcccagtccactacacagatgtcagcaacatgtctagactggccagacagagactgctgggaagaagctggtccgtccctgtgatcagacacctgttcgcccctctgaaggagtacttcgcctgcgtgagcagcggcaacagcaacgccaacagccggggccccagcttctctagcggcctggtgccactgtccctgagagggagccacatgggccccatggagatctacaaaaccgtgagcgcctggaagcggcagcctgtgcgcgtgctgagcctgtttcggaatatcgataaagtcctgaaaagcctgggattcctggagagcggctctggctccggcggtggcaccctgaagtacgtggaggatgtgacaaacgtggtcagacgggatgtggagaagtggggccccttcgatctggtgtacggcagcacccaacccctgggcagctcttgtgaccggtgccctggctggtacatgtttcagttccaccggatcctgcagtacgccctgccgagacaggagtcccagcggccattcttttggattttcatggacaacttgctgctgaccgaggatgaccaggaaactaccactcggttcctgcagaccgaagccgtgaccctgcaggacgtgagaggccgggactaccagaacgccatgcgggtgtggtccaacatccctggactgaaaagcaagcacgcacctctgacccctaaagaagaggagtacctgcaggcccaggtgcggagcagaagcaagctggacgcccctaaggtggatctgctggtgaagaattgcctcctgcccctgagagagtacttcaagtatttcagccagaatagtctgcccctgggcggcccaagcagcggcgcccctcctcccagcggcggcagcccagccggctccccaacctctaccgaggagggcacctctgagtccgccacccccgagagcggccctggcacctccaccgagcccagcgagggcagcgcacccggcagccctgccggcagccccacctccacagaggagggaaccagcaccgagcccagcgaaggcagcgccccaggcaccagcaccgagcctagtgagggcggctctggcggcggcagcgcccaggagattaaacggatcaacaagatcagaagaagacttgtgaaagacagcaacaccaagaaggccggcaagacaggccccatgaaaaccctgctggttagagtgatgacacccgatctgagagagcggctggaaaacctgagaaagaagcctgaaaatatcccccagcccatcagcaatacatctagagccaacctgaataagctgctgaccgattacaccgaaatgaagaaggcgatcctgcatgtgtactgggaagagttccagaaggaccctgtgggcctgatgagccgggtggcccagcctgccagcaagaagatcgatcagaacaagctgaaacctgagatggacgagaagggcaacctgaccaccgccggctttgcctgctctcagtgtggccagcccctgttcgtgtacaagctggagcaggtgtctgagaagggcaaggcttacaccaactacttcggacggtgcaatgtggccgagcacgaaaagctgatcctgctggcccagctgaagcccgagaaggatagcgacgaagccgtgacatatagcctgggaaagtttgggcagagggccctggatttctacagcattcatgtgaccaaggagtccacccaccccgtgaagcccctggcccagatcgccggaaacagatacgcctccggacctgtgggaaaggccctgagcgacgcatgtatgggcacaatcgcctccttcctgtctaagtaccaggacatcatcatcgaacaccagaaggtggtgaagggcaaccagaagagactggagagcctgcgggagctggccggcaaggaaaacctggaataccctagcgtgaccctgccacctcagcctcacaccaaggagggcgttgatgcctacaacgaagtgatcgcccgggtgcgaatgtgggtgaacctgaacctgtggcagaagctgaagctaagcagagatgatgccaagcctctgctgagactgaagggattcccttcctttcctctggtcgagagacaggccaacgaagtggactggtgggacatggtgtgtaacgtgaagaagctgatcaacgagaaaaaggaggatggcaaggtgttttggcagaatctggctggctacaagagacaggaagccctgagaccatacctgagcagcgaggaagatcggaagaagggaaagaaattcgctcggtaccagctgggcgacctgctgctgcacctggaaaagaagcacggcgaggactggggaaaggtgtacgacgaggcctgggagcggattgacaagaaagtggaaggcctgagcaagcacatcaagctggaagaggaacggagaagcgaggacgcccagagcaaggccgccctgaccgactggctgcgggctaaggccagcttcgtgatcgagggcctgaaggaggccgacaaggacgagttctgcagatgcgagctgaagctgcagaagtggtacggggacctgcggggaaagcccttcgccatcgaagccgagaacagcatcctggacatcagcggcttcagcaagcagtacaactgtgccttcatctggcagaaggacggcgtgaagaagctgaacctgtacctgatcatcaactacttcaagggcggcaagctgcggttcaagaagatcaaacctgaagccttcgaagccaacagattctacaccgtgatcaacaaaaagagcggcgagatcgtgcccatggaggtgaacttcaacttcgacgaccccaacctgatcatcctgcctctggcctttggcaagagacagggcagagaattcatctggaacgacctgctgtccctggaaaccggcagcctgaagctggccaacggaagagtgatcgagaagacactgtacaacagaagaacccggcaggatgagcctgccctgttcgtggccctgaccttcgagcggcgggaggtcctggactcctccaatatcaaaccaatgaacctgatcggcgtggcaagaggcgaaaacatccccgccgtgatcgccctgaccgaccccgagggctgcccactgagccggtttaaggatagcctgggaaacccaacccacatcctgagaatcggcgagagctataaggagaagcagcggaccatccaggccaagaaggaggtggagcagcggagagccggcggctacagccggaagtacgccagcaaagccaagaatctggcagacgatatggtgagaaacaccgctagagatctgctgtactacgccgtgacccaggatgccatgctgatcttcgccaacctgagccggggcttcggccggcagggcaagcggaccttcatggccgagagacagtacacacggatggaggactggctgaccgccaagctggcctacgagggcctgagcaagacctacctgtccaagacactggcccagtacacctccaagacatgcagcaactgtgggtttaccatcaccagcgccgactacgacagggtgctggagaagctgaagaagacagcaacaggctggatgaccacaattaacggcaaggagctgaaggtggagggccagattacctactacaacagatacaagagacagaacgtagtcaaggacctgtccgtcgagctggatagactgagcgaagaatctgtgaacaacgacatctcctcctggacaaagggcagaagcggagaagctctgagcctcctgaagaaaagattctcccatagacccgtgcaggagaagttcgtgtgcctgaactgcggcttcgagacacacgcagccgagcaagccgccctgaacatcgccagatcctggctgttcctgcggagccaggagtacaagaaataccagacaaacaagacaaccggcaacaccgataagagagccttcgtcgagacctggcagtccttttaccggaagaagcttaaggaggtgtggaaacctgccgtgcggtctggcggatctggcggaggctccacaagccagggcagcgtgaccttcagggacgtggccatcgacttcagccaggaggagtgggagtggctgcagcccgcccagagggacctgtacaggcacgtgatgctggagaactacggccacctggtgagcctgggcctgaacatcagcaagccctacgtggtgagcctgctggagcagggcagggacccctggctggagaaggacgtgaggagggacctgttcagcgagagcagcggcgagatcaggaccagccccaagaaaaagagaaaagtctaagctgccttctgcggggcttgccttctggccatgcccttcttctctcccttgcacctgtacctcttggtctttgaataaagcctgagtaggaaggctagcaaaaaaaaaaaaaaaaaaaaaaaaaaaaaaaaaaaaaaaaaaaaaaaaaaaaaaaaaaaaaaaaaaaaaaaaaaaaaaaa

SEQ ID NO: 7212 - RNA, 5797 nt, synthetic construct
  source 1..5797: mol_type = other RNA
aggaaataagagagaaaagaagagtaagaagaaatataagagccaccatggcccctaagaagaagcgtaaagtgagccggatggaacgcctcgtctacgaggtgcggcagaagtgcagaaacatcgaggacatctgcatctcctgcggatctctgaacgtgaccctggagcacccactgttcatcggcggcatgtgccagaactgtaaaaactgttttctggagtgtgcctatcaatacgacgatgacggctaccagagctactgcaccatctgttgcggcggaagagaggtgctgatgtgtggaaataacaactgctgccggtgcttctgcgtggaatgcgtggacctgctggtgggccccggcgccgcccaggccgctattaaggaagatccttggaactgctacatgtgcggccacaagggcacatacggcctgctgagacggagagaggactggcctagcagactgcagatgttcttcgccaataaccacgaccaggagttcgacccccctaaggtgtaccctcccgtccccgccgagaagagaaagcccatccgggtcctgagcctgttcgatggcatcgccaccggtctgctggtgctgaaggacctgggcatccaggtggataggtacattgcctccgaggtgtgcgaggactccatcaccgtgggaatggtgcgtcatcagggcaagatcatgtacgtgggcgacgtgcggagcgtgacacagaagcatatccaggagtggggccctttcgacctggtgatcggcggcagcccttgcaatgacctgagcatcgtgaacccagcccggaagggcctgtacgagggaaccggcagactgttcttcgagttttacagactgctgcacgacgcccggcctaaggaaggcgacgaccggcccttcttttggctgttcgagaatgtggtggccatgggagtcagcgacaagcgggatattagccggttcctggagagcaaccccgtgatgatcgatgccaaggaagtgagcgccgcccaccgggccagatacttctggggcaatctgcctggcatgaacagacccctggccagcaccgtgaacgacaagctggagctgcaggagtgcctggagcacggccggatcgccaagttcagcaaggtgagaaccatcaccacccgaagcaacagcatcaaacaaggcaaggaccagcactttcctgtgttcatgaacgagaaggaggacatcctgtggtgtaccgagatggagagagtgttcgggttcccagtccactacacagatgtcagcaacatgtctagactggccagacagagactgctgggaagaagctggtccgtccctgtgatcagacacctgttcgcccctctgaaggagtacttcgcctgcgtgagcagcggcaacagcaacgccaacagccggggccccagcttctctagcggcctggtgccactgtccctgagagggagccacatgggccccatggagatctacaaaaccgtgagcgcctggaagcggcagcctgtgcgcgtgctgagcctgtttcggaatatcgataaagtcctgaaaagcctgggattcctggagagcggctctggctccggcggtggcaccctgaagtacgtggaggatgtgacaaacgtggtcagacgggatgtggagaagtggggccccttcgatctggtgtacggcagcacccaacccctgggcagctcttgtgaccggtgccctggctggtacatgtttcagttccaccggatcctgcagtacgccctgccgagacaggagtcccagcggccattcttttggattttcatggacaacttgctgctgaccgaggatgaccaggaaactaccactcggttcctgcagaccgaagccgtgaccctgcaggacgtgagaggccgggactaccagaacgccatgcgggtgtggtccaacatccctggactgaaaagcaagcacgcacctctgacccctaaagaagaggagtacctgcaggcccaggtgcggagcagaagcaagctggacgcccctaaggtggatctgctggtgaagaattgcctcctgcccctgagagagtacttcaagtatttcagccagaatagtctgcccctgggcggcccaagcagcggcgcccctcctcccagcggcggcagcccagccggctccccaacctctaccgaggagggcacctctgagtccgccacccccgagagcggccctggcacctccaccgagcccagcgagggcagcgcacccggcagccctgccggcagccccacctccacagaggagggaaccagcaccgagcccagcgaaggcagcgccccaggcaccagcaccgagcctagtgagggcggctctggcggcggcagcgcccaggagattaaacggatcaacaagatcagaagaagacttgtgaaagacagcaacaccaagaaggccggcaagacaggccccatgaaaaccctgctggttagagtgatgacacccgatctgagagagcggctggaaaacctgagaaagaagcctgaaaatatcccccagcccatcagcaatacatctagagccaacctgaataagctgctgaccgattacaccgaaatgaagaaggcgatcctgcatgtgtactgggaagagttccagaaggaccctgtgggcctgatgagccgggtggcccagcctgccagcaagaagatcgatcagaacaagctgaaacctgagatggacgagaagggcaacctgaccaccgccggctttgcctgctctcagtgtggccagcccctgttcgtgtacaagctggagcaggtgtctgagaagggcaaggcttacaccaactacttcggacggtgcaatgtggccgagcacgaaaagctgatcctgctggcccagctgaagcccgagaaggatagcgacgaagccgtgacatatagcctgggaaagtttgggcagagggccctggatttctacagcattcatgtgaccaaggagtccacccaccccgtgaagcccctggcccagatcgccggaaacagatacgcctccggacctgtgggaaaggccctgagcgacgcatgtatgggcacaatcgcctccttcctgtctaagtaccaggacatcatcatcgaacaccagaaggtggtgaagggcaaccagaagagactggagagcctgcgggagctggccggcaaggaaaacctggaataccctagcgtgaccctgccacctcagcctcacaccaaggagggcgttgatgcctacaacgaagtgatcgcccgggtgcgaatgtgggtgaacctgaacctgtggcagaagctgaagctaagcagagatgatgccaagcctctgctgagactgaagggattcccttcctttcctctggtcgagagacaggccaacgaagtggactggtgggacatggtgtgtaacgtgaagaagctgatcaacgagaaaaaggaggatggcaaggtgttttggcagaatctggctggctacaagagacaggaagccctgagaccatacctgagcagcgaggaagatcggaagaagggaaagaaattcgctcggtaccagctgggcgacctgctgctgcacctggaaaagaagcacggcgaggactggggaaaggtgtacgacgaggcctgggagcggattgacaagaaagtggaaggcctgagcaagcacatcaagctggaagaggaacggagaagcgaggacgcccagagcaaggccgccctgaccgactggctgcgggctaaggccagcttcgtgatcgagggcctgaaggaggccgacaaggacgagttctgcagatgcgagctgaagctgcagaagtggtacggggacctgcggggaaagcccttcgccatcgaagccgagaacagcatcctggacatcagcggcttcagcaagcagtacaactgtgccttcatctggcagaaggacggcgtgaagaagctgaacctgtacctgatcatcaactacttcaagggcggcaagctgcggttcaagaagatcaaacctgaagccttcgaagccaacagattctacaccgtgatcaacaaaaagagcggcgagatcgtgcccatggaggtgaacttcaacttcgacgaccccaacctgatcatcctgcctctggcctttggcaagagacagggcagagaattcatctggaacgacctgctgtccctggaaaccggcagcctgaagctggccaacggaagagtgatcgagaagacactgtacaacagaagaacccggcaggatgagcctgccctgttcgtggccctgaccttcgagcggcgggaggtcctggactcctccaatatcaaaccaatgaacctgatcggcgtggcaagaggcgaaaacatccccgccgtgatcgccctgaccgaccccgagggctgcccactgagccggtttaaggatagcctgggaaacccaacccacatcctgagaatcggcgagagctataaggagaagcagcggaccatccaggccaagaaggaggtggagcagcggagagccggcggctacagccggaagtacgccagcaaagccaagaatctggcagacgatatggtgagaaacaccgctagagatctgctgtactacgccgtgacccaggatgccatgctgatcttcgccaacctgagccggggcttcggccggcagggcaagcggaccttcatggccgagagacagtacacacggatggaggactggctgaccgccaagctggcctacgagggcctgagcaagacctacctgtccaagacactggcccagtacacctccaagacatgcagcaactgtgggtttaccatcaccagcgccgactacgacagggtgctggagaagctgaagaagacagcaacaggctggatgaccacaattaacggcaaggagctgaaggtggagggccagattacctactacaacagatacaagagacagaacgtagtcaaggacctgtccgtcgagctggatagactgagcgaagaatctgtgaacaacgacatctcctcctggacaaagggcagaagcggagaagctctgagcctcctgaagaaaagattctcccatagacccgtgcaggagaagttcgtgtgcctgaactgcggcttcgagacacacgcagccgagcaagccgccctgaacatcgccagatcctggctgttcctgcggagccaggagtacaagaaataccagacaaacaagacaaccggcaacaccgataagagagccttcgtcgagacctggcagtccttttaccggaagaagcttaaggaggtgtggaaacctgccgtgcggtctggcggatctggcggaggctccacaagcatgaccaccctgaaggagaccgtgaccttcaaggacgtggccgtggtgttcaccgaggaggagctgcagctgctggaccccgcccagaagaagctgtaccaggacgtgatgctggagaacttcaggaacctgctgagcgtgggccaccagcccttccacggcgacaccttccacttccccagggaggagaagttctggatggtggagaccgccacccagaaggagggcaacctggacggcgtgaccagccccaagaaaaagagaaaagtctaagctgccttctgcggggcttgccttctggccatgcccttcttctctcccttgcacctgtacctcttggtctttgaataaagcctgagtaggaaggctagcaaaaaaaaaaaaaaaaaaaaaaaaaaaaaaaaaaaaaaaaaaaaaaaaaaaaaaaaaaaaaaaaaaaaaaaaaaaaaaaa

SEQ ID NO: 7213 - RNA, 5797 nt, synthetic construct
  source 1..5797: mol_type = other RNA
aggaaataagagagaaaagaagagtaagaagaaatataagagccaccatggcccctaagaagaagcgtaaagtgagccggatggaacgcctcgtctacgaggtgcggcagaagtgcagaaacatcgaggacatctgcatctcctgcggatctctgaacgtgaccctggagcacccactgttcatcggcggcatgtgccagaactgtaaaaactgttttctggagtgtgcctatcaatacgacgatgacggctaccagagctactgcaccatctgttgcggcggaagagaggtgctgatgtgtggaaataacaactgctgccggtgcttctgcgtggaatgcgtggacctgctggtgggccccggcgccgcccaggccgctattaaggaagatccttggaactgctacatgtgcggccacaagggcacatacggcctgctgagacggagagaggactggcctagcagactgcagatgttcttcgccaataaccacgaccaggagttcgacccccctaaggtgtaccctcccgtccccgccgagaagagaaagcccatccgggtcctgagcctgttcgatggcatcgccaccggtctgctggtgctgaaggacctgggcatccaggtggataggtacattgcctccgaggtgtgcgaggactccatcaccgtgggaatggtgcgtcatcagggcaagatcatgtacgtgggcgacgtgcggagcgtgacacagaagcatatccaggagtggggccctttcgacctggtgatcggcggcagcccttgcaatgacctgagcatcgtgaacccagcccggaagggcctgtacgagggaaccggcagactgttcttcgagttttacagactgctgcacgacgcccggcctaaggaaggcgacgaccggcccttcttttggctgttcgagaatgtggtggccatgggagtcagcgacaagcgggatattagccggttcctggagagcaaccccgtgatgatcgatgccaaggaagtgagcgccgcccaccgggccagatacttctggggcaatctgcctggcatgaacagacccctggccagcaccgtgaacgacaagctggagctgcaggagtgcctggagcacggccggatcgccaagttcagcaaggtgagaaccatcaccacccgaagcaacagcatcaaacaaggcaaggaccagcactttcctgtgttcatgaacgagaaggaggacatcctgtggtgtaccgagatggagagagtgttcgggttcccagtccactacacagatgtcagcaacatgtctagactggccagacagagactgctgggaagaagctggtccgtccctgtgatcagacacctgttcgcccctctgaaggagtacttcgcctgcgtgagcagcggcaacagcaacgccaacagccggggccccagcttctctagcggcctggtgccactgtccctgagagggagccacatgggccccatggagatctacaaaaccgtgagcgcctggaagcggcagcctgtgcgcgtgctgagcctgtttcggaatatcgataaagtcctgaaaagcctgggattcctggagagcggctctggctccggcggtggcaccctgaagtacgtggaggatgtgacaaacgtggtcagacgggatgtggagaagtggggccccttcgatctggtgtacggcagcacccaacccctgggcagctcttgtgaccggtgccctggctggtacatgtttcagttccaccggatcctgcagtacgccctgccgagacaggagtcccagcggccattcttttggattttcatggacaacttgctgctgaccgaggatgaccaggaaactaccactcggttcctgcagaccgaagccgtgaccctgcaggacgtgagaggccgggactaccagaacgccatgcgggtgtggtccaacatccctggactgaaaagcaagcacgcacctctgacccctaaagaagaggagtacctgcaggcccaggtgcggagcagaagcaagctggacgcccctaaggtggatctgctggtgaagaattgcctcctgcccctgagagagtacttcaagtatttcagccagaatagtctgcccctgggcggcccaagcagcggcgcccctcctcccagcggcggcagcccagccggctccccaacctctaccgaggagggcacctctgagtccgccacccccgagagcggccctggcacctccaccgagcccagcgagggcagcgcacccggcagccctgccggcagccccacctccacagaggagggaaccagcaccgagcccagcgaaggcagcgccccaggcaccagcaccgagcctagtgagggcggctctggcggcggcagcgcccaggagattaaacggatcaacaagatcagaagaagacttgtgaaagacagcaacaccaagaaggccggcaagacaggccccatgaaaaccctgctggttagagtgatgacacccgatctgagagagcggctggaaaacctgagaaagaagcctgaaaatatcccccagcccatcagcaatacatctagagccaacctgaataagctgctgaccgattacaccgaaatgaagaaggcgatcctgcatgtgtactgggaagagttccagaaggaccctgtgggcctgatgagccgggtggcccagcctgccagcaagaagatcgatcagaacaagctgaaacctgagatggacgagaagggcaacctgaccaccgccggctttgcctgctctcagtgtggccagcccctgttcgtgtacaagctggagcaggtgtctgagaagggcaaggcttacaccaactacttcggacggtgcaatgtggccgagcacgaaaagctgatcctgctggcccagctgaagcccgagaaggatagcgacgaagccgtgacatatagcctgggaaagtttgggcagagggccctggatttctacagcattcatgtgaccaaggagtccacccaccccgtgaagcccctggcccagatcgccggaaacagatacgcctccggacctgtgggaaaggccctgagcgacgcatgtatgggcacaatcgcctccttcctgtctaagtaccaggacatcatcatcgaacaccagaaggtggtgaagggcaaccagaagagactggagagcctgcgggagctggccggcaaggaaaacctggaataccctagcgtgaccctgccacctcagcctcacaccaaggagggcgttgatgcctacaacgaagtgatcgcccgggtgcgaatgtgggtgaacctgaacctgtggcagaagctgaagctaagcagagatgatgccaagcctctgctgagactgaagggattcccttcctttcctctggtcgagagacaggccaacgaagtggactggtgggacatggtgtgtaacgtgaagaagctgatcaacgagaaaaaggaggatggcaaggtgttttggcagaatctggctggctacaagagacaggaagccctgagaccatacctgagcagcgaggaagatcggaagaagggaaagaaattcgctcggtaccagctgggcgacctgctgctgcacctggaaaagaagcacggcgaggactggggaaaggtgtacgacgaggcctgggagcggattgacaagaaagtggaaggcctgagcaagcacatcaagctggaagaggaacggagaagcgaggacgcccagagcaaggccgccctgaccgactggctgcgggctaaggccagcttcgtgatcgagggcctgaaggaggccgacaaggacgagttctgcagatgcgagctgaagctgcagaagtggtacggggacctgcggggaaagcccttcgccatcgaagccgagaacagcatcctggacatcagcggcttcagcaagcagtacaactgtgccttcatctggcagaaggacggcgtgaagaagctgaacctgtacctgatcatcaactacttcaagggcggcaagctgcggttcaagaagatcaaacctgaagccttcgaagccaacagattctacaccgtgatcaacaaaaagagcggcgagatcgtgcccatggaggtgaacttcaacttcgacgaccccaacctgatcatcctgcctctggcctttggcaagagacagggcagagaattcatctggaacgacctgctgtccctggaaaccggcagcctgaagctggccaacggaagagtgatcgagaagacactgtacaacagaagaacccggcaggatgagcctgccctgttcgtggccctgaccttcgagcggcgggaggtcctggactcctccaatatcaaaccaatgaacctgatcggcgtggcaagaggcgaaaacatccccgccgtgatcgccctgaccgaccccgagggctgcccactgagccggtttaaggatagcctgggaaacccaacccacatcctgagaatcggcgagagctataaggagaagcagcggaccatccaggccaagaaggaggtggagcagcggagagccggcggctacagccggaagtacgccagcaaagccaagaatctggcagacgatatggtgagaaacaccgctagagatctgctgtactacgccgtgacccaggatgccatgctgatcttcgccaacctgagccggggcttcggccggcagggcaagcggaccttcatggccgagagacagtacacacggatggaggactggctgaccgccaagctggcctacgagggcctgagcaagacctacctgtccaagacactggcccagtacacctccaagacatgcagcaactgtgggtttaccatcaccagcgccgactacgacagggtgctggagaagctgaagaagacagcaacaggctggatgaccacaattaacggcaaggagctgaaggtggagggccagattacctactacaacagatacaagagacagaacgtagtcaaggacctgtccgtcgagctggatagactgagcgaagaatctgtgaacaacgacatctcctcctggacaaagggcagaagcggagaagctctgagcctcctgaagaaaagattctcccatagacccgtgcaggagaagttcgtgtgcctgaactgcggcttcgagacacacgcagccgagcaagccgccctgaacatcgccagatcctggctgttcctgcggagccaggagtacaagaaataccagacaaacaagacaaccggcaacaccgataagagagccttcgtcgagacctggcagtccttttaccggaagaagcttaaggaggtgtggaaacctgccgtgcggtctggcggatctggcggaggctccacaagcatgaccttcagcgacgtggccgtggacttcagccagcaggagtgggagtgcctggaccccgtgcagaagaccctgtacagggacgtgatgatggagaactacggcaacctggtgagcctgggccacagcatcagcaagcccgacgtgatcgccctgctggagcagggcaaggagccctgggtggtgaccaaggaggagaccaggaggtgctgcaccgacctggagagcaggtacgagatcatcaccagccccaagaaaaagagaaaagtctaagctgccttctgcggggcttgccttctggccatgcccttcttctctcccttgcacctgtacctcttggtctttgaataaagcctgagtaggaaggctagcaaaaaaaaaaaaaaaaaaaaaaaaaaaaaaaaaaaaaaaaaaaaaaaaaaaaaaaaaaaaaaaaaaaaaaaaaaaaaaaa

SEQ ID NO: 7214 - RNA, 5797 nt, synthetic construct
  source 1..5797: mol_type = other RNA
aggaaataagagagaaaagaagagtaagaagaaatataagagccaccatggcccctaagaagaagcgtaaagtgagccggatggaacgcctcgtctacgaggtgcggcagaagtgcagaaacatcgaggacatctgcatctcctgcggatctctgaacgtgaccctggagcacccactgttcatcggcggcatgtgccagaactgtaaaaactgttttctggagtgtgcctatcaatacgacgatgacggctaccagagctactgcaccatctgttgcggcggaagagaggtgctgatgtgtggaaataacaactgctgccggtgcttctgcgtggaatgcgtggacctgctggtgggccccggcgccgcccaggccgctattaaggaagatccttggaactgctacatgtgcggccacaagggcacatacggcctgctgagacggagagaggactggcctagcagactgcagatgttcttcgccaataaccacgaccaggagttcgacccccctaaggtgtaccctcccgtccccgccgagaagagaaagcccatccgggtcctgagcctgttcgatggcatcgccaccggtctgctggtgctgaaggacctgggcatccaggtggataggtacattgcctccgaggtgtgcgaggactccatcaccgtgggaatggtgcgtcatcagggcaagatcatgtacgtgggcgacgtgcggagcgtgacacagaagcatatccaggagtggggccctttcgacctggtgatcggcggcagcccttgcaatgacctgagcatcgtgaacccagcccggaagggcctgtacgagggaaccggcagactgttcttcgagttttacagactgctgcacgacgcccggcctaaggaaggcgacgaccggcccttcttttggctgttcgagaatgtggtggccatgggagtcagcgacaagcgggatattagccggttcctggagagcaaccccgtgatgatcgatgccaaggaagtgagcgccgcccaccgggccagatacttctggggcaatctgcctggcatgaacagacccctggccagcaccgtgaacgacaagctggagctgcaggagtgcctggagcacggccggatcgccaagttcagcaaggtgagaaccatcaccacccgaagcaacagcatcaaacaaggcaaggaccagcactttcctgtgttcatgaacgagaaggaggacatcctgtggtgtaccgagatggagagagtgttcgggttcccagtccactacacagatgtcagcaacatgtctagactggccagacagagactgctgggaagaagctggtccgtccctgtgatcagacacctgttcgcccctctgaaggagtacttcgcctgcgtgagcagcggcaacagcaacgccaacagccggggccccagcttctctagcggcctggtgccactgtccctgagagggagccacatgggccccatggagatctacaaaaccgtgagcgcctggaagcggcagcctgtgcgcgtgctgagcctgtttcggaatatcgataaagtcctgaaaagcctgggattcctggagagcggctctggctccggcggtggcaccctgaagtacgtggaggatgtgacaaacgtggtcagacgggatgtggagaagtggggccccttcgatctggtgtacggcagcacccaacccctgggcagctcttgtgaccggtgccctggctggtacatgtttcagttccaccggatcctgcagtacgccctgccgagacaggagtcccagcggccattcttttggattttcatggacaacttgctgctgaccgaggatgaccaggaaactaccactcggttcctgcagaccgaagccgtgaccctgcaggacgtgagaggccgggactaccagaacgccatgcgggtgtggtccaacatccctggactgaaaagcaagcacgcacctctgacccctaaagaagaggagtacctgcaggcccaggtgcggagcagaagcaagctggacgcccctaaggtggatctgctggtgaagaattgcctcctgcccctgagagagtacttcaagtatttcagccagaatagtctgcccctgggcggcccaagcagcggcgcccctcctcccagcggcggcagcccagccggctccccaacctctaccgaggagggcacctctgagtccgccacccccgagagcggccctggcacctccaccgagcccagcgagggcagcgcacccggcagccctgccggcagccccacctccacagaggagggaaccagcaccgagcccagcgaaggcagcgccccaggcaccagcaccgagcctagtgagggcggctctggcggcggcagcgcccaggagattaaacggatcaacaagatcagaagaagacttgtgaaagacagcaacaccaagaaggccggcaagacaggccccatgaaaaccctgctggttagagtgatgacacccgatctgagagagcggctggaaaacctgagaaagaagcctgaaaatatcccccagcccatcagcaatacatctagagccaacctgaataagctgctgaccgattacaccgaaatgaagaaggcgatcctgcatgtgtactgggaagagttccagaaggaccctgtgggcctgatgagccgggtggcccagcctgccagcaagaagatcgatcagaacaagctgaaacctgagatggacgagaagggcaacctgaccaccgccggctttgcctgctctcagtgtggccagcccctgttcgtgtacaagctggagcaggtgtctgagaagggcaaggcttacaccaactacttcggacggtgcaatgtggccgagcacgaaaagctgatcctgctggcccagctgaagcccgagaaggatagcgacgaagccgtgacatatagcctgggaaagtttgggcagagggccctggatttctacagcattcatgtgaccaaggagtccacccaccccgtgaagcccctggcccagatcgccggaaacagatacgcctccggacctgtgggaaaggccctgagcgacgcatgtatgggcacaatcgcctccttcctgtctaagtaccaggacatcatcatcgaacaccagaaggtggtgaagggcaaccagaagagactggagagcctgcgggagctggccggcaaggaaaacctggaataccctagcgtgaccctgccacctcagcctcacaccaaggagggcgttgatgcctacaacgaagtgatcgcccgggtgcgaatgtgggtgaacctgaacctgtggcagaagctgaagctaagcagagatgatgccaagcctctgctgagactgaagggattcccttcctttcctctggtcgagagacaggccaacgaagtggactggtgggacatggtgtgtaacgtgaagaagctgatcaacgagaaaaaggaggatggcaaggtgttttggcagaatctggctggctacaagagacaggaagccctgagaccatacctgagcagcgaggaagatcggaagaagggaaagaaattcgctcggtaccagctgggcgacctgctgctgcacctggaaaagaagcacggcgaggactggggaaaggtgtacgacgaggcctgggagcggattgacaagaaagtggaaggcctgagcaagcacatcaagctggaagaggaacggagaagcgaggacgcccagagcaaggccgccctgaccgactggctgcgggctaaggccagcttcgtgatcgagggcctgaaggaggccgacaaggacgagttctgcagatgcgagctgaagctgcagaagtggtacggggacctgcggggaaagcccttcgccatcgaagccgagaacagcatcctggacatcagcggcttcagcaagcagtacaactgtgccttcatctggcagaaggacggcgtgaagaagctgaacctgtacctgatcatcaactacttcaagggcggcaagctgcggttcaagaagatcaaacctgaagccttcgaagccaacagattctacaccgtgatcaacaaaaagagcggcgagatcgtgcccatggaggtgaacttcaacttcgacgaccccaacctgatcatcctgcctctggcctttggcaagagacagggcagagaattcatctggaacgacctgctgtccctggaaaccggcagcctgaagctggccaacggaagagtgatcgagaagacactgtacaacagaagaacccggcaggatgagcctgccctgttcgtggccctgaccttcgagcggcgggaggtcctggactcctccaatatcaaaccaatgaacctgatcggcgtggcaagaggcgaaaacatccccgccgtgatcgccctgaccgaccccgagggctgcccactgagccggtttaaggatagcctgggaaacccaacccacatcctgagaatcggcgagagctataaggagaagcagcggaccatccaggccaagaaggaggtggagcagcggagagccggcggctacagccggaagtacgccagcaaagccaagaatctggcagacgatatggtgagaaacaccgctagagatctgctgtactacgccgtgacccaggatgccatgctgatcttcgccaacctgagccggggcttcggccggcagggcaagcggaccttcatggccgagagacagtacacacggatggaggactggctgaccgccaagctggcctacgagggcctgagcaagacctacctgtccaagacactggcccagtacacctccaagacatgcagcaactgtgggtttaccatcaccagcgccgactacgacagggtgctggagaagctgaagaagacagcaacaggctggatgaccacaattaacggcaaggagctgaaggtggagggccagattacctactacaacagatacaagagacagaacgtagtcaaggacctgtccgtcgagctggatagactgagcgaagaatctgtgaacaacgacatctcctcctggacaaagggcagaagcggagaagctctgagcctcctgaagaaaagattctcccatagacccgtgcaggagaagttcgtgtgcctgaactgcggcttcgagacacacgcagccgagcaagccgccctgaacatcgccagatcctggctgttcctgcggagccaggagtacaagaaataccagacaaacaagacaaccggcaacaccgataagagagccttcgtcgagacctggcagtccttttaccggaagaagcttaaggaggtgtggaaacctgccgtgcggtctggcggatctggcggaggctccacaagcacccaggtgagcctgaccttcgacgacgtggccgtgaagctgacctgggaggagtggcagctgctggaccccgcccagaaggacctgtacagggacgtgatgctggagaactacagcaacctggtgagcgtgggctaccaggtgagcaagcccgacgccctgagcaggctggagaggggcgagcccccctggagcatcgaggacaagatccacaccaggaccttcagcggcgagaggccctacaccagccccaagaaaaagagaaaagtctaagctgccttctgcggggcttgccttctggccatgcccttcttctctcccttgcacctgtacctcttggtctttgaataaagcctgagtaggaaggctagcaaaaaaaaaaaaaaaaaaaaaaaaaaaaaaaaaaaaaaaaaaaaaaaaaaaaaaaaaaaaaaaaaaaaaaaaaaaaaaaa

SEQ ID NO: 7215 - RNA, 5797 nt, synthetic construct
  source 1..5797: mol_type = other RNA
aggaaataagagagaaaagaagagtaagaagaaatataagagccaccatggcccctaagaagaagcgtaaagtgagccggatggaacgcctcgtctacgaggtgcggcagaagtgcagaaacatcgaggacatctgcatctcctgcggatctctgaacgtgaccctggagcacccactgttcatcggcggcatgtgccagaactgtaaaaactgttttctggagtgtgcctatcaatacgacgatgacggctaccagagctactgcaccatctgttgcggcggaagagaggtgctgatgtgtggaaataacaactgctgccggtgcttctgcgtggaatgcgtggacctgctggtgggccccggcgccgcccaggccgctattaaggaagatccttggaactgctacatgtgcggccacaagggcacatacggcctgctgagacggagagaggactggcctagcagactgcagatgttcttcgccaataaccacgaccaggagttcgacccccctaaggtgtaccctcccgtccccgccgagaagagaaagcccatccgggtcctgagcctgttcgatggcatcgccaccggtctgctggtgctgaaggacctgggcatccaggtggataggtacattgcctccgaggtgtgcgaggactccatcaccgtgggaatggtgcgtcatcagggcaagatcatgtacgtgggcgacgtgcggagcgtgacacagaagcatatccaggagtggggccctttcgacctggtgatcggcggcagcccttgcaatgacctgagcatcgtgaacccagcccggaagggcctgtacgagggaaccggcagactgttcttcgagttttacagactgctgcacgacgcccggcctaaggaaggcgacgaccggcccttcttttggctgttcgagaatgtggtggccatgggagtcagcgacaagcgggatattagccggttcctggagagcaaccccgtgatgatcgatgccaaggaagtgagcgccgcccaccgggccagatacttctggggcaatctgcctggcatgaacagacccctggccagcaccgtgaacgacaagctggagctgcaggagtgcctggagcacggccggatcgccaagttcagcaaggtgagaaccatcaccacccgaagcaacagcatcaaacaaggcaaggaccagcactttcctgtgttcatgaacgagaaggaggacatcctgtggtgtaccgagatggagagagtgttcgggttcccagtccactacacagatgtcagcaacatgtctagactggccagacagagactgctgggaagaagctggtccgtccctgtgatcagacacctgttcgcccctctgaaggagtacttcgcctgcgtgagcagcggcaacagcaacgccaacagccggggccccagcttctctagcggcctggtgccactgtccctgagagggagccacatgggccccatggagatctacaaaaccgtgagcgcctggaagcggcagcctgtgcgcgtgctgagcctgtttcggaatatcgataaagtcctgaaaagcctgggattcctggagagcggctctggctccggcggtggcaccctgaagtacgtggaggatgtgacaaacgtggtcagacgggatgtggagaagtggggccccttcgatctggtgtacggcagcacccaacccctgggcagctcttgtgaccggtgccctggctggtacatgtttcagttccaccggatcctgcagtacgccctgccgagacaggagtcccagcggccattcttttggattttcatggacaacttgctgctgaccgaggatgaccaggaaactaccactcggttcctgcagaccgaagccgtgaccctgcaggacgtgagaggccgggactaccagaacgccatgcgggtgtggtccaacatccctggactgaaaagcaagcacgcacctctgacccctaaagaagaggagtacctgcaggcccaggtgcggagcagaagcaagctggacgcccctaaggtggatctgctggtgaagaattgcctcctgcccctgagagagtacttcaagtatttcagccagaatagtctgcccctgggcggcccaagcagcggcgcccctcctcccagcggcggcagcccagccggctccccaacctctaccgaggagggcacctctgagtccgccacccccgagagcggccctggcacctccaccgagcccagcgagggcagcgcacccggcagccctgccggcagccccacctccacagaggagggaaccagcaccgagcccagcgaaggcagcgccccaggcaccagcaccgagcctagtgagggcggctctggcggcggcagcgcccaggagattaaacggatcaacaagatcagaagaagacttgtgaaagacagcaacaccaagaaggccggcaagacaggccccatgaaaaccctgctggttagagtgatgacacccgatctgagagagcggctggaaaacctgagaaagaagcctgaaaatatcccccagcccatcagcaatacatctagagccaacctgaataagctgctgaccgattacaccgaaatgaagaaggcgatcctgcatgtgtactgggaagagttccagaaggaccctgtgggcctgatgagccgggtggcccagcctgccagcaagaagatcgatcagaacaagctgaaacctgagatggacgagaagggcaacctgaccaccgccggctttgcctgctctcagtgtggccagcccctgttcgtgtacaagctggagcaggtgtctgagaagggcaaggcttacaccaactacttcggacggtgcaatgtggccgagcacgaaaagctgatcctgctggcccagctgaagcccgagaaggatagcgacgaagccgtgacatatagcctgggaaagtttgggcagagggccctggatttctacagcattcatgtgaccaaggagtccacccaccccgtgaagcccctggcccagatcgccggaaacagatacgcctccggacctgtgggaaaggccctgagcgacgcatgtatgggcacaatcgcctccttcctgtctaagtaccaggacatcatcatcgaacaccagaaggtggtgaagggcaaccagaagagactggagagcctgcgggagctggccggcaaggaaaacctggaataccctagcgtgaccctgccacctcagcctcacaccaaggagggcgttgatgcctacaacgaagtgatcgcccgggtgcgaatgtgggtgaacctgaacctgtggcagaagctgaagctaagcagagatgatgccaagcctctgctgagactgaagggattcccttcctttcctctggtcgagagacaggccaacgaagtggactggtgggacatggtgtgtaacgtgaagaagctgatcaacgagaaaaaggaggatggcaaggtgttttggcagaatctggctggctacaagagacaggaagccctgagaccatacctgagcagcgaggaagatcggaagaagggaaagaaattcgctcggtaccagctgggcgacctgctgctgcacctggaaaagaagcacggcgaggactggggaaaggtgtacgacgaggcctgggagcggattgacaagaaagtggaaggcctgagcaagcacatcaagctggaagaggaacggagaagcgaggacgcccagagcaaggccgccctgaccgactggctgcgggctaaggccagcttcgtgatcgagggcctgaaggaggccgacaaggacgagttctgcagatgcgagctgaagctgcagaagtggtacggggacctgcggggaaagcccttcgccatcgaagccgagaacagcatcctggacatcagcggcttcagcaagcagtacaactgtgccttcatctggcagaaggacggcgtgaagaagctgaacctgtacctgatcatcaactacttcaagggcggcaagctgcggttcaagaagatcaaacctgaagccttcgaagccaacagattctacaccgtgatcaacaaaaagagcggcgagatcgtgcccatggaggtgaacttcaacttcgacgaccccaacctgatcatcctgcctctggcctttggcaagagacagggcagagaattcatctggaacgacctgctgtccctggaaaccggcagcctgaagctggccaacggaagagtgatcgagaagacactgtacaacagaagaacccggcaggatgagcctgccctgttcgtggccctgaccttcgagcggcgggaggtcctggactcctccaatatcaaaccaatgaacctgatcggcgtggcaagaggcgaaaacatccccgccgtgatcgccctgaccgaccccgagggctgcccactgagccggtttaaggatagcctgggaaacccaacccacatcctgagaatcggcgagagctataaggagaagcagcggaccatccaggccaagaaggaggtggagcagcggagagccggcggctacagccggaagtacgccagcaaagccaagaatctggcagacgatatggtgagaaacaccgctagagatctgctgtactacgccgtgacccaggatgccatgctgatcttcgccaacctgagccggggcttcggccggcagggcaagcggaccttcatggccgagagacagtacacacggatggaggactggctgaccgccaagctggcctacgagggcctgagcaagacctacctgtccaagacactggcccagtacacctccaagacatgcagcaactgtgggtttaccatcaccagcgccgactacgacagggtgctggagaagctgaagaagacagcaacaggctggatgaccacaattaacggcaaggagctgaaggtggagggccagattacctactacaacagatacaagagacagaacgtagtcaaggacctgtccgtcgagctggatagactgagcgaagaatctgtgaacaacgacatctcctcctggacaaagggcagaagcggagaagctctgagcctcctgaagaaaagattctcccatagacccgtgcaggagaagttcgtgtgcctgaactgcggcttcgagacacacgcagccgagcaagccgccctgaacatcgccagatcctggctgttcctgcggagccaggagtacaagaaataccagacaaacaagacaaccggcaacaccgataagagagccttcgtcgagacctggcagtccttttaccggaagaagcttaaggaggtgtggaaacctgccgtgcggtctggcggatctggcggaggctccacaagcatggccgccgccgccctggtgaacaccccccagggccacgtgaccttcgaggacatcgccgtgtacttcagccaggaggagtggggcctgctggacgaggcccagaggtgcctgtaccacgacgtgatgctggagaacttcagcctgatggccagcgtgggctgcctgcacggcatcgaggccgaggaggcccccagcgagcagaccgtgagcgcccagggcgccagccaggccaggacccccaccagccccaagaaaaagagaaaagtctaagctgccttctgcggggcttgccttctggccatgcccttcttctctcccttgcacctgtacctcttggtctttgaataaagcctgagtaggaaggctagcaaaaaaaaaaaaaaaaaaaaaaaaaaaaaaaaaaaaaaaaaaaaaaaaaaaaaaaaaaaaaaaaaaaaaaaaaaaaaaaa

SEQ ID NO: 7216 - RNA, 5797 nt, synthetic construct
  source 1..5797: mol_type = other RNA
aggaaataagagagaaaagaagagtaagaagaaatataagagccaccatggcccctaagaagaagcgtaaagtgagccggatggaacgcctcgtctacgaggtgcggcagaagtgcagaaacatcgaggacatctgcatctcctgcggatctctgaacgtgaccctggagcacccactgttcatcggcggcatgtgccagaactgtaaaaactgttttctggagtgtgcctatcaatacgacgatgacggctaccagagctactgcaccatctgttgcggcggaagagaggtgctgatgtgtggaaataacaactgctgccggtgcttctgcgtggaatgcgtggacctgctggtgggccccggcgccgcccaggccgctattaaggaagatccttggaactgctacatgtgcggccacaagggcacatacggcctgctgagacggagagaggactggcctagcagactgcagatgttcttcgccaataaccacgaccaggagttcgacccccctaaggtgtaccctcccgtccccgccgagaagagaaagcccatccgggtcctgagcctgttcgatggcatcgccaccggtctgctggtgctgaaggacctgggcatccaggtggataggtacattgcctccgaggtgtgcgaggactccatcaccgtgggaatggtgcgtcatcagggcaagatcatgtacgtgggcgacgtgcggagcgtgacacagaagcatatccaggagtggggccctttcgacctggtgatcggcggcagcccttgcaatgacctgagcatcgtgaacccagcccggaagggcctgtacgagggaaccggcagactgttcttcgagttttacagactgctgcacgacgcccggcctaaggaaggcgacgaccggcccttcttttggctgttcgagaatgtggtggccatgggagtcagcgacaagcgggatattagccggttcctggagagcaaccccgtgatgatcgatgccaaggaagtgagcgccgcccaccgggccagatacttctggggcaatctgcctggcatgaacagacccctggccagcaccgtgaacgacaagctggagctgcaggagtgcctggagcacggccggatcgccaagttcagcaaggtgagaaccatcaccacccgaagcaacagcatcaaacaaggcaaggaccagcactttcctgtgttcatgaacgagaaggaggacatcctgtggtgtaccgagatggagagagtgttcgggttcccagtccactacacagatgtcagcaacatgtctagactggccagacagagactgctgggaagaagctggtccgtccctgtgatcagacacctgttcgcccctctgaaggagtacttcgcctgcgtgagcagcggcaacagcaacgccaacagccggggccccagcttctctagcggcctggtgccactgtccctgagagggagccacatgggccccatggagatctacaaaaccgtgagcgcctggaagcggcagcctgtgcgcgtgctgagcctgtttcggaatatcgataaagtcctgaaaagcctgggattcctggagagcggctctggctccggcggtggcaccctgaagtacgtggaggatgtgacaaacgtggtcagacgggatgtggagaagtggggccccttcgatctggtgtacggcagcacccaacccctgggcagctcttgtgaccggtgccctggctggtacatgtttcagttccaccggatcctgcagtacgccctgccgagacaggagtcccagcggccattcttttggattttcatggacaacttgctgctgaccgaggatgaccaggaaactaccactcggttcctgcagaccgaagccgtgaccctgcaggacgtgagaggccgggactaccagaacgccatgcgggtgtggtccaacatccctggactgaaaagcaagcacgcacctctgacccctaaagaagaggagtacctgcaggcccaggtgcggagcagaagcaagctggacgcccctaaggtggatctgctggtgaagaattgcctcctgcccctgagagagtacttcaagtatttcagccagaatagtctgcccctgggcggcccaagcagcggcgcccctcctcccagcggcggcagcccagccggctccccaacctctaccgaggagggcacctctgagtccgccacccccgagagcggccctggcacctccaccgagcccagcgagggcagcgcacccggcagccctgccggcagccccacctccacagaggagggaaccagcaccgagcccagcgaaggcagcgccccaggcaccagcaccgagcctagtgagggcggctctggcggcggcagcgcccaggagattaaacggatcaacaagatcagaagaagacttgtgaaagacagcaacaccaagaaggccggcaagacaggccccatgaaaaccctgctggttagagtgatgacacccgatctgagagagcggctggaaaacctgagaaagaagcctgaaaatatcccccagcccatcagcaatacatctagagccaacctgaataagctgctgaccgattacaccgaaatgaagaaggcgatcctgcatgtgtactgggaagagttccagaaggaccctgtgggcctgatgagccgggtggcccagcctgccagcaagaagatcgatcagaacaagctgaaacctgagatggacgagaagggcaacctgaccaccgccggctttgcctgctctcagtgtggccagcccctgttcgtgtacaagctggagcaggtgtctgagaagggcaaggcttacaccaactacttcggacggtgcaatgtggccgagcacgaaaagctgatcctgctggcccagctgaagcccgagaaggatagcgacgaagccgtgacatatagcctgggaaagtttgggcagagggccctggatttctacagcattcatgtgaccaaggagtccacccaccccgtgaagcccctggcccagatcgccggaaacagatacgcctccggacctgtgggaaaggccctgagcgacgcatgtatgggcacaatcgcctccttcctgtctaagtaccaggacatcatcatcgaacaccagaaggtggtgaagggcaaccagaagagactggagagcctgcgggagctggccggcaaggaaaacctggaataccctagcgtgaccctgccacctcagcctcacaccaaggagggcgttgatgcctacaacgaagtgatcgcccgggtgcgaatgtgggtgaacctgaacctgtggcagaagctgaagctaagcagagatgatgccaagcctctgctgagactgaagggattcccttcctttcctctggtcgagagacaggccaacgaagtggactggtgggacatggtgtgtaacgtgaagaagctgatcaacgagaaaaaggaggatggcaaggtgttttggcagaatctggctggctacaagagacaggaagccctgagaccatacctgagcagcgaggaagatcggaagaagggaaagaaattcgctcggtaccagctgggcgacctgctgctgcacctggaaaagaagcacggcgaggactggggaaaggtgtacgacgaggcctgggagcggattgacaagaaagtggaaggcctgagcaagcacatcaagctggaagaggaacggagaagcgaggacgcccagagcaaggccgccctgaccgactggctgcgggctaaggccagcttcgtgatcgagggcctgaaggaggccgacaaggacgagttctgcagatgcgagctgaagctgcagaagtggtacggggacctgcggggaaagcccttcgccatcgaagccgagaacagcatcctggacatcagcggcttcagcaagcagtacaactgtgccttcatctggcagaaggacggcgtgaagaagctgaacctgtacctgatcatcaactacttcaagggcggcaagctgcggttcaagaagatcaaacctgaagccttcgaagccaacagattctacaccgtgatcaacaaaaagagcggcgagatcgtgcccatggaggtgaacttcaacttcgacgaccccaacctgatcatcctgcctctggcctttggcaagagacagggcagagaattcatctggaacgacctgctgtccctggaaaccggcagcctgaagctggccaacggaagagtgatcgagaagacactgtacaacagaagaacccggcaggatgagcctgccctgttcgtggccctgaccttcgagcggcgggaggtcctggactcctccaatatcaaaccaatgaacctgatcggcgtggcaagaggcgaaaacatccccgccgtgatcgccctgaccgaccccgagggctgcccactgagccggtttaaggatagcctgggaaacccaacccacatcctgagaatcggcgagagctataaggagaagcagcggaccatccaggccaagaaggaggtggagcagcggagagccggcggctacagccggaagtacgccagcaaagccaagaatctggcagacgatatggtgagaaacaccgctagagatctgctgtactacgccgtgacccaggatgccatgctgatcttcgccaacctgagccggggcttcggccggcagggcaagcggaccttcatggccgagagacagtacacacggatggaggactggctgaccgccaagctggcctacgagggcctgagcaagacctacctgtccaagacactggcccagtacacctccaagacatgcagcaactgtgggtttaccatcaccagcgccgactacgacagggtgctggagaagctgaagaagacagcaacaggctggatgaccacaattaacggcaaggagctgaaggtggagggccagattacctactacaacagatacaagagacagaacgtagtcaaggacctgtccgtcgagctggatagactgagcgaagaatctgtgaacaacgacatctcctcctggacaaagggcagaagcggagaagctctgagcctcctgaagaaaagattctcccatagacccgtgcaggagaagttcgtgtgcctgaactgcggcttcgagacacacgcagccgagcaagccgccctgaacatcgccagatcctggctgttcctgcggagccaggagtacaagaaataccagacaaacaagacaaccggcaacaccgataagagagccttcgtcgagacctggcagtccttttaccggaagaagcttaaggaggtgtggaaacctgccgtgcggtctggcggatctggcggaggctccacaagcatggagctgctgaccttcaaggacgtggccatcgagttcagccccgaggagtggaagtgcctggacaccagccagcagaacctgtacagggacgtgatgctggagaactacaggaacctggtgagcctgggcgtgaccatcagcaaccccgacctggtgacctgcctggagcagaggaaggagccctacaacctgaagatccacgagaccgccgccaggccccccggccactacaggaagaggaccagccccaagaaaaagagaaaagtctaagctgccttctgcggggcttgccttctggccatgcccttcttctctcccttgcacctgtacctcttggtctttgaataaagcctgagtaggaaggctagcaaaaaaaaaaaaaaaaaaaaaaaaaaaaaaaaaaaaaaaaaaaaaaaaaaaaaaaaaaaaaaaaaaaaaaaaaaaaaaaa

SEQ ID NO: 7217 - RNA, 5797 nt, synthetic construct
  source 1..5797: mol_type = other RNA
aggaaataagagagaaaagaagagtaagaagaaatataagagccaccatggcccctaagaagaagcgtaaagtgagccggatggaacgcctcgtctacgaggtgcggcagaagtgcagaaacatcgaggacatctgcatctcctgcggatctctgaacgtgaccctggagcacccactgttcatcggcggcatgtgccagaactgtaaaaactgttttctggagtgtgcctatcaatacgacgatgacggctaccagagctactgcaccatctgttgcggcggaagagaggtgctgatgtgtggaaataacaactgctgccggtgcttctgcgtggaatgcgtggacctgctggtgggccccggcgccgcccaggccgctattaaggaagatccttggaactgctacatgtgcggccacaagggcacatacggcctgctgagacggagagaggactggcctagcagactgcagatgttcttcgccaataaccacgaccaggagttcgacccccctaaggtgtaccctcccgtccccgccgagaagagaaagcccatccgggtcctgagcctgttcgatggcatcgccaccggtctgctggtgctgaaggacctgggcatccaggtggataggtacattgcctccgaggtgtgcgaggactccatcaccgtgggaatggtgcgtcatcagggcaagatcatgtacgtgggcgacgtgcggagcgtgacacagaagcatatccaggagtggggccctttcgacctggtgatcggcggcagcccttgcaatgacctgagcatcgtgaacccagcccggaagggcctgtacgagggaaccggcagactgttcttcgagttttacagactgctgcacgacgcccggcctaaggaaggcgacgaccggcccttcttttggctgttcgagaatgtggtggccatgggagtcagcgacaagcgggatattagccggttcctggagagcaaccccgtgatgatcgatgccaaggaagtgagcgccgcccaccgggccagatacttctggggcaatctgcctggcatgaacagacccctggccagcaccgtgaacgacaagctggagctgcaggagtgcctggagcacggccggatcgccaagttcagcaaggtgagaaccatcaccacccgaagcaacagcatcaaacaaggcaaggaccagcactttcctgtgttcatgaacgagaaggaggacatcctgtggtgtaccgagatggagagagtgttcgggttcccagtccactacacagatgtcagcaacatgtctagactggccagacagagactgctgggaagaagctggtccgtccctgtgatcagacacctgttcgcccctctgaaggagtacttcgcctgcgtgagcagcggcaacagcaacgccaacagccggggccccagcttctctagcggcctggtgccactgtccctgagagggagccacatgggccccatggagatctacaaaaccgtgagcgcctggaagcggcagcctgtgcgcgtgctgagcctgtttcggaatatcgataaagtcctgaaaagcctgggattcctggagagcggctctggctccggcggtggcaccctgaagtacgtggaggatgtgacaaacgtggtcagacgggatgtggagaagtggggccccttcgatctggtgtacggcagcacccaacccctgggcagctcttgtgaccggtgccctggctggtacatgtttcagttccaccggatcctgcagtacgccctgccgagacaggagtcccagcggccattcttttggattttcatggacaacttgctgctgaccgaggatgaccaggaaactaccactcggttcctgcagaccgaagccgtgaccctgcaggacgtgagaggccgggactaccagaacgccatgcgggtgtggtccaacatccctggactgaaaagcaagcacgcacctctgacccctaaagaagaggagtacctgcaggcccaggtgcggagcagaagcaagctggacgcccctaaggtggatctgctggtgaagaattgcctcctgcccctgagagagtacttcaagtatttcagccagaatagtctgcccctgggcggcccaagcagcggcgcccctcctcccagcggcggcagcccagccggctccccaacctctaccgaggagggcacctctgagtccgccacccccgagagcggccctggcacctccaccgagcccagcgagggcagcgcacccggcagccctgccggcagccccacctccacagaggagggaaccagcaccgagcccagcgaaggcagcgccccaggcaccagcaccgagcctagtgagggcggctctggcggcggcagcgcccaggagattaaacggatcaacaagatcagaagaagacttgtgaaagacagcaacaccaagaaggccggcaagacaggccccatgaaaaccctgctggttagagtgatgacacccgatctgagagagcggctggaaaacctgagaaagaagcctgaaaatatcccccagcccatcagcaatacatctagagccaacctgaataagctgctgaccgattacaccgaaatgaagaaggcgatcctgcatgtgtactgggaagagttccagaaggaccctgtgggcctgatgagccgggtggcccagcctgccagcaagaagatcgatcagaacaagctgaaacctgagatggacgagaagggcaacctgaccaccgccggctttgcctgctctcagtgtggccagcccctgttcgtgtacaagctggagcaggtgtctgagaagggcaaggcttacaccaactacttcggacggtgcaatgtggccgagcacgaaaagctgatcctgctggcccagctgaagcccgagaaggatagcgacgaagccgtgacatatagcctgggaaagtttgggcagagggccctggatttctacagcattcatgtgaccaaggagtccacccaccccgtgaagcccctggcccagatcgccggaaacagatacgcctccggacctgtgggaaaggccctgagcgacgcatgtatgggcacaatcgcctccttcctgtctaagtaccaggacatcatcatcgaacaccagaaggtggtgaagggcaaccagaagagactggagagcctgcgggagctggccggcaaggaaaacctggaataccctagcgtgaccctgccacctcagcctcacaccaaggagggcgttgatgcctacaacgaagtgatcgcccgggtgcgaatgtgggtgaacctgaacctgtggcagaagctgaagctaagcagagatgatgccaagcctctgctgagactgaagggattcccttcctttcctctggtcgagagacaggccaacgaagtggactggtgggacatggtgtgtaacgtgaagaagctgatcaacgagaaaaaggaggatggcaaggtgttttggcagaatctggctggctacaagagacaggaagccctgagaccatacctgagcagcgaggaagatcggaagaagggaaagaaattcgctcggtaccagctgggcgacctgctgctgcacctggaaaagaagcacggcgaggactggggaaaggtgtacgacgaggcctgggagcggattgacaagaaagtggaaggcctgagcaagcacatcaagctggaagaggaacggagaagcgaggacgcccagagcaaggccgccctgaccgactggctgcgggctaaggccagcttcgtgatcgagggcctgaaggaggccgacaaggacgagttctgcagatgcgagctgaagctgcagaagtggtacggggacctgcggggaaagcccttcgccatcgaagccgagaacagcatcctggacatcagcggcttcagcaagcagtacaactgtgccttcatctggcagaaggacggcgtgaagaagctgaacctgtacctgatcatcaactacttcaagggcggcaagctgcggttcaagaagatcaaacctgaagccttcgaagccaacagattctacaccgtgatcaacaaaaagagcggcgagatcgtgcccatggaggtgaacttcaacttcgacgaccccaacctgatcatcctgcctctggcctttggcaagagacagggcagagaattcatctggaacgacctgctgtccctggaaaccggcagcctgaagctggccaacggaagagtgatcgagaagacactgtacaacagaagaacccggcaggatgagcctgccctgttcgtggccctgaccttcgagcggcgggaggtcctggactcctccaatatcaaaccaatgaacctgatcggcgtggcaagaggcgaaaacatccccgccgtgatcgccctgaccgaccccgagggctgcccactgagccggtttaaggatagcctgggaaacccaacccacatcctgagaatcggcgagagctataaggagaagcagcggaccatccaggccaagaaggaggtggagcagcggagagccggcggctacagccggaagtacgccagcaaagccaagaatctggcagacgatatggtgagaaacaccgctagagatctgctgtactacgccgtgacccaggatgccatgctgatcttcgccaacctgagccggggcttcggccggcagggcaagcggaccttcatggccgagagacagtacacacggatggaggactggctgaccgccaagctggcctacgagggcctgagcaagacctacctgtccaagacactggcccagtacacctccaagacatgcagcaactgtgggtttaccatcaccagcgccgactacgacagggtgctggagaagctgaagaagacagcaacaggctggatgaccacaattaacggcaaggagctgaaggtggagggccagattacctactacaacagatacaagagacagaacgtagtcaaggacctgtccgtcgagctggatagactgagcgaagaatctgtgaacaacgacatctcctcctggacaaagggcagaagcggagaagctctgagcctcctgaagaaaagattctcccatagacccgtgcaggagaagttcgtgtgcctgaactgcggcttcgagacacacgcagccgagcaagccgccctgaacatcgccagatcctggctgttcctgcggagccaggagtacaagaaataccagacaaacaagacaaccggcaacaccgataagagagccttcgtcgagacctggcagtccttttaccggaagaagcttaaggaggtgtggaaacctgccgtgcggtctggcggatctggcggaggctccacaagcagccagggcagcgtgaccttcagggacgtggccatcgacttcagccaggaggagtggaagtggctgcagcccgcccagagggacctgtacaggtgcgtgatgctggagaactacggccacctggtgagcctgggcctgagcatcagcaagcccgacgtggtgagcctgctggagcagggcaaggagccctggctgggcaagaggaacgtgaacagggacctgttcagcgtgagcgagagcagcaccagccccaagaaaaagagaaaagtctaagctgccttctgcggggcttgccttctggccatgcccttcttctctcccttgcacctgtacctcttggtctttgaataaagcctgagtaggaaggctagcaaaaaaaaaaaaaaaaaaaaaaaaaaaaaaaaaaaaaaaaaaaaaaaaaaaaaaaaaaaaaaaaaaaaaaaaaaaaaaaa

SEQ ID NO: 7218 - RNA, 5797 nt, synthetic construct
  source 1..5797: mol_type = other RNA
aggaaataagagagaaaagaagagtaagaagaaatataagagccaccatggcccctaagaagaagcgtaaagtgagccggatggaacgcctcgtctacgaggtgcggcagaagtgcagaaacatcgaggacatctgcatctcctgcggatctctgaacgtgaccctggagcacccactgttcatcggcggcatgtgccagaactgtaaaaactgttttctggagtgtgcctatcaatacgacgatgacggctaccagagctactgcaccatctgttgcggcggaagagaggtgctgatgtgtggaaataacaactgctgccggtgcttctgcgtggaatgcgtggacctgctggtgggccccggcgccgcccaggccgctattaaggaagatccttggaactgctacatgtgcggccacaagggcacatacggcctgctgagacggagagaggactggcctagcagactgcagatgttcttcgccaataaccacgaccaggagttcgacccccctaaggtgtaccctcccgtccccgccgagaagagaaagcccatccgggtcctgagcctgttcgatggcatcgccaccggtctgctggtgctgaaggacctgggcatccaggtggataggtacattgcctccgaggtgtgcgaggactccatcaccgtgggaatggtgcgtcatcagggcaagatcatgtacgtgggcgacgtgcggagcgtgacacagaagcatatccaggagtggggccctttcgacctggtgatcggcggcagcccttgcaatgacctgagcatcgtgaacccagcccggaagggcctgtacgagggaaccggcagactgttcttcgagttttacagactgctgcacgacgcccggcctaaggaaggcgacgaccggcccttcttttggctgttcgagaatgtggtggccatgggagtcagcgacaagcgggatattagccggttcctggagagcaaccccgtgatgatcgatgccaaggaagtgagcgccgcccaccgggccagatacttctggggcaatctgcctggcatgaacagacccctggccagcaccgtgaacgacaagctggagctgcaggagtgcctggagcacggccggatcgccaagttcagcaaggtgagaaccatcaccacccgaagcaacagcatcaaacaaggcaaggaccagcactttcctgtgttcatgaacgagaaggaggacatcctgtggtgtaccgagatggagagagtgttcgggttcccagtccactacacagatgtcagcaacatgtctagactggccagacagagactgctgggaagaagctggtccgtccctgtgatcagacacctgttcgcccctctgaaggagtacttcgcctgcgtgagcagcggcaacagcaacgccaacagccggggccccagcttctctagcggcctggtgccactgtccctgagagggagccacatgggccccatggagatctacaaaaccgtgagcgcctggaagcggcagcctgtgcgcgtgctgagcctgtttcggaatatcgataaagtcctgaaaagcctgggattcctggagagcggctctggctccggcggtggcaccctgaagtacgtggaggatgtgacaaacgtggtcagacgggatgtggagaagtggggccccttcgatctggtgtacggcagcacccaacccctgggcagctcttgtgaccggtgccctggctggtacatgtttcagttccaccggatcctgcagtacgccctgccgagacaggagtcccagcggccattcttttggattttcatggacaacttgctgctgaccgaggatgaccaggaaactaccactcggttcctgcagaccgaagccgtgaccctgcaggacgtgagaggccgggactaccagaacgccatgcgggtgtggtccaacatccctggactgaaaagcaagcacgcacctctgacccctaaagaagaggagtacctgcaggcccaggtgcggagcagaagcaagctggacgcccctaaggtggatctgctggtgaagaattgcctcctgcccctgagagagtacttcaagtatttcagccagaatagtctgcccctgggcggcccaagcagcggcgcccctcctcccagcggcggcagcccagccggctccccaacctctaccgaggagggcacctctgagtccgccacccccgagagcggccctggcacctccaccgagcccagcgagggcagcgcacccggcagccctgccggcagccccacctccacagaggagggaaccagcaccgagcccagcgaaggcagcgccccaggcaccagcaccgagcctagtgagggcggctctggcggcggcagcgcccaggagattaaacggatcaacaagatcagaagaagacttgtgaaagacagcaacaccaagaaggccggcaagacaggccccatgaaaaccctgctggttagagtgatgacacccgatctgagagagcggctggaaaacctgagaaagaagcctgaaaatatcccccagcccatcagcaatacatctagagccaacctgaataagctgctgaccgattacaccgaaatgaagaaggcgatcctgcatgtgtactgggaagagttccagaaggaccctgtgggcctgatgagccgggtggcccagcctgccagcaagaagatcgatcagaacaagctgaaacctgagatggacgagaagggcaacctgaccaccgccggctttgcctgctctcagtgtggccagcccctgttcgtgtacaagctggagcaggtgtctgagaagggcaaggcttacaccaactacttcggacggtgcaatgtggccgagcacgaaaagctgatcctgctggcccagctgaagcccgagaaggatagcgacgaagccgtgacatatagcctgggaaagtttgggcagagggccctggatttctacagcattcatgtgaccaaggagtccacccaccccgtgaagcccctggcccagatcgccggaaacagatacgcctccggacctgtgggaaaggccctgagcgacgcatgtatgggcacaatcgcctccttcctgtctaagtaccaggacatcatcatcgaacaccagaaggtggtgaagggcaaccagaagagactggagagcctgcgggagctggccggcaaggaaaacctggaataccctagcgtgaccctgccacctcagcctcacaccaaggagggcgttgatgcctacaacgaagtgatcgcccgggtgcgaatgtgggtgaacctgaacctgtggcagaagctgaagctaagcagagatgatgccaagcctctgctgagactgaagggattcccttcctttcctctggtcgagagacaggccaacgaagtggactggtgggacatggtgtgtaacgtgaagaagctgatcaacgagaaaaaggaggatggcaaggtgttttggcagaatctggctggctacaagagacaggaagccctgagaccatacctgagcagcgaggaagatcggaagaagggaaagaaattcgctcggtaccagctgggcgacctgctgctgcacctggaaaagaagcacggcgaggactggggaaaggtgtacgacgaggcctgggagcggattgacaagaaagtggaaggcctgagcaagcacatcaagctggaagaggaacggagaagcgaggacgcccagagcaaggccgccctgaccgactggctgcgggctaaggccagcttcgtgatcgagggcctgaaggaggccgacaaggacgagttctgcagatgcgagctgaagctgcagaagtggtacggggacctgcggggaaagcccttcgccatcgaagccgagaacagcatcctggacatcagcggcttcagcaagcagtacaactgtgccttcatctggcagaaggacggcgtgaagaagctgaacctgtacctgatcatcaactacttcaagggcggcaagctgcggttcaagaagatcaaacctgaagccttcgaagccaacagattctacaccgtgatcaacaaaaagagcggcgagatcgtgcccatggaggtgaacttcaacttcgacgaccccaacctgatcatcctgcctctggcctttggcaagagacagggcagagaattcatctggaacgacctgctgtccctggaaaccggcagcctgaagctggccaacggaagagtgatcgagaagacactgtacaacagaagaacccggcaggatgagcctgccctgttcgtggccctgaccttcgagcggcgggaggtcctggactcctccaatatcaaaccaatgaacctgatcggcgtggcaagaggcgaaaacatccccgccgtgatcgccctgaccgaccccgagggctgcccactgagccggtttaaggatagcctgggaaacccaacccacatcctgagaatcggcgagagctataaggagaagcagcggaccatccaggccaagaaggaggtggagcagcggagagccggcggctacagccggaagtacgccagcaaagccaagaatctggcagacgatatggtgagaaacaccgctagagatctgctgtactacgccgtgacccaggatgccatgctgatcttcgccaacctgagccggggcttcggccggcagggcaagcggaccttcatggccgagagacagtacacacggatggaggactggctgaccgccaagctggcctacgagggcctgagcaagacctacctgtccaagacactggcccagtacacctccaagacatgcagcaactgtgggtttaccatcaccagcgccgactacgacagggtgctggagaagctgaagaagacagcaacaggctggatgaccacaattaacggcaaggagctgaaggtggagggccagattacctactacaacagatacaagagacagaacgtagtcaaggacctgtccgtcgagctggatagactgagcgaagaatctgtgaacaacgacatctcctcctggacaaagggcagaagcggagaagctctgagcctcctgaagaaaagattctcccatagacccgtgcaggagaagttcgtgtgcctgaactgcggcttcgagacacacgcagccgagcaagccgccctgaacatcgccagatcctggctgttcctgcggagccaggagtacaagaaataccagacaaacaagacaaccggcaacaccgataagagagccttcgtcgagacctggcagtccttttaccggaagaagcttaaggaggtgtggaaacctgccgtgcggtctggcggatctggcggaggctccacaagcatgaacatggagggcctggtgatgttccaggacctgttcatccacttcagccaggaggagtgggagtgcctggacgccgcccagaaggacctgtacagggacgtgatgatggagaactacagcagcctggtgagcctgggcctgtgcatccccaagcccgacgtgatcagcctgctggagcagggcaaggagccctggatggtgagcagggacgtgctgggcggctggtgccccgacagcgagaccagccccaagaaaaagagaaaagtctaagctgccttctgcggggcttgccttctggccatgcccttcttctctcccttgcacctgtacctcttggtctttgaataaagcctgagtaggaaggctagcaaaaaaaaaaaaaaaaaaaaaaaaaaaaaaaaaaaaaaaaaaaaaaaaaaaaaaaaaaaaaaaaaaaaaaaaaaaaaaaa

SEQ ID NO: 7219 - RNA, 5797 nt, synthetic construct
  source 1..5797: mol_type = other RNA
aggaaataagagagaaaagaagagtaagaagaaatataagagccaccatggcccctaagaagaagcgtaaagtgagccggatggaacgcctcgtctacgaggtgcggcagaagtgcagaaacatcgaggacatctgcatctcctgcggatctctgaacgtgaccctggagcacccactgttcatcggcggcatgtgccagaactgtaaaaactgttttctggagtgtgcctatcaatacgacgatgacggctaccagagctactgcaccatctgttgcggcggaagagaggtgctgatgtgtggaaataacaactgctgccggtgcttctgcgtggaatgcgtggacctgctggtgggccccggcgccgcccaggccgctattaaggaagatccttggaactgctacatgtgcggccacaagggcacatacggcctgctgagacggagagaggactggcctagcagactgcagatgttcttcgccaataaccacgaccaggagttcgacccccctaaggtgtaccctcccgtccccgccgagaagagaaagcccatccgggtcctgagcctgttcgatggcatcgccaccggtctgctggtgctgaaggacctgggcatccaggtggataggtacattgcctccgaggtgtgcgaggactccatcaccgtgggaatggtgcgtcatcagggcaagatcatgtacgtgggcgacgtgcggagcgtgacacagaagcatatccaggagtggggccctttcgacctggtgatcggcggcagcccttgcaatgacctgagcatcgtgaacccagcccggaagggcctgtacgagggaaccggcagactgttcttcgagttttacagactgctgcacgacgcccggcctaaggaaggcgacgaccggcccttcttttggctgttcgagaatgtggtggccatgggagtcagcgacaagcgggatattagccggttcctggagagcaaccccgtgatgatcgatgccaaggaagtgagcgccgcccaccgggccagatacttctggggcaatctgcctggcatgaacagacccctggccagcaccgtgaacgacaagctggagctgcaggagtgcctggagcacggccggatcgccaagttcagcaaggtgagaaccatcaccacccgaagcaacagcatcaaacaaggcaaggaccagcactttcctgtgttcatgaacgagaaggaggacatcctgtggtgtaccgagatggagagagtgttcgggttcccagtccactacacagatgtcagcaacatgtctagactggccagacagagactgctgggaagaagctggtccgtccctgtgatcagacacctgttcgcccctctgaaggagtacttcgcctgcgtgagcagcggcaacagcaacgccaacagccggggccccagcttctctagcggcctggtgccactgtccctgagagggagccacatgggccccatggagatctacaaaaccgtgagcgcctggaagcggcagcctgtgcgcgtgctgagcctgtttcggaatatcgataaagtcctgaaaagcctgggattcctggagagcggctctggctccggcggtggcaccctgaagtacgtggaggatgtgacaaacgtggtcagacgggatgtggagaagtggggccccttcgatctggtgtacggcagcacccaacccctgggcagctcttgtgaccggtgccctggctggtacatgtttcagttccaccggatcctgcagtacgccctgccgagacaggagtcccagcggccattcttttggattttcatggacaacttgctgctgaccgaggatgaccaggaaactaccactcggttcctgcagaccgaagccgtgaccctgcaggacgtgagaggccgggactaccagaacgccatgcgggtgtggtccaacatccctggactgaaaagcaagcacgcacctctgacccctaaagaagaggagtacctgcaggcccaggtgcggagcagaagcaagctggacgcccctaaggtggatctgctggtgaagaattgcctcctgcccctgagagagtacttcaagtatttcagccagaatagtctgcccctgggcggcccaagcagcggcgcccctcctcccagcggcggcagcccagccggctccccaacctctaccgaggagggcacctctgagtccgccacccccgagagcggccctggcacctccaccgagcccagcgagggcagcgcacccggcagccctgccggcagccccacctccacagaggagggaaccagcaccgagcccagcgaaggcagcgccccaggcaccagcaccgagcctagtgagggcggctctggcggcggcagcgcccaggagattaaacggatcaacaagatcagaagaagacttgtgaaagacagcaacaccaagaaggccggcaagacaggccccatgaaaaccctgctggttagagtgatgacacccgatctgagagagcggctggaaaacctgagaaagaagcctgaaaatatcccccagcccatcagcaatacatctagagccaacctgaataagctgctgaccgattacaccgaaatgaagaaggcgatcctgcatgtgtactgggaagagttccagaaggaccctgtgggcctgatgagccgggtggcccagcctgccagcaagaagatcgatcagaacaagctgaaacctgagatggacgagaagggcaacctgaccaccgccggctttgcctgctctcagtgtggccagcccctgttcgtgtacaagctggagcaggtgtctgagaagggcaaggcttacaccaactacttcggacggtgcaatgtggccgagcacgaaaagctgatcctgctggcccagctgaagcccgagaaggatagcgacgaagccgtgacatatagcctgggaaagtttgggcagagggccctggatttctacagcattcatgtgaccaaggagtccacccaccccgtgaagcccctggcccagatcgccggaaacagatacgcctccggacctgtgggaaaggccctgagcgacgcatgtatgggcacaatcgcctccttcctgtctaagtaccaggacatcatcatcgaacaccagaaggtggtgaagggcaaccagaagagactggagagcctgcgggagctggccggcaaggaaaacctggaataccctagcgtgaccctgccacctcagcctcacaccaaggagggcgttgatgcctacaacgaagtgatcgcccgggtgcgaatgtgggtgaacctgaacctgtggcagaagctgaagctaagcagagatgatgccaagcctctgctgagactgaagggattcccttcctttcctctggtcgagagacaggccaacgaagtggactggtgggacatggtgtgtaacgtgaagaagctgatcaacgagaaaaaggaggatggcaaggtgttttggcagaatctggctggctacaagagacaggaagccctgagaccatacctgagcagcgaggaagatcggaagaagggaaagaaattcgctcggtaccagctgggcgacctgctgctgcacctggaaaagaagcacggcgaggactggggaaaggtgtacgacgaggcctgggagcggattgacaagaaagtggaaggcctgagcaagcacatcaagctggaagaggaacggagaagcgaggacgcccagagcaaggccgccctgaccgactggctgcgggctaaggccagcttcgtgatcgagggcctgaaggaggccgacaaggacgagttctgcagatgcgagctgaagctgcagaagtggtacggggacctgcggggaaagcccttcgccatcgaagccgagaacagcatcctggacatcagcggcttcagcaagcagtacaactgtgccttcatctggcagaaggacggcgtgaagaagctgaacctgtacctgatcatcaactacttcaagggcggcaagctgcggttcaagaagatcaaacctgaagccttcgaagccaacagattctacaccgtgatcaacaaaaagagcggcgagatcgtgcccatggaggtgaacttcaacttcgacgaccccaacctgatcatcctgcctctggcctttggcaagagacagggcagagaattcatctggaacgacctgctgtccctggaaaccggcagcctgaagctggccaacggaagagtgatcgagaagacactgtacaacagaagaacccggcaggatgagcctgccctgttcgtggccctgaccttcgagcggcgggaggtcctggactcctccaatatcaaaccaatgaacctgatcggcgtggcaagaggcgaaaacatccccgccgtgatcgccctgaccgaccccgagggctgcccactgagccggtttaaggatagcctgggaaacccaacccacatcctgagaatcggcgagagctataaggagaagcagcggaccatccaggccaagaaggaggtggagcagcggagagccggcggctacagccggaagtacgccagcaaagccaagaatctggcagacgatatggtgagaaacaccgctagagatctgctgtactacgccgtgacccaggatgccatgctgatcttcgccaacctgagccggggcttcggccggcagggcaagcggaccttcatggccgagagacagtacacacggatggaggactggctgaccgccaagctggcctacgagggcctgagcaagacctacctgtccaagacactggcccagtacacctccaagacatgcagcaactgtgggtttaccatcaccagcgccgactacgacagggtgctggagaagctgaagaagacagcaacaggctggatgaccacaattaacggcaaggagctgaaggtggagggccagattacctactacaacagatacaagagacagaacgtagtcaaggacctgtccgtcgagctggatagactgagcgaagaatctgtgaacaacgacatctcctcctggacaaagggcagaagcggagaagctctgagcctcctgaagaaaagattctcccatagacccgtgcaggagaagttcgtgtgcctgaactgcggcttcgagacacacgcagccgagcaagccgccctgaacatcgccagatcctggctgttcctgcggagccaggagtacaagaaataccagacaaacaagacaaccggcaacaccgataagagagccttcgtcgagacctggcagtccttttaccggaagaagcttaaggaggtgtggaaacctgccgtgcggtctggcggatctggcggaggctccacaagccagcagatgcaggtgaccttcgaggacgtggccgtgagcttcagccaggaggagtgggagtacctggacgagggccagaaggagctgtacagggaggtgatgaaggagaactacgagaccgtggtgagcctgggcagccccgccagcacccccaagatcatcagctgcatcgagtgcggcgaggaggcctacatcaggggcgagcccggcagcgagggcagggagaccggcaagagcagctgcaccagccccaagaaaaagagaaaagtctaagctgccttctgcggggcttgccttctggccatgcccttcttctctcccttgcacctgtacctcttggtctttgaataaagcctgagtaggaaggctagcaaaaaaaaaaaaaaaaaaaaaaaaaaaaaaaaaaaaaaaaaaaaaaaaaaaaaaaaaaaaaaaaaaaaaaaaaaaaaaaa

SEQ ID NO: 7220 - RNA, 5797 nt, synthetic construct
  source 1..5797: mol_type = other RNA
aggaaataagagagaaaagaagagtaagaagaaatataagagccaccatggcccctaagaagaagcgtaaagtgagccggatggaacgcctcgtctacgaggtgcggcagaagtgcagaaacatcgaggacatctgcatctcctgcggatctctgaacgtgaccctggagcacccactgttcatcggcggcatgtgccagaactgtaaaaactgttttctggagtgtgcctatcaatacgacgatgacggctaccagagctactgcaccatctgttgcggcggaagagaggtgctgatgtgtggaaataacaactgctgccggtgcttctgcgtggaatgcgtggacctgctggtgggccccggcgccgcccaggccgctattaaggaagatccttggaactgctacatgtgcggccacaagggcacatacggcctgctgagacggagagaggactggcctagcagactgcagatgttcttcgccaataaccacgaccaggagttcgacccccctaaggtgtaccctcccgtccccgccgagaagagaaagcccatccgggtcctgagcctgttcgatggcatcgccaccggtctgctggtgctgaaggacctgggcatccaggtggataggtacattgcctccgaggtgtgcgaggactccatcaccgtgggaatggtgcgtcatcagggcaagatcatgtacgtgggcgacgtgcggagcgtgacacagaagcatatccaggagtggggccctttcgacctggtgatcggcggcagcccttgcaatgacctgagcatcgtgaacccagcccggaagggcctgtacgagggaaccggcagactgttcttcgagttttacagactgctgcacgacgcccggcctaaggaaggcgacgaccggcccttcttttggctgttcgagaatgtggtggccatgggagtcagcgacaagcgggatattagccggttcctggagagcaaccccgtgatgatcgatgccaaggaagtgagcgccgcccaccgggccagatacttctggggcaatctgcctggcatgaacagacccctggccagcaccgtgaacgacaagctggagctgcaggagtgcctggagcacggccggatcgccaagttcagcaaggtgagaaccatcaccacccgaagcaacagcatcaaacaaggcaaggaccagcactttcctgtgttcatgaacgagaaggaggacatcctgtggtgtaccgagatggagagagtgttcgggttcccagtccactacacagatgtcagcaacatgtctagactggccagacagagactgctgggaagaagctggtccgtccctgtgatcagacacctgttcgcccctctgaaggagtacttcgcctgcgtgagcagcggcaacagcaacgccaacagccggggccccagcttctctagcggcctggtgccactgtccctgagagggagccacatgggccccatggagatctacaaaaccgtgagcgcctggaagcggcagcctgtgcgcgtgctgagcctgtttcggaatatcgataaagtcctgaaaagcctgggattcctggagagcggctctggctccggcggtggcaccctgaagtacgtggaggatgtgacaaacgtggtcagacgggatgtggagaagtggggccccttcgatctggtgtacggcagcacccaacccctgggcagctcttgtgaccggtgccctggctggtacatgtttcagttccaccggatcctgcagtacgccctgccgagacaggagtcccagcggccattcttttggattttcatggacaacttgctgctgaccgaggatgaccaggaaactaccactcggttcctgcagaccgaagccgtgaccctgcaggacgtgagaggccgggactaccagaacgccatgcgggtgtggtccaacatccctggactgaaaagcaagcacgcacctctgacccctaaagaagaggagtacctgcaggcccaggtgcggagcagaagcaagctggacgcccctaaggtggatctgctggtgaagaattgcctcctgcccctgagagagtacttcaagtatttcagccagaatagtctgcccctgggcggcccaagcagcggcgcccctcctcccagcggcggcagcccagccggctccccaacctctaccgaggagggcacctctgagtccgccacccccgagagcggccctggcacctccaccgagcccagcgagggcagcgcacccggcagccctgccggcagccccacctccacagaggagggaaccagcaccgagcccagcgaaggcagcgccccaggcaccagcaccgagcctagtgagggcggctctggcggcggcagcgcccaggagattaaacggatcaacaagatcagaagaagacttgtgaaagacagcaacaccaagaaggccggcaagacaggccccatgaaaaccctgctggttagagtgatgacacccgatctgagagagcggctggaaaacctgagaaagaagcctgaaaatatcccccagcccatcagcaatacatctagagccaacctgaataagctgctgaccgattacaccgaaatgaagaaggcgatcctgcatgtgtactgggaagagttccagaaggaccctgtgggcctgatgagccgggtggcccagcctgccagcaagaagatcgatcagaacaagctgaaacctgagatggacgagaagggcaacctgaccaccgccggctttgcctgctctcagtgtggccagcccctgttcgtgtacaagctggagcaggtgtctgagaagggcaaggcttacaccaactacttcggacggtgcaatgtggccgagcacgaaaagctgatcctgctggcccagctgaagcccgagaaggatagcgacgaagccgtgacatatagcctgggaaagtttgggcagagggccctggatttctacagcattcatgtgaccaaggagtccacccaccccgtgaagcccctggcccagatcgccggaaacagatacgcctccggacctgtgggaaaggccctgagcgacgcatgtatgggcacaatcgcctccttcctgtctaagtaccaggacatcatcatcgaacaccagaaggtggtgaagggcaaccagaagagactggagagcctgcgggagctggccggcaaggaaaacctggaataccctagcgtgaccctgccacctcagcctcacaccaaggagggcgttgatgcctacaacgaagtgatcgcccgggtgcgaatgtgggtgaacctgaacctgtggcagaagctgaagctaagcagagatgatgccaagcctctgctgagactgaagggattcccttcctttcctctggtcgagagacaggccaacgaagtggactggtgggacatggtgtgtaacgtgaagaagctgatcaacgagaaaaaggaggatggcaaggtgttttggcagaatctggctggctacaagagacaggaagccctgagaccatacctgagcagcgaggaagatcggaagaagggaaagaaattcgctcggtaccagctgggcgacctgctgctgcacctggaaaagaagcacggcgaggactggggaaaggtgtacgacgaggcctgggagcggattgacaagaaagtggaaggcctgagcaagcacatcaagctggaagaggaacggagaagcgaggacgcccagagcaaggccgccctgaccgactggctgcgggctaaggccagcttcgtgatcgagggcctgaaggaggccgacaaggacgagttctgcagatgcgagctgaagctgcagaagtggtacggggacctgcggggaaagcccttcgccatcgaagccgagaacagcatcctggacatcagcggcttcagcaagcagtacaactgtgccttcatctggcagaaggacggcgtgaagaagctgaacctgtacctgatcatcaactacttcaagggcggcaagctgcggttcaagaagatcaaacctgaagccttcgaagccaacagattctacaccgtgatcaacaaaaagagcggcgagatcgtgcccatggaggtgaacttcaacttcgacgaccccaacctgatcatcctgcctctggcctttggcaagagacagggcagagaattcatctggaacgacctgctgtccctggaaaccggcagcctgaagctggccaacggaagagtgatcgagaagacactgtacaacagaagaacccggcaggatgagcctgccctgttcgtggccctgaccttcgagcggcgggaggtcctggactcctccaatatcaaaccaatgaacctgatcggcgtggcaagaggcgaaaacatccccgccgtgatcgccctgaccgaccccgagggctgcccactgagccggtttaaggatagcctgggaaacccaacccacatcctgagaatcggcgagagctataaggagaagcagcggaccatccaggccaagaaggaggtggagcagcggagagccggcggctacagccggaagtacgccagcaaagccaagaatctggcagacgatatggtgagaaacaccgctagagatctgctgtactacgccgtgacccaggatgccatgctgatcttcgccaacctgagccggggcttcggccggcagggcaagcggaccttcatggccgagagacagtacacacggatggaggactggctgaccgccaagctggcctacgagggcctgagcaagacctacctgtccaagacactggcccagtacacctccaagacatgcagcaactgtgggtttaccatcaccagcgccgactacgacagggtgctggagaagctgaagaagacagcaacaggctggatgaccacaattaacggcaaggagctgaaggtggagggccagattacctactacaacagatacaagagacagaacgtagtcaaggacctgtccgtcgagctggatagactgagcgaagaatctgtgaacaacgacatctcctcctggacaaagggcagaagcggagaagctctgagcctcctgaagaaaagattctcccatagacccgtgcaggagaagttcgtgtgcctgaactgcggcttcgagacacacgcagccgagcaagccgccctgaacatcgccagatcctggctgttcctgcggagccaggagtacaagaaataccagacaaacaagacaaccggcaacaccgataagagagccttcgtcgagacctggcagtccttttaccggaagaagcttaaggaggtgtggaaacctgccgtgcggtctggcggatctggcggaggctccacaagcagccagggccccgtgctgttcgaggacgtgagcgtggacttcacccagaaggagtggcagctgctggaccccgcccagaggaggctgtacagggacgtgatgctggagaactacaggcacctggagagcctgggccactgcgtgaccaagcccgagctgatcaggaggctggagcagggcgaggagccctggatcctgaagagggaggtgcccagccacagccacgccgaggtgcagagggccaccagccccaagaaaaagagaaaagtctaagctgccttctgcggggcttgccttctggccatgcccttcttctctcccttgcacctgtacctcttggtctttgaataaagcctgagtaggaaggctagcaaaaaaaaaaaaaaaaaaaaaaaaaaaaaaaaaaaaaaaaaaaaaaaaaaaaaaaaaaaaaaaaaaaaaaaaaaaaaaaa

SEQ ID NO: 7221 - RNA, 5797 nt, synthetic construct
  source 1..5797: mol_type = other RNA
aggaaataagagagaaaagaagagtaagaagaaatataagagccaccatggcccctaagaagaagcgtaaagtgagccggatggaacgcctcgtctacgaggtgcggcagaagtgcagaaacatcgaggacatctgcatctcctgcggatctctgaacgtgaccctggagcacccactgttcatcggcggcatgtgccagaactgtaaaaactgttttctggagtgtgcctatcaatacgacgatgacggctaccagagctactgcaccatctgttgcggcggaagagaggtgctgatgtgtggaaataacaactgctgccggtgcttctgcgtggaatgcgtggacctgctggtgggccccggcgccgcccaggccgctattaaggaagatccttggaactgctacatgtgcggccacaagggcacatacggcctgctgagacggagagaggactggcctagcagactgcagatgttcttcgccaataaccacgaccaggagttcgacccccctaaggtgtaccctcccgtccccgccgagaagagaaagcccatccgggtcctgagcctgttcgatggcatcgccaccggtctgctggtgctgaaggacctgggcatccaggtggataggtacattgcctccgaggtgtgcgaggactccatcaccgtgggaatggtgcgtcatcagggcaagatcatgtacgtgggcgacgtgcggagcgtgacacagaagcatatccaggagtggggccctttcgacctggtgatcggcggcagcccttgcaatgacctgagcatcgtgaacccagcccggaagggcctgtacgagggaaccggcagactgttcttcgagttttacagactgctgcacgacgcccggcctaaggaaggcgacgaccggcccttcttttggctgttcgagaatgtggtggccatgggagtcagcgacaagcgggatattagccggttcctggagagcaaccccgtgatgatcgatgccaaggaagtgagcgccgcccaccgggccagatacttctggggcaatctgcctggcatgaacagacccctggccagcaccgtgaacgacaagctggagctgcaggagtgcctggagcacggccggatcgccaagttcagcaaggtgagaaccatcaccacccgaagcaacagcatcaaacaaggcaaggaccagcactttcctgtgttcatgaacgagaaggaggacatcctgtggtgtaccgagatggagagagtgttcgggttcccagtccactacacagatgtcagcaacatgtctagactggccagacagagactgctgggaagaagctggtccgtccctgtgatcagacacctgttcgcccctctgaaggagtacttcgcctgcgtgagcagcggcaacagcaacgccaacagccggggccccagcttctctagcggcctggtgccactgtccctgagagggagccacatgggccccatggagatctacaaaaccgtgagcgcctggaagcggcagcctgtgcgcgtgctgagcctgtttcggaatatcgataaagtcctgaaaagcctgggattcctggagagcggctctggctccggcggtggcaccctgaagtacgtggaggatgtgacaaacgtggtcagacgggatgtggagaagtggggccccttcgatctggtgtacggcagcacccaacccctgggcagctcttgtgaccggtgccctggctggtacatgtttcagttccaccggatcctgcagtacgccctgccgagacaggagtcccagcggccattcttttggattttcatggacaacttgctgctgaccgaggatgaccaggaaactaccactcggttcctgcagaccgaagccgtgaccctgcaggacgtgagaggccgggactaccagaacgccatgcgggtgtggtccaacatccctggactgaaaagcaagcacgcacctctgacccctaaagaagaggagtacctgcaggcccaggtgcggagcagaagcaagctggacgcccctaaggtggatctgctggtgaagaattgcctcctgcccctgagagagtacttcaagtatttcagccagaatagtctgcccctgggcggcccaagcagcggcgcccctcctcccagcggcggcagcccagccggctccccaacctctaccgaggagggcacctctgagtccgccacccccgagagcggccctggcacctccaccgagcccagcgagggcagcgcacccggcagccctgccggcagccccacctccacagaggagggaaccagcaccgagcccagcgaaggcagcgccccaggcaccagcaccgagcctagtgagggcggctctggcggcggcagcgcccaggagattaaacggatcaacaagatcagaagaagacttgtgaaagacagcaacaccaagaaggccggcaagacaggccccatgaaaaccctgctggttagagtgatgacacccgatctgagagagcggctggaaaacctgagaaagaagcctgaaaatatcccccagcccatcagcaatacatctagagccaacctgaataagctgctgaccgattacaccgaaatgaagaaggcgatcctgcatgtgtactgggaagagttccagaaggaccctgtgggcctgatgagccgggtggcccagcctgccagcaagaagatcgatcagaacaagctgaaacctgagatggacgagaagggcaacctgaccaccgccggctttgcctgctctcagtgtggccagcccctgttcgtgtacaagctggagcaggtgtctgagaagggcaaggcttacaccaactacttcggacggtgcaatgtggccgagcacgaaaagctgatcctgctggcccagctgaagcccgagaaggatagcgacgaagccgtgacatatagcctgggaaagtttgggcagagggccctggatttctacagcattcatgtgaccaaggagtccacccaccccgtgaagcccctggcccagatcgccggaaacagatacgcctccggacctgtgggaaaggccctgagcgacgcatgtatgggcacaatcgcctccttcctgtctaagtaccaggacatcatcatcgaacaccagaaggtggtgaagggcaaccagaagagactggagagcctgcgggagctggccggcaaggaaaacctggaataccctagcgtgaccctgccacctcagcctcacaccaaggagggcgttgatgcctacaacgaagtgatcgcccgggtgcgaatgtgggtgaacctgaacctgtggcagaagctgaagctaagcagagatgatgccaagcctctgctgagactgaagggattcccttcctttcctctggtcgagagacaggccaacgaagtggactggtgggacatggtgtgtaacgtgaagaagctgatcaacgagaaaaaggaggatggcaaggtgttttggcagaatctggctggctacaagagacaggaagccctgagaccatacctgagcagcgaggaagatcggaagaagggaaagaaattcgctcggtaccagctgggcgacctgctgctgcacctggaaaagaagcacggcgaggactggggaaaggtgtacgacgaggcctgggagcggattgacaagaaagtggaaggcctgagcaagcacatcaagctggaagaggaacggagaagcgaggacgcccagagcaaggccgccctgaccgactggctgcgggctaaggccagcttcgtgatcgagggcctgaaggaggccgacaaggacgagttctgcagatgcgagctgaagctgcagaagtggtacggggacctgcggggaaagcccttcgccatcgaagccgagaacagcatcctggacatcagcggcttcagcaagcagtacaactgtgccttcatctggcagaaggacggcgtgaagaagctgaacctgtacctgatcatcaactacttcaagggcggcaagctgcggttcaagaagatcaaacctgaagccttcgaagccaacagattctacaccgtgatcaacaaaaagagcggcgagatcgtgcccatggaggtgaacttcaacttcgacgaccccaacctgatcatcctgcctctggcctttggcaagagacagggcagagaattcatctggaacgacctgctgtccctggaaaccggcagcctgaagctggccaacggaagagtgatcgagaagacactgtacaacagaagaacccggcaggatgagcctgccctgttcgtggccctgaccttcgagcggcgggaggtcctggactcctccaatatcaaaccaatgaacctgatcggcgtggcaagaggcgaaaacatccccgccgtgatcgccctgaccgaccccgagggctgcccactgagccggtttaaggatagcctgggaaacccaacccacatcctgagaatcggcgagagctataaggagaagcagcggaccatccaggccaagaaggaggtggagcagcggagagccggcggctacagccggaagtacgccagcaaagccaagaatctggcagacgatatggtgagaaacaccgctagagatctgctgtactacgccgtgacccaggatgccatgctgatcttcgccaacctgagccggggcttcggccggcagggcaagcggaccttcatggccgagagacagtacacacggatggaggactggctgaccgccaagctggcctacgagggcctgagcaagacctacctgtccaagacactggcccagtacacctccaagacatgcagcaactgtgggtttaccatcaccagcgccgactacgacagggtgctggagaagctgaagaagacagcaacaggctggatgaccacaattaacggcaaggagctgaaggtggagggccagattacctactacaacagatacaagagacagaacgtagtcaaggacctgtccgtcgagctggatagactgagcgaagaatctgtgaacaacgacatctcctcctggacaaagggcagaagcggagaagctctgagcctcctgaagaaaagattctcccatagacccgtgcaggagaagttcgtgtgcctgaactgcggcttcgagacacacgcagccgagcaagccgccctgaacatcgccagatcctggctgttcctgcggagccaggagtacaagaaataccagacaaacaagacaaccggcaacaccgataagagagccttcgtcgagacctggcagtccttttaccggaagaagcttaaggaggtgtggaaacctgccgtgcggtctggcggatctggcggaggctccacaagcgtgaccgagctgctgaccttcaaggacatcagcgtggacttcacccaggaggagtggggccagctggcccccgcccacaggaacctgtacagggaggtgatgctggagaactacggcaacctggtgagcgtggccggctgccagctgagcaagcccagcgtgatcagccagctggagaagggcgaggagccctggatgaccgagaaggagggcgccggcgaccccagcagcgacctgaagagcaccagccccaagaaaaagagaaaagtctaagctgccttctgcggggcttgccttctggccatgcccttcttctctcccttgcacctgtacctcttggtctttgaataaagcctgagtaggaaggctagcaaaaaaaaaaaaaaaaaaaaaaaaaaaaaaaaaaaaaaaaaaaaaaaaaaaaaaaaaaaaaaaaaaaaaaaaaaaaaaaa

SEQ ID NO: 7222 - RNA, 5797 nt, synthetic construct
  source 1..5797: mol_type = other RNA
aggaaataagagagaaaagaagagtaagaagaaatataagagccaccatggcccctaagaagaagcgtaaagtgagccggatggaacgcctcgtctacgaggtgcggcagaagtgcagaaacatcgaggacatctgcatctcctgcggatctctgaacgtgaccctggagcacccactgttcatcggcggcatgtgccagaactgtaaaaactgttttctggagtgtgcctatcaatacgacgatgacggctaccagagctactgcaccatctgttgcggcggaagagaggtgctgatgtgtggaaataacaactgctgccggtgcttctgcgtggaatgcgtggacctgctggtgggccccggcgccgcccaggccgctattaaggaagatccttggaactgctacatgtgcggccacaagggcacatacggcctgctgagacggagagaggactggcctagcagactgcagatgttcttcgccaataaccacgaccaggagttcgacccccctaaggtgtaccctcccgtccccgccgagaagagaaagcccatccgggtcctgagcctgttcgatggcatcgccaccggtctgctggtgctgaaggacctgggcatccaggtggataggtacattgcctccgaggtgtgcgaggactccatcaccgtgggaatggtgcgtcatcagggcaagatcatgtacgtgggcgacgtgcggagcgtgacacagaagcatatccaggagtggggccctttcgacctggtgatcggcggcagcccttgcaatgacctgagcatcgtgaacccagcccggaagggcctgtacgagggaaccggcagactgttcttcgagttttacagactgctgcacgacgcccggcctaaggaaggcgacgaccggcccttcttttggctgttcgagaatgtggtggccatgggagtcagcgacaagcgggatattagccggttcctggagagcaaccccgtgatgatcgatgccaaggaagtgagcgccgcccaccgggccagatacttctggggcaatctgcctggcatgaacagacccctggccagcaccgtgaacgacaagctggagctgcaggagtgcctggagcacggccggatcgccaagttcagcaaggtgagaaccatcaccacccgaagcaacagcatcaaacaaggcaaggaccagcactttcctgtgttcatgaacgagaaggaggacatcctgtggtgtaccgagatggagagagtgttcgggttcccagtccactacacagatgtcagcaacatgtctagactggccagacagagactgctgggaagaagctggtccgtccctgtgatcagacacctgttcgcccctctgaaggagtacttcgcctgcgtgagcagcggcaacagcaacgccaacagccggggccccagcttctctagcggcctggtgccactgtccctgagagggagccacatgggccccatggagatctacaaaaccgtgagcgcctggaagcggcagcctgtgcgcgtgctgagcctgtttcggaatatcgataaagtcctgaaaagcctgggattcctggagagcggctctggctccggcggtggcaccctgaagtacgtggaggatgtgacaaacgtggtcagacgggatgtggagaagtggggccccttcgatctggtgtacggcagcacccaacccctgggcagctcttgtgaccggtgccctggctggtacatgtttcagttccaccggatcctgcagtacgccctgccgagacaggagtcccagcggccattcttttggattttcatggacaacttgctgctgaccgaggatgaccaggaaactaccactcggttcctgcagaccgaagccgtgaccctgcaggacgtgagaggccgggactaccagaacgccatgcgggtgtggtccaacatccctggactgaaaagcaagcacgcacctctgacccctaaagaagaggagtacctgcaggcccaggtgcggagcagaagcaagctggacgcccctaaggtggatctgctggtgaagaattgcctcctgcccctgagagagtacttcaagtatttcagccagaatagtctgcccctgggcggcccaagcagcggcgcccctcctcccagcggcggcagcccagccggctccccaacctctaccgaggagggcacctctgagtccgccacccccgagagcggccctggcacctccaccgagcccagcgagggcagcgcacccggcagccctgccggcagccccacctccacagaggagggaaccagcaccgagcccagcgaaggcagcgccccaggcaccagcaccgagcctagtgagggcggctctggcggcggcagcgcccaggagattaaacggatcaacaagatcagaagaagacttgtgaaagacagcaacaccaagaaggccggcaagacaggccccatgaaaaccctgctggttagagtgatgacacccgatctgagagagcggctggaaaacctgagaaagaagcctgaaaatatcccccagcccatcagcaatacatctagagccaacctgaataagctgctgaccgattacaccgaaatgaagaaggcgatcctgcatgtgtactgggaagagttccagaaggaccctgtgggcctgatgagccgggtggcccagcctgccagcaagaagatcgatcagaacaagctgaaacctgagatggacgagaagggcaacctgaccaccgccggctttgcctgctctcagtgtggccagcccctgttcgtgtacaagctggagcaggtgtctgagaagggcaaggcttacaccaactacttcggacggtgcaatgtggccgagcacgaaaagctgatcctgctggcccagctgaagcccgagaaggatagcgacgaagccgtgacatatagcctgggaaagtttgggcagagggccctggatttctacagcattcatgtgaccaaggagtccacccaccccgtgaagcccctggcccagatcgccggaaacagatacgcctccggacctgtgggaaaggccctgagcgacgcatgtatgggcacaatcgcctccttcctgtctaagtaccaggacatcatcatcgaacaccagaaggtggtgaagggcaaccagaagagactggagagcctgcgggagctggccggcaaggaaaacctggaataccctagcgtgaccctgccacctcagcctcacaccaaggagggcgttgatgcctacaacgaagtgatcgcccgggtgcgaatgtgggtgaacctgaacctgtggcagaagctgaagctaagcagagatgatgccaagcctctgctgagactgaagggattcccttcctttcctctggtcgagagacaggccaacgaagtggactggtgggacatggtgtgtaacgtgaagaagctgatcaacgagaaaaaggaggatggcaaggtgttttggcagaatctggctggctacaagagacaggaagccctgagaccatacctgagcagcgaggaagatcggaagaagggaaagaaattcgctcggtaccagctgggcgacctgctgctgcacctggaaaagaagcacggcgaggactggggaaaggtgtacgacgaggcctgggagcggattgacaagaaagtggaaggcctgagcaagcacatcaagctggaagaggaacggagaagcgaggacgcccagagcaaggccgccctgaccgactggctgcgggctaaggccagcttcgtgatcgagggcctgaaggaggccgacaaggacgagttctgcagatgcgagctgaagctgcagaagtggtacggggacctgcggggaaagcccttcgccatcgaagccgagaacagcatcctggacatcagcggcttcagcaagcagtacaactgtgccttcatctggcagaaggacggcgtgaagaagctgaacctgtacctgatcatcaactacttcaagggcggcaagctgcggttcaagaagatcaaacctgaagccttcgaagccaacagattctacaccgtgatcaacaaaaagagcggcgagatcgtgcccatggaggtgaacttcaacttcgacgaccccaacctgatcatcctgcctctggcctttggcaagagacagggcagagaattcatctggaacgacctgctgtccctggaaaccggcagcctgaagctggccaacggaagagtgatcgagaagacactgtacaacagaagaacccggcaggatgagcctgccctgttcgtggccctgaccttcgagcggcgggaggtcctggactcctccaatatcaaaccaatgaacctgatcggcgtggcaagaggcgaaaacatccccgccgtgatcgccctgaccgaccccgagggctgcccactgagccggtttaaggatagcctgggaaacccaacccacatcctgagaatcggcgagagctataaggagaagcagcggaccatccaggccaagaaggaggtggagcagcggagagccggcggctacagccggaagtacgccagcaaagccaagaatctggcagacgatatggtgagaaacaccgctagagatctgctgtactacgccgtgacccaggatgccatgctgatcttcgccaacctgagccggggcttcggccggcagggcaagcggaccttcatggccgagagacagtacacacggatggaggactggctgaccgccaagctggcctacgagggcctgagcaagacctacctgtccaagacactggcccagtacacctccaagacatgcagcaactgtgggtttaccatcaccagcgccgactacgacagggtgctggagaagctgaagaagacagcaacaggctggatgaccacaattaacggcaaggagctgaaggtggagggccagattacctactacaacagatacaagagacagaacgtagtcaaggacctgtccgtcgagctggatagactgagcgaagaatctgtgaacaacgacatctcctcctggacaaagggcagaagcggagaagctctgagcctcctgaagaaaagattctcccatagacccgtgcaggagaagttcgtgtgcctgaactgcggcttcgagacacacgcagccgagcaagccgccctgaacatcgccagatcctggctgttcctgcggagccaggagtacaagaaataccagacaaacaagacaaccggcaacaccgataagagagccttcgtcgagacctggcagtccttttaccggaagaagcttaaggaggtgtggaaacctgccgtgcggtctggcggatctggcggaggctccacaagcgacctggaccaggtgaccttcgaggacgtggtggtggacttcaccagggaggagtggggctgcctggagcccgcccagaggaccctgtacagggacgtgatgctggagaccttcaggctgctggtgagcgtgggccactggctgcccaagcccgacgtgatcagcctgctggagcaggaggccgagctgtgggccgccgacgagggcggccccaggggcatgtgccccgacctggagaccaggaccagccccaagaaaaagagaaaagtctaagctgccttctgcggggcttgccttctggccatgcccttcttctctcccttgcacctgtacctcttggtctttgaataaagcctgagtaggaaggctagcaaaaaaaaaaaaaaaaaaaaaaaaaaaaaaaaaaaaaaaaaaaaaaaaaaaaaaaaaaaaaaaaaaaaaaaaaaaaaaaa

SEQ ID NO: 7223 - RNA, 5797 nt, synthetic construct
  source 1..5797: mol_type = other RNA
aggaaataagagagaaaagaagagtaagaagaaatataagagccaccatggcccctaagaagaagcgtaaagtgagccggatggaacgcctcgtctacgaggtgcggcagaagtgcagaaacatcgaggacatctgcatctcctgcggatctctgaacgtgaccctggagcacccactgttcatcggcggcatgtgccagaactgtaaaaactgttttctggagtgtgcctatcaatacgacgatgacggctaccagagctactgcaccatctgttgcggcggaagagaggtgctgatgtgtggaaataacaactgctgccggtgcttctgcgtggaatgcgtggacctgctggtgggccccggcgccgcccaggccgctattaaggaagatccttggaactgctacatgtgcggccacaagggcacatacggcctgctgagacggagagaggactggcctagcagactgcagatgttcttcgccaataaccacgaccaggagttcgacccccctaaggtgtaccctcccgtccccgccgagaagagaaagcccatccgggtcctgagcctgttcgatggcatcgccaccggtctgctggtgctgaaggacctgggcatccaggtggataggtacattgcctccgaggtgtgcgaggactccatcaccgtgggaatggtgcgtcatcagggcaagatcatgtacgtgggcgacgtgcggagcgtgacacagaagcatatccaggagtggggccctttcgacctggtgatcggcggcagcccttgcaatgacctgagcatcgtgaacccagcccggaagggcctgtacgagggaaccggcagactgttcttcgagttttacagactgctgcacgacgcccggcctaaggaaggcgacgaccggcccttcttttggctgttcgagaatgtggtggccatgggagtcagcgacaagcgggatattagccggttcctggagagcaaccccgtgatgatcgatgccaaggaagtgagcgccgcccaccgggccagatacttctggggcaatctgcctggcatgaacagacccctggccagcaccgtgaacgacaagctggagctgcaggagtgcctggagcacggccggatcgccaagttcagcaaggtgagaaccatcaccacccgaagcaacagcatcaaacaaggcaaggaccagcactttcctgtgttcatgaacgagaaggaggacatcctgtggtgtaccgagatggagagagtgttcgggttcccagtccactacacagatgtcagcaacatgtctagactggccagacagagactgctgggaagaagctggtccgtccctgtgatcagacacctgttcgcccctctgaaggagtacttcgcctgcgtgagcagcggcaacagcaacgccaacagccggggccccagcttctctagcggcctggtgccactgtccctgagagggagccacatgggccccatggagatctacaaaaccgtgagcgcctggaagcggcagcctgtgcgcgtgctgagcctgtttcggaatatcgataaagtcctgaaaagcctgggattcctggagagcggctctggctccggcggtggcaccctgaagtacgtggaggatgtgacaaacgtggtcagacgggatgtggagaagtggggccccttcgatctggtgtacggcagcacccaacccctgggcagctcttgtgaccggtgccctggctggtacatgtttcagttccaccggatcctgcagtacgccctgccgagacaggagtcccagcggccattcttttggattttcatggacaacttgctgctgaccgaggatgaccaggaaactaccactcggttcctgcagaccgaagccgtgaccctgcaggacgtgagaggccgggactaccagaacgccatgcgggtgtggtccaacatccctggactgaaaagcaagcacgcacctctgacccctaaagaagaggagtacctgcaggcccaggtgcggagcagaagcaagctggacgcccctaaggtggatctgctggtgaagaattgcctcctgcccctgagagagtacttcaagtatttcagccagaatagtctgcccctgggcggcccaagcagcggcgcccctcctcccagcggcggcagcccagccggctccccaacctctaccgaggagggcacctctgagtccgccacccccgagagcggccctggcacctccaccgagcccagcgagggcagcgcacccggcagccctgccggcagccccacctccacagaggagggaaccagcaccgagcccagcgaaggcagcgccccaggcaccagcaccgagcctagtgagggcggctctggcggcggcagcgcccaggagattaaacggatcaacaagatcagaagaagacttgtgaaagacagcaacaccaagaaggccggcaagacaggccccatgaaaaccctgctggttagagtgatgacacccgatctgagagagcggctggaaaacctgagaaagaagcctgaaaatatcccccagcccatcagcaatacatctagagccaacctgaataagctgctgaccgattacaccgaaatgaagaaggcgatcctgcatgtgtactgggaagagttccagaaggaccctgtgggcctgatgagccgggtggcccagcctgccagcaagaagatcgatcagaacaagctgaaacctgagatggacgagaagggcaacctgaccaccgccggctttgcctgctctcagtgtggccagcccctgttcgtgtacaagctggagcaggtgtctgagaagggcaaggcttacaccaactacttcggacggtgcaatgtggccgagcacgaaaagctgatcctgctggcccagctgaagcccgagaaggatagcgacgaagccgtgacatatagcctgggaaagtttgggcagagggccctggatttctacagcattcatgtgaccaaggagtccacccaccccgtgaagcccctggcccagatcgccggaaacagatacgcctccggacctgtgggaaaggccctgagcgacgcatgtatgggcacaatcgcctccttcctgtctaagtaccaggacatcatcatcgaacaccagaaggtggtgaagggcaaccagaagagactggagagcctgcgggagctggccggcaaggaaaacctggaataccctagcgtgaccctgccacctcagcctcacaccaaggagggcgttgatgcctacaacgaagtgatcgcccgggtgcgaatgtgggtgaacctgaacctgtggcagaagctgaagctaagcagagatgatgccaagcctctgctgagactgaagggattcccttcctttcctctggtcgagagacaggccaacgaagtggactggtgggacatggtgtgtaacgtgaagaagctgatcaacgagaaaaaggaggatggcaaggtgttttggcagaatctggctggctacaagagacaggaagccctgagaccatacctgagcagcgaggaagatcggaagaagggaaagaaattcgctcggtaccagctgggcgacctgctgctgcacctggaaaagaagcacggcgaggactggggaaaggtgtacgacgaggcctgggagcggattgacaagaaagtggaaggcctgagcaagcacatcaagctggaagaggaacggagaagcgaggacgcccagagcaaggccgccctgaccgactggctgcgggctaaggccagcttcgtgatcgagggcctgaaggaggccgacaaggacgagttctgcagatgcgagctgaagctgcagaagtggtacggggacctgcggggaaagcccttcgccatcgaagccgagaacagcatcctggacatcagcggcttcagcaagcagtacaactgtgccttcatctggcagaaggacggcgtgaagaagctgaacctgtacctgatcatcaactacttcaagggcggcaagctgcggttcaagaagatcaaacctgaagccttcgaagccaacagattctacaccgtgatcaacaaaaagagcggcgagatcgtgcccatggaggtgaacttcaacttcgacgaccccaacctgatcatcctgcctctggcctttggcaagagacagggcagagaattcatctggaacgacctgctgtccctggaaaccggcagcctgaagctggccaacggaagagtgatcgagaagacactgtacaacagaagaacccggcaggatgagcctgccctgttcgtggccctgaccttcgagcggcgggaggtcctggactcctccaatatcaaaccaatgaacctgatcggcgtggcaagaggcgaaaacatccccgccgtgatcgccctgaccgaccccgagggctgcccactgagccggtttaaggatagcctgggaaacccaacccacatcctgagaatcggcgagagctataaggagaagcagcggaccatccaggccaagaaggaggtggagcagcggagagccggcggctacagccggaagtacgccagcaaagccaagaatctggcagacgatatggtgagaaacaccgctagagatctgctgtactacgccgtgacccaggatgccatgctgatcttcgccaacctgagccggggcttcggccggcagggcaagcggaccttcatggccgagagacagtacacacggatggaggactggctgaccgccaagctggcctacgagggcctgagcaagacctacctgtccaagacactggcccagtacacctccaagacatgcagcaactgtgggtttaccatcaccagcgccgactacgacagggtgctggagaagctgaagaagacagcaacaggctggatgaccacaattaacggcaaggagctgaaggtggagggccagattacctactacaacagatacaagagacagaacgtagtcaaggacctgtccgtcgagctggatagactgagcgaagaatctgtgaacaacgacatctcctcctggacaaagggcagaagcggagaagctctgagcctcctgaagaaaagattctcccatagacccgtgcaggagaagttcgtgtgcctgaactgcggcttcgagacacacgcagccgagcaagccgccctgaacatcgccagatcctggctgttcctgcggagccaggagtacaagaaataccagacaaacaagacaaccggcaacaccgataagagagccttcgtcgagacctggcagtccttttaccggaagaagcttaaggaggtgtggaaacctgccgtgcggtctggcggatctggcggaggctccacaagcgcccacggcagcgtgaccttcagggacgtggccatggacttcagccagcaggagtgggagtgcctgaaccccttccagaagaccctgtacagggacgtgatgatggagaactacggcaacctggtgagcctgggccacagcatcagcaagcccgacgtgatcaccctgctggagcagggcaaggagccctggatgatcgtgaagaaggagaccaggaagtggaggaaggacctggagagcaggaccagccccaagaaaaagagaaaagtctaagctgccttctgcggggcttgccttctggccatgcccttcttctctcccttgcacctgtacctcttggtctttgaataaagcctgagtaggaaggctagcaaaaaaaaaaaaaaaaaaaaaaaaaaaaaaaaaaaaaaaaaaaaaaaaaaaaaaaaaaaaaaaaaaaaaaaaaaaaaaaa

SEQ ID NO: 7224 - RNA, 5797 nt, synthetic construct
  source 1..5797: mol_type = other RNA
aggaaataagagagaaaagaagagtaagaagaaatataagagccaccatggcccctaagaagaagcgtaaagtgagccggatggaacgcctcgtctacgaggtgcggcagaagtgcagaaacatcgaggacatctgcatctcctgcggatctctgaacgtgaccctggagcacccactgttcatcggcggcatgtgccagaactgtaaaaactgttttctggagtgtgcctatcaatacgacgatgacggctaccagagctactgcaccatctgttgcggcggaagagaggtgctgatgtgtggaaataacaactgctgccggtgcttctgcgtggaatgcgtggacctgctggtgggccccggcgccgcccaggccgctattaaggaagatccttggaactgctacatgtgcggccacaagggcacatacggcctgctgagacggagagaggactggcctagcagactgcagatgttcttcgccaataaccacgaccaggagttcgacccccctaaggtgtaccctcccgtccccgccgagaagagaaagcccatccgggtcctgagcctgttcgatggcatcgccaccggtctgctggtgctgaaggacctgggcatccaggtggataggtacattgcctccgaggtgtgcgaggactccatcaccgtgggaatggtgcgtcatcagggcaagatcatgtacgtgggcgacgtgcggagcgtgacacagaagcatatccaggagtggggccctttcgacctggtgatcggcggcagcccttgcaatgacctgagcatcgtgaacccagcccggaagggcctgtacgagggaaccggcagactgttcttcgagttttacagactgctgcacgacgcccggcctaaggaaggcgacgaccggcccttcttttggctgttcgagaatgtggtggccatgggagtcagcgacaagcgggatattagccggttcctggagagcaaccccgtgatgatcgatgccaaggaagtgagcgccgcccaccgggccagatacttctggggcaatctgcctggcatgaacagacccctggccagcaccgtgaacgacaagctggagctgcaggagtgcctggagcacggccggatcgccaagttcagcaaggtgagaaccatcaccacccgaagcaacagcatcaaacaaggcaaggaccagcactttcctgtgttcatgaacgagaaggaggacatcctgtggtgtaccgagatggagagagtgttcgggttcccagtccactacacagatgtcagcaacatgtctagactggccagacagagactgctgggaagaagctggtccgtccctgtgatcagacacctgttcgcccctctgaaggagtacttcgcctgcgtgagcagcggcaacagcaacgccaacagccggggccccagcttctctagcggcctggtgccactgtccctgagagggagccacatgggccccatggagatctacaaaaccgtgagcgcctggaagcggcagcctgtgcgcgtgctgagcctgtttcggaatatcgataaagtcctgaaaagcctgggattcctggagagcggctctggctccggcggtggcaccctgaagtacgtggaggatgtgacaaacgtggtcagacgggatgtggagaagtggggccccttcgatctggtgtacggcagcacccaacccctgggcagctcttgtgaccggtgccctggctggtacatgtttcagttccaccggatcctgcagtacgccctgccgagacaggagtcccagcggccattcttttggattttcatggacaacttgctgctgaccgaggatgaccaggaaactaccactcggttcctgcagaccgaagccgtgaccctgcaggacgtgagaggccgggactaccagaacgccatgcgggtgtggtccaacatccctggactgaaaagcaagcacgcacctctgacccctaaagaagaggagtacctgcaggcccaggtgcggagcagaagcaagctggacgcccctaaggtggatctgctggtgaagaattgcctcctgcccctgagagagtacttcaagtatttcagccagaatagtctgcccctgggcggcccaagcagcggcgcccctcctcccagcggcggcagcccagccggctccccaacctctaccgaggagggcacctctgagtccgccacccccgagagcggccctggcacctccaccgagcccagcgagggcagcgcacccggcagccctgccggcagccccacctccacagaggagggaaccagcaccgagcccagcgaaggcagcgccccaggcaccagcaccgagcctagtgagggcggctctggcggcggcagcgcccaggagattaaacggatcaacaagatcagaagaagacttgtgaaagacagcaacaccaagaaggccggcaagacaggccccatgaaaaccctgctggttagagtgatgacacccgatctgagagagcggctggaaaacctgagaaagaagcctgaaaatatcccccagcccatcagcaatacatctagagccaacctgaataagctgctgaccgattacaccgaaatgaagaaggcgatcctgcatgtgtactgggaagagttccagaaggaccctgtgggcctgatgagccgggtggcccagcctgccagcaagaagatcgatcagaacaagctgaaacctgagatggacgagaagggcaacctgaccaccgccggctttgcctgctctcagtgtggccagcccctgttcgtgtacaagctggagcaggtgtctgagaagggcaaggcttacaccaactacttcggacggtgcaatgtggccgagcacgaaaagctgatcctgctggcccagctgaagcccgagaaggatagcgacgaagccgtgacatatagcctgggaaagtttgggcagagggccctggatttctacagcattcatgtgaccaaggagtccacccaccccgtgaagcccctggcccagatcgccggaaacagatacgcctccggacctgtgggaaaggccctgagcgacgcatgtatgggcacaatcgcctccttcctgtctaagtaccaggacatcatcatcgaacaccagaaggtggtgaagggcaaccagaagagactggagagcctgcgggagctggccggcaaggaaaacctggaataccctagcgtgaccctgccacctcagcctcacaccaaggagggcgttgatgcctacaacgaagtgatcgcccgggtgcgaatgtgggtgaacctgaacctgtggcagaagctgaagctaagcagagatgatgccaagcctctgctgagactgaagggattcccttcctttcctctggtcgagagacaggccaacgaagtggactggtgggacatggtgtgtaacgtgaagaagctgatcaacgagaaaaaggaggatggcaaggtgttttggcagaatctggctggctacaagagacaggaagccctgagaccatacctgagcagcgaggaagatcggaagaagggaaagaaattcgctcggtaccagctgggcgacctgctgctgcacctggaaaagaagcacggcgaggactggggaaaggtgtacgacgaggcctgggagcggattgacaagaaagtggaaggcctgagcaagcacatcaagctggaagaggaacggagaagcgaggacgcccagagcaaggccgccctgaccgactggctgcgggctaaggccagcttcgtgatcgagggcctgaaggaggccgacaaggacgagttctgcagatgcgagctgaagctgcagaagtggtacggggacctgcggggaaagcccttcgccatcgaagccgagaacagcatcctggacatcagcggcttcagcaagcagtacaactgtgccttcatctggcagaaggacggcgtgaagaagctgaacctgtacctgatcatcaactacttcaagggcggcaagctgcggttcaagaagatcaaacctgaagccttcgaagccaacagattctacaccgtgatcaacaaaaagagcggcgagatcgtgcccatggaggtgaacttcaacttcgacgaccccaacctgatcatcctgcctctggcctttggcaagagacagggcagagaattcatctggaacgacctgctgtccctggaaaccggcagcctgaagctggccaacggaagagtgatcgagaagacactgtacaacagaagaacccggcaggatgagcctgccctgttcgtggccctgaccttcgagcggcgggaggtcctggactcctccaatatcaaaccaatgaacctgatcggcgtggcaagaggcgaaaacatccccgccgtgatcgccctgaccgaccccgagggctgcccactgagccggtttaaggatagcctgggaaacccaacccacatcctgagaatcggcgagagctataaggagaagcagcggaccatccaggccaagaaggaggtggagcagcggagagccggcggctacagccggaagtacgccagcaaagccaagaatctggcagacgatatggtgagaaacaccgctagagatctgctgtactacgccgtgacccaggatgccatgctgatcttcgccaacctgagccggggcttcggccggcagggcaagcggaccttcatggccgagagacagtacacacggatggaggactggctgaccgccaagctggcctacgagggcctgagcaagacctacctgtccaagacactggcccagtacacctccaagacatgcagcaactgtgggtttaccatcaccagcgccgactacgacagggtgctggagaagctgaagaagacagcaacaggctggatgaccacaattaacggcaaggagctgaaggtggagggccagattacctactacaacagatacaagagacagaacgtagtcaaggacctgtccgtcgagctggatagactgagcgaagaatctgtgaacaacgacatctcctcctggacaaagggcagaagcggagaagctctgagcctcctgaagaaaagattctcccatagacccgtgcaggagaagttcgtgtgcctgaactgcggcttcgagacacacgcagccgagcaagccgccctgaacatcgccagatcctggctgttcctgcggagccaggagtacaagaaataccagacaaacaagacaaccggcaacaccgataagagagccttcgtcgagacctggcagtccttttaccggaagaagcttaaggaggtgtggaaacctgccgtgcggtctggcggatctggcggaggctccacaagcgcccaggagagcgtgaccttcgaggacgtggccgtgaacttcaccaacagggagtggcagagcctgacctacgcccagaggcacctgtacaagcacgtgatgctggagaactacaggaacatggtgagcctgggcttccccttccccaagccccccctgatcagccacctggagaggggcgtggagccctgcgtgcaggacccccaggacaaggagagcctgagctgcagctaccccgtgagcaccagccccaagaaaaagagaaaagtctaagctgccttctgcggggcttgccttctggccatgcccttcttctctcccttgcacctgtacctcttggtctttgaataaagcctgagtaggaaggctagcaaaaaaaaaaaaaaaaaaaaaaaaaaaaaaaaaaaaaaaaaaaaaaaaaaaaaaaaaaaaaaaaaaaaaaaaaaaaaaaa

SEQ ID NO: 7225 - RNA, 5797 nt, synthetic construct
  source 1..5797: mol_type = other RNA
aggaaataagagagaaaagaagagtaagaagaaatataagagccaccatggcccctaagaagaagcgtaaagtgagccggatggaacgcctcgtctacgaggtgcggcagaagtgcagaaacatcgaggacatctgcatctcctgcggatctctgaacgtgaccctggagcacccactgttcatcggcggcatgtgccagaactgtaaaaactgttttctggagtgtgcctatcaatacgacgatgacggctaccagagctactgcaccatctgttgcggcggaagagaggtgctgatgtgtggaaataacaactgctgccggtgcttctgcgtggaatgcgtggacctgctggtgggccccggcgccgcccaggccgctattaaggaagatccttggaactgctacatgtgcggccacaagggcacatacggcctgctgagacggagagaggactggcctagcagactgcagatgttcttcgccaataaccacgaccaggagttcgacccccctaaggtgtaccctcccgtccccgccgagaagagaaagcccatccgggtcctgagcctgttcgatggcatcgccaccggtctgctggtgctgaaggacctgggcatccaggtggataggtacattgcctccgaggtgtgcgaggactccatcaccgtgggaatggtgcgtcatcagggcaagatcatgtacgtgggcgacgtgcggagcgtgacacagaagcatatccaggagtggggccctttcgacctggtgatcggcggcagcccttgcaatgacctgagcatcgtgaacccagcccggaagggcctgtacgagggaaccggcagactgttcttcgagttttacagactgctgcacgacgcccggcctaaggaaggcgacgaccggcccttcttttggctgttcgagaatgtggtggccatgggagtcagcgacaagcgggatattagccggttcctggagagcaaccccgtgatgatcgatgccaaggaagtgagcgccgcccaccgggccagatacttctggggcaatctgcctggcatgaacagacccctggccagcaccgtgaacgacaagctggagctgcaggagtgcctggagcacggccggatcgccaagttcagcaaggtgagaaccatcaccacccgaagcaacagcatcaaacaaggcaaggaccagcactttcctgtgttcatgaacgagaaggaggacatcctgtggtgtaccgagatggagagagtgttcgggttcccagtccactacacagatgtcagcaacatgtctagactggccagacagagactgctgggaagaagctggtccgtccctgtgatcagacacctgttcgcccctctgaaggagtacttcgcctgcgtgagcagcggcaacagcaacgccaacagccggggccccagcttctctagcggcctggtgccactgtccctgagagggagccacatgggccccatggagatctacaaaaccgtgagcgcctggaagcggcagcctgtgcgcgtgctgagcctgtttcggaatatcgataaagtcctgaaaagcctgggattcctggagagcggctctggctccggcggtggcaccctgaagtacgtggaggatgtgacaaacgtggtcagacgggatgtggagaagtggggccccttcgatctggtgtacggcagcacccaacccctgggcagctcttgtgaccggtgccctggctggtacatgtttcagttccaccggatcctgcagtacgccctgccgagacaggagtcccagcggccattcttttggattttcatggacaacttgctgctgaccgaggatgaccaggaaactaccactcggttcctgcagaccgaagccgtgaccctgcaggacgtgagaggccgggactaccagaacgccatgcgggtgtggtccaacatccctggactgaaaagcaagcacgcacctctgacccctaaagaagaggagtacctgcaggcccaggtgcggagcagaagcaagctggacgcccctaaggtggatctgctggtgaagaattgcctcctgcccctgagagagtacttcaagtatttcagccagaatagtctgcccctgggcggcccaagcagcggcgcccctcctcccagcggcggcagcccagccggctccccaacctctaccgaggagggcacctctgagtccgccacccccgagagcggccctggcacctccaccgagcccagcgagggcagcgcacccggcagccctgccggcagccccacctccacagaggagggaaccagcaccgagcccagcgaaggcagcgccccaggcaccagcaccgagcctagtgagggcggctctggcggcggcagcgcccaggagattaaacggatcaacaagatcagaagaagacttgtgaaagacagcaacaccaagaaggccggcaagacaggccccatgaaaaccctgctggttagagtgatgacacccgatctgagagagcggctggaaaacctgagaaagaagcctgaaaatatcccccagcccatcagcaatacatctagagccaacctgaataagctgctgaccgattacaccgaaatgaagaaggcgatcctgcatgtgtactgggaagagttccagaaggaccctgtgggcctgatgagccgggtggcccagcctgccagcaagaagatcgatcagaacaagctgaaacctgagatggacgagaagggcaacctgaccaccgccggctttgcctgctctcagtgtggccagcccctgttcgtgtacaagctggagcaggtgtctgagaagggcaaggcttacaccaactacttcggacggtgcaatgtggccgagcacgaaaagctgatcctgctggcccagctgaagcccgagaaggatagcgacgaagccgtgacatatagcctgggaaagtttgggcagagggccctggatttctacagcattcatgtgaccaaggagtccacccaccccgtgaagcccctggcccagatcgccggaaacagatacgcctccggacctgtgggaaaggccctgagcgacgcatgtatgggcacaatcgcctccttcctgtctaagtaccaggacatcatcatcgaacaccagaaggtggtgaagggcaaccagaagagactggagagcctgcgggagctggccggcaaggaaaacctggaataccctagcgtgaccctgccacctcagcctcacaccaaggagggcgttgatgcctacaacgaagtgatcgcccgggtgcgaatgtgggtgaacctgaacctgtggcagaagctgaagctaagcagagatgatgccaagcctctgctgagactgaagggattcccttcctttcctctggtcgagagacaggccaacgaagtggactggtgggacatggtgtgtaacgtgaagaagctgatcaacgagaaaaaggaggatggcaaggtgttttggcagaatctggctggctacaagagacaggaagccctgagaccatacctgagcagcgaggaagatcggaagaagggaaagaaattcgctcggtaccagctgggcgacctgctgctgcacctggaaaagaagcacggcgaggactggggaaaggtgtacgacgaggcctgggagcggattgacaagaaagtggaaggcctgagcaagcacatcaagctggaagaggaacggagaagcgaggacgcccagagcaaggccgccctgaccgactggctgcgggctaaggccagcttcgtgatcgagggcctgaaggaggccgacaaggacgagttctgcagatgcgagctgaagctgcagaagtggtacggggacctgcggggaaagcccttcgccatcgaagccgagaacagcatcctggacatcagcggcttcagcaagcagtacaactgtgccttcatctggcagaaggacggcgtgaagaagctgaacctgtacctgatcatcaactacttcaagggcggcaagctgcggttcaagaagatcaaacctgaagccttcgaagccaacagattctacaccgtgatcaacaaaaagagcggcgagatcgtgcccatggaggtgaacttcaacttcgacgaccccaacctgatcatcctgcctctggcctttggcaagagacagggcagagaattcatctggaacgacctgctgtccctggaaaccggcagcctgaagctggccaacggaagagtgatcgagaagacactgtacaacagaagaacccggcaggatgagcctgccctgttcgtggccctgaccttcgagcggcgggaggtcctggactcctccaatatcaaaccaatgaacctgatcggcgtggcaagaggcgaaaacatccccgccgtgatcgccctgaccgaccccgagggctgcccactgagccggtttaaggatagcctgggaaacccaacccacatcctgagaatcggcgagagctataaggagaagcagcggaccatccaggccaagaaggaggtggagcagcggagagccggcggctacagccggaagtacgccagcaaagccaagaatctggcagacgatatggtgagaaacaccgctagagatctgctgtactacgccgtgacccaggatgccatgctgatcttcgccaacctgagccggggcttcggccggcagggcaagcggaccttcatggccgagagacagtacacacggatggaggactggctgaccgccaagctggcctacgagggcctgagcaagacctacctgtccaagacactggcccagtacacctccaagacatgcagcaactgtgggtttaccatcaccagcgccgactacgacagggtgctggagaagctgaagaagacagcaacaggctggatgaccacaattaacggcaaggagctgaaggtggagggccagattacctactacaacagatacaagagacagaacgtagtcaaggacctgtccgtcgagctggatagactgagcgaagaatctgtgaacaacgacatctcctcctggacaaagggcagaagcggagaagctctgagcctcctgaagaaaagattctcccatagacccgtgcaggagaagttcgtgtgcctgaactgcggcttcgagacacacgcagccgagcaagccgccctgaacatcgccagatcctggctgttcctgcggagccaggagtacaagaaataccagacaaacaagacaaccggcaacaccgataagagagccttcgtcgagacctggcagtccttttaccggaagaagcttaaggaggtgtggaaacctgccgtgcggtctggcggatctggcggaggctccacaagcatgcaggagagcgtgaccttcaaggacgtggccgtggacttcacccaggaggagtggaagcagctggaccccgcccagagggacctgtacagggacgtgatgctggagaactacaggaacctggtgagcctgggcctgcccgtgttcaagcccgacgtgatcagccagctggagaagggcgaggccccctggacccccgaggtgcccaggagcacctgcagcggcagcttcagccaggaggccaccagccccaagaaaaagagaaaagtctaagctgccttctgcggggcttgccttctggccatgcccttcttctctcccttgcacctgtacctcttggtctttgaataaagcctgagtaggaaggctagcaaaaaaaaaaaaaaaaaaaaaaaaaaaaaaaaaaaaaaaaaaaaaaaaaaaaaaaaaaaaaaaaaaaaaaaaaaaaaaaa

SEQ ID NO: 7226 - RNA, 5797 nt, synthetic construct
  source 1..5797: mol_type = other RNA
aggaaataagagagaaaagaagagtaagaagaaatataagagccaccatggcccctaagaagaagcgtaaagtgagccggatggaacgcctcgtctacgaggtgcggcagaagtgcagaaacatcgaggacatctgcatctcctgcggatctctgaacgtgaccctggagcacccactgttcatcggcggcatgtgccagaactgtaaaaactgttttctggagtgtgcctatcaatacgacgatgacggctaccagagctactgcaccatctgttgcggcggaagagaggtgctgatgtgtggaaataacaactgctgccggtgcttctgcgtggaatgcgtggacctgctggtgggccccggcgccgcccaggccgctattaaggaagatccttggaactgctacatgtgcggccacaagggcacatacggcctgctgagacggagagaggactggcctagcagactgcagatgttcttcgccaataaccacgaccaggagttcgacccccctaaggtgtaccctcccgtccccgccgagaagagaaagcccatccgggtcctgagcctgttcgatggcatcgccaccggtctgctggtgctgaaggacctgggcatccaggtggataggtacattgcctccgaggtgtgcgaggactccatcaccgtgggaatggtgcgtcatcagggcaagatcatgtacgtgggcgacgtgcggagcgtgacacagaagcatatccaggagtggggccctttcgacctggtgatcggcggcagcccttgcaatgacctgagcatcgtgaacccagcccggaagggcctgtacgagggaaccggcagactgttcttcgagttttacagactgctgcacgacgcccggcctaaggaaggcgacgaccggcccttcttttggctgttcgagaatgtggtggccatgggagtcagcgacaagcgggatattagccggttcctggagagcaaccccgtgatgatcgatgccaaggaagtgagcgccgcccaccgggccagatacttctggggcaatctgcctggcatgaacagacccctggccagcaccgtgaacgacaagctggagctgcaggagtgcctggagcacggccggatcgccaagttcagcaaggtgagaaccatcaccacccgaagcaacagcatcaaacaaggcaaggaccagcactttcctgtgttcatgaacgagaaggaggacatcctgtggtgtaccgagatggagagagtgttcgggttcccagtccactacacagatgtcagcaacatgtctagactggccagacagagactgctgggaagaagctggtccgtccctgtgatcagacacctgttcgcccctctgaaggagtacttcgcctgcgtgagcagcggcaacagcaacgccaacagccggggccccagcttctctagcggcctggtgccactgtccctgagagggagccacatgggccccatggagatctacaaaaccgtgagcgcctggaagcggcagcctgtgcgcgtgctgagcctgtttcggaatatcgataaagtcctgaaaagcctgggattcctggagagcggctctggctccggcggtggcaccctgaagtacgtggaggatgtgacaaacgtggtcagacgggatgtggagaagtggggccccttcgatctggtgtacggcagcacccaacccctgggcagctcttgtgaccggtgccctggctggtacatgtttcagttccaccggatcctgcagtacgccctgccgagacaggagtcccagcggccattcttttggattttcatggacaacttgctgctgaccgaggatgaccaggaaactaccactcggttcctgcagaccgaagccgtgaccctgcaggacgtgagaggccgggactaccagaacgccatgcgggtgtggtccaacatccctggactgaaaagcaagcacgcacctctgacccctaaagaagaggagtacctgcaggcccaggtgcggagcagaagcaagctggacgcccctaaggtggatctgctggtgaagaattgcctcctgcccctgagagagtacttcaagtatttcagccagaatagtctgcccctgggcggcccaagcagcggcgcccctcctcccagcggcggcagcccagccggctccccaacctctaccgaggagggcacctctgagtccgccacccccgagagcggccctggcacctccaccgagcccagcgagggcagcgcacccggcagccctgccggcagccccacctccacagaggagggaaccagcaccgagcccagcgaaggcagcgccccaggcaccagcaccgagcctagtgagggcggctctggcggcggcagcgcccaggagattaaacggatcaacaagatcagaagaagacttgtgaaagacagcaacaccaagaaggccggcaagacaggccccatgaaaaccctgctggttagagtgatgacacccgatctgagagagcggctggaaaacctgagaaagaagcctgaaaatatcccccagcccatcagcaatacatctagagccaacctgaataagctgctgaccgattacaccgaaatgaagaaggcgatcctgcatgtgtactgggaagagttccagaaggaccctgtgggcctgatgagccgggtggcccagcctgccagcaagaagatcgatcagaacaagctgaaacctgagatggacgagaagggcaacctgaccaccgccggctttgcctgctctcagtgtggccagcccctgttcgtgtacaagctggagcaggtgtctgagaagggcaaggcttacaccaactacttcggacggtgcaatgtggccgagcacgaaaagctgatcctgctggcccagctgaagcccgagaaggatagcgacgaagccgtgacatatagcctgggaaagtttgggcagagggccctggatttctacagcattcatgtgaccaaggagtccacccaccccgtgaagcccctggcccagatcgccggaaacagatacgcctccggacctgtgggaaaggccctgagcgacgcatgtatgggcacaatcgcctccttcctgtctaagtaccaggacatcatcatcgaacaccagaaggtggtgaagggcaaccagaagagactggagagcctgcgggagctggccggcaaggaaaacctggaataccctagcgtgaccctgccacctcagcctcacaccaaggagggcgttgatgcctacaacgaagtgatcgcccgggtgcgaatgtgggtgaacctgaacctgtggcagaagctgaagctaagcagagatgatgccaagcctctgctgagactgaagggattcccttcctttcctctggtcgagagacaggccaacgaagtggactggtgggacatggtgtgtaacgtgaagaagctgatcaacgagaaaaaggaggatggcaaggtgttttggcagaatctggctggctacaagagacaggaagccctgagaccatacctgagcagcgaggaagatcggaagaagggaaagaaattcgctcggtaccagctgggcgacctgctgctgcacctggaaaagaagcacggcgaggactggggaaaggtgtacgacgaggcctgggagcggattgacaagaaagtggaaggcctgagcaagcacatcaagctggaagaggaacggagaagcgaggacgcccagagcaaggccgccctgaccgactggctgcgggctaaggccagcttcgtgatcgagggcctgaaggaggccgacaaggacgagttctgcagatgcgagctgaagctgcagaagtggtacggggacctgcggggaaagcccttcgccatcgaagccgagaacagcatcctggacatcagcggcttcagcaagcagtacaactgtgccttcatctggcagaaggacggcgtgaagaagctgaacctgtacctgatcatcaactacttcaagggcggcaagctgcggttcaagaagatcaaacctgaagccttcgaagccaacagattctacaccgtgatcaacaaaaagagcggcgagatcgtgcccatggaggtgaacttcaacttcgacgaccccaacctgatcatcctgcctctggcctttggcaagagacagggcagagaattcatctggaacgacctgctgtccctggaaaccggcagcctgaagctggccaacggaagagtgatcgagaagacactgtacaacagaagaacccggcaggatgagcctgccctgttcgtggccctgaccttcgagcggcgggaggtcctggactcctccaatatcaaaccaatgaacctgatcggcgtggcaagaggcgaaaacatccccgccgtgatcgccctgaccgaccccgagggctgcccactgagccggtttaaggatagcctgggaaacccaacccacatcctgagaatcggcgagagctataaggagaagcagcggaccatccaggccaagaaggaggtggagcagcggagagccggcggctacagccggaagtacgccagcaaagccaagaatctggcagacgatatggtgagaaacaccgctagagatctgctgtactacgccgtgacccaggatgccatgctgatcttcgccaacctgagccggggcttcggccggcagggcaagcggaccttcatggccgagagacagtacacacggatggaggactggctgaccgccaagctggcctacgagggcctgagcaagacctacctgtccaagacactggcccagtacacctccaagacatgcagcaactgtgggtttaccatcaccagcgccgactacgacagggtgctggagaagctgaagaagacagcaacaggctggatgaccacaattaacggcaaggagctgaaggtggagggccagattacctactacaacagatacaagagacagaacgtagtcaaggacctgtccgtcgagctggatagactgagcgaagaatctgtgaacaacgacatctcctcctggacaaagggcagaagcggagaagctctgagcctcctgaagaaaagattctcccatagacccgtgcaggagaagttcgtgtgcctgaactgcggcttcgagacacacgcagccgagcaagccgccctgaacatcgccagatcctggctgttcctgcggagccaggagtacaagaaataccagacaaacaagacaaccggcaacaccgataagagagccttcgtcgagacctggcagtccttttaccggaagaagcttaaggaggtgtggaaacctgccgtgcggtctggcggatctggcggaggctccacaagcgaccagctgcaggaggccttcgaggacgtggccctgtacttcacccagaacgagtgggagctgctgggcgacggcgacaaggtgctgtacagggaccagatgctgaggaactaccaggccctggtgagcctgggctaccagggccccgcccccgacctgatcagcaggatccagaggcaggaggtggagctgtgggtgtgcgaggaggagaaccccggcgagagcgtgtggaccgagggcctgaccagccccaagaaaaagagaaaagtctaagctgccttctgcggggcttgccttctggccatgcccttcttctctcccttgcacctgtacctcttggtctttgaataaagcctgagtaggaaggctagcaaaaaaaaaaaaaaaaaaaaaaaaaaaaaaaaaaaaaaaaaaaaaaaaaaaaaaaaaaaaaaaaaaaaaaaaaaaaaaaa

SEQ ID NO: 7227 - RNA, 5797 nt, synthetic construct
  source 1..5797: mol_type = other RNA
aggaaataagagagaaaagaagagtaagaagaaatataagagccaccatggcccctaagaagaagcgtaaagtgagccggatggaacgcctcgtctacgaggtgcggcagaagtgcagaaacatcgaggacatctgcatctcctgcggatctctgaacgtgaccctggagcacccactgttcatcggcggcatgtgccagaactgtaaaaactgttttctggagtgtgcctatcaatacgacgatgacggctaccagagctactgcaccatctgttgcggcggaagagaggtgctgatgtgtggaaataacaactgctgccggtgcttctgcgtggaatgcgtggacctgctggtgggccccggcgccgcccaggccgctattaaggaagatccttggaactgctacatgtgcggccacaagggcacatacggcctgctgagacggagagaggactggcctagcagactgcagatgttcttcgccaataaccacgaccaggagttcgacccccctaaggtgtaccctcccgtccccgccgagaagagaaagcccatccgggtcctgagcctgttcgatggcatcgccaccggtctgctggtgctgaaggacctgggcatccaggtggataggtacattgcctccgaggtgtgcgaggactccatcaccgtgggaatggtgcgtcatcagggcaagatcatgtacgtgggcgacgtgcggagcgtgacacagaagcatatccaggagtggggccctttcgacctggtgatcggcggcagcccttgcaatgacctgagcatcgtgaacccagcccggaagggcctgtacgagggaaccggcagactgttcttcgagttttacagactgctgcacgacgcccggcctaaggaaggcgacgaccggcccttcttttggctgttcgagaatgtggtggccatgggagtcagcgacaagcgggatattagccggttcctggagagcaaccccgtgatgatcgatgccaaggaagtgagcgccgcccaccgggccagatacttctggggcaatctgcctggcatgaacagacccctggccagcaccgtgaacgacaagctggagctgcaggagtgcctggagcacggccggatcgccaagttcagcaaggtgagaaccatcaccacccgaagcaacagcatcaaacaaggcaaggaccagcactttcctgtgttcatgaacgagaaggaggacatcctgtggtgtaccgagatggagagagtgttcgggttcccagtccactacacagatgtcagcaacatgtctagactggccagacagagactgctgggaagaagctggtccgtccctgtgatcagacacctgttcgcccctctgaaggagtacttcgcctgcgtgagcagcggcaacagcaacgccaacagccggggccccagcttctctagcggcctggtgccactgtccctgagagggagccacatgggccccatggagatctacaaaaccgtgagcgcctggaagcggcagcctgtgcgcgtgctgagcctgtttcggaatatcgataaagtcctgaaaagcctgggattcctggagagcggctctggctccggcggtggcaccctgaagtacgtggaggatgtgacaaacgtggtcagacgggatgtggagaagtggggccccttcgatctggtgtacggcagcacccaacccctgggcagctcttgtgaccggtgccctggctggtacatgtttcagttccaccggatcctgcagtacgccctgccgagacaggagtcccagcggccattcttttggattttcatggacaacttgctgctgaccgaggatgaccaggaaactaccactcggttcctgcagaccgaagccgtgaccctgcaggacgtgagaggccgggactaccagaacgccatgcgggtgtggtccaacatccctggactgaaaagcaagcacgcacctctgacccctaaagaagaggagtacctgcaggcccaggtgcggagcagaagcaagctggacgcccctaaggtggatctgctggtgaagaattgcctcctgcccctgagagagtacttcaagtatttcagccagaatagtctgcccctgggcggcccaagcagcggcgcccctcctcccagcggcggcagcccagccggctccccaacctctaccgaggagggcacctctgagtccgccacccccgagagcggccctggcacctccaccgagcccagcgagggcagcgcacccggcagccctgccggcagccccacctccacagaggagggaaccagcaccgagcccagcgaaggcagcgccccaggcaccagcaccgagcctagtgagggcggctctggcggcggcagcgcccaggagattaaacggatcaacaagatcagaagaagacttgtgaaagacagcaacaccaagaaggccggcaagacaggccccatgaaaaccctgctggttagagtgatgacacccgatctgagagagcggctggaaaacctgagaaagaagcctgaaaatatcccccagcccatcagcaatacatctagagccaacctgaataagctgctgaccgattacaccgaaatgaagaaggcgatcctgcatgtgtactgggaagagttccagaaggaccctgtgggcctgatgagccgggtggcccagcctgccagcaagaagatcgatcagaacaagctgaaacctgagatggacgagaagggcaacctgaccaccgccggctttgcctgctctcagtgtggccagcccctgttcgtgtacaagctggagcaggtgtctgagaagggcaaggcttacaccaactacttcggacggtgcaatgtggccgagcacgaaaagctgatcctgctggcccagctgaagcccgagaaggatagcgacgaagccgtgacatatagcctgggaaagtttgggcagagggccctggatttctacagcattcatgtgaccaaggagtccacccaccccgtgaagcccctggcccagatcgccggaaacagatacgcctccggacctgtgggaaaggccctgagcgacgcatgtatgggcacaatcgcctccttcctgtctaagtaccaggacatcatcatcgaacaccagaaggtggtgaagggcaaccagaagagactggagagcctgcgggagctggccggcaaggaaaacctggaataccctagcgtgaccctgccacctcagcctcacaccaaggagggcgttgatgcctacaacgaagtgatcgcccgggtgcgaatgtgggtgaacctgaacctgtggcagaagctgaagctaagcagagatgatgccaagcctctgctgagactgaagggattcccttcctttcctctggtcgagagacaggccaacgaagtggactggtgggacatggtgtgtaacgtgaagaagctgatcaacgagaaaaaggaggatggcaaggtgttttggcagaatctggctggctacaagagacaggaagccctgagaccatacctgagcagcgaggaagatcggaagaagggaaagaaattcgctcggtaccagctgggcgacctgctgctgcacctggaaaagaagcacggcgaggactggggaaaggtgtacgacgaggcctgggagcggattgacaagaaagtggaaggcctgagcaagcacatcaagctggaagaggaacggagaagcgaggacgcccagagcaaggccgccctgaccgactggctgcgggctaaggccagcttcgtgatcgagggcctgaaggaggccgacaaggacgagttctgcagatgcgagctgaagctgcagaagtggtacggggacctgcggggaaagcccttcgccatcgaagccgagaacagcatcctggacatcagcggcttcagcaagcagtacaactgtgccttcatctggcagaaggacggcgtgaagaagctgaacctgtacctgatcatcaactacttcaagggcggcaagctgcggttcaagaagatcaaacctgaagccttcgaagccaacagattctacaccgtgatcaacaaaaagagcggcgagatcgtgcccatggaggtgaacttcaacttcgacgaccccaacctgatcatcctgcctctggcctttggcaagagacagggcagagaattcatctggaacgacctgctgtccctggaaaccggcagcctgaagctggccaacggaagagtgatcgagaagacactgtacaacagaagaacccggcaggatgagcctgccctgttcgtggccctgaccttcgagcggcgggaggtcctggactcctccaatatcaaaccaatgaacctgatcggcgtggcaagaggcgaaaacatccccgccgtgatcgccctgaccgaccccgagggctgcccactgagccggtttaaggatagcctgggaaacccaacccacatcctgagaatcggcgagagctataaggagaagcagcggaccatccaggccaagaaggaggtggagcagcggagagccggcggctacagccggaagtacgccagcaaagccaagaatctggcagacgatatggtgagaaacaccgctagagatctgctgtactacgccgtgacccaggatgccatgctgatcttcgccaacctgagccggggcttcggccggcagggcaagcggaccttcatggccgagagacagtacacacggatggaggactggctgaccgccaagctggcctacgagggcctgagcaagacctacctgtccaagacactggcccagtacacctccaagacatgcagcaactgtgggtttaccatcaccagcgccgactacgacagggtgctggagaagctgaagaagacagcaacaggctggatgaccacaattaacggcaaggagctgaaggtggagggccagattacctactacaacagatacaagagacagaacgtagtcaaggacctgtccgtcgagctggatagactgagcgaagaatctgtgaacaacgacatctcctcctggacaaagggcagaagcggagaagctctgagcctcctgaagaaaagattctcccatagacccgtgcaggagaagttcgtgtgcctgaactgcggcttcgagacacacgcagccgagcaagccgccctgaacatcgccagatcctggctgttcctgcggagccaggagtacaagaaataccagacaaacaagacaaccggcaacaccgataagagagccttcgtcgagacctggcagtccttttaccggaagaagcttaaggaggtgtggaaacctgccgtgcggtctggcggatctggcggaggctccacaagcgtgagggagcccctgaccttcgaggacgtggccgtgaacttcacccaggaggagtggcagcagctggaccccgcccagaagaccctgcacagggacgtgatgctggagatctacagccacctggtgagcgtgggctgcagcggcatcaagcccgacatcatcagcaagctggagcacggcgaggacccctggatcagggagagcgagctgcccaggtggacctacagcgacagggagaagagcaccagccccaagaaaaagagaaaagtctaagctgccttctgcggggcttgccttctggccatgcccttcttctctcccttgcacctgtacctcttggtctttgaataaagcctgagtaggaaggctagcaaaaaaaaaaaaaaaaaaaaaaaaaaaaaaaaaaaaaaaaaaaaaaaaaaaaaaaaaaaaaaaaaaaaaaaaaaaaaaaa

SEQ ID NO: 7228 - RNA, 5797 nt, synthetic construct
  source 1..5797: mol_type = other RNA
aggaaataagagagaaaagaagagtaagaagaaatataagagccaccatggcccctaagaagaagcgtaaagtgagccggatggaacgcctcgtctacgaggtgcggcagaagtgcagaaacatcgaggacatctgcatctcctgcggatctctgaacgtgaccctggagcacccactgttcatcggcggcatgtgccagaactgtaaaaactgttttctggagtgtgcctatcaatacgacgatgacggctaccagagctactgcaccatctgttgcggcggaagagaggtgctgatgtgtggaaataacaactgctgccggtgcttctgcgtggaatgcgtggacctgctggtgggccccggcgccgcccaggccgctattaaggaagatccttggaactgctacatgtgcggccacaagggcacatacggcctgctgagacggagagaggactggcctagcagactgcagatgttcttcgccaataaccacgaccaggagttcgacccccctaaggtgtaccctcccgtccccgccgagaagagaaagcccatccgggtcctgagcctgttcgatggcatcgccaccggtctgctggtgctgaaggacctgggcatccaggtggataggtacattgcctccgaggtgtgcgaggactccatcaccgtgggaatggtgcgtcatcagggcaagatcatgtacgtgggcgacgtgcggagcgtgacacagaagcatatccaggagtggggccctttcgacctggtgatcggcggcagcccttgcaatgacctgagcatcgtgaacccagcccggaagggcctgtacgagggaaccggcagactgttcttcgagttttacagactgctgcacgacgcccggcctaaggaaggcgacgaccggcccttcttttggctgttcgagaatgtggtggccatgggagtcagcgacaagcgggatattagccggttcctggagagcaaccccgtgatgatcgatgccaaggaagtgagcgccgcccaccgggccagatacttctggggcaatctgcctggcatgaacagacccctggccagcaccgtgaacgacaagctggagctgcaggagtgcctggagcacggccggatcgccaagttcagcaaggtgagaaccatcaccacccgaagcaacagcatcaaacaaggcaaggaccagcactttcctgtgttcatgaacgagaaggaggacatcctgtggtgtaccgagatggagagagtgttcgggttcccagtccactacacagatgtcagcaacatgtctagactggccagacagagactgctgggaagaagctggtccgtccctgtgatcagacacctgttcgcccctctgaaggagtacttcgcctgcgtgagcagcggcaacagcaacgccaacagccggggccccagcttctctagcggcctggtgccactgtccctgagagggagccacatgggccccatggagatctacaaaaccgtgagcgcctggaagcggcagcctgtgcgcgtgctgagcctgtttcggaatatcgataaagtcctgaaaagcctgggattcctggagagcggctctggctccggcggtggcaccctgaagtacgtggaggatgtgacaaacgtggtcagacgggatgtggagaagtggggccccttcgatctggtgtacggcagcacccaacccctgggcagctcttgtgaccggtgccctggctggtacatgtttcagttccaccggatcctgcagtacgccctgccgagacaggagtcccagcggccattcttttggattttcatggacaacttgctgctgaccgaggatgaccaggaaactaccactcggttcctgcagaccgaagccgtgaccctgcaggacgtgagaggccgggactaccagaacgccatgcgggtgtggtccaacatccctggactgaaaagcaagcacgcacctctgacccctaaagaagaggagtacctgcaggcccaggtgcggagcagaagcaagctggacgcccctaaggtggatctgctggtgaagaattgcctcctgcccctgagagagtacttcaagtatttcagccagaatagtctgcccctgggcggcccaagcagcggcgcccctcctcccagcggcggcagcccagccggctccccaacctctaccgaggagggcacctctgagtccgccacccccgagagcggccctggcacctccaccgagcccagcgagggcagcgcacccggcagccctgccggcagccccacctccacagaggagggaaccagcaccgagcccagcgaaggcagcgccccaggcaccagcaccgagcctagtgagggcggctctggcggcggcagcgcccaggagattaaacggatcaacaagatcagaagaagacttgtgaaagacagcaacaccaagaaggccggcaagacaggccccatgaaaaccctgctggttagagtgatgacacccgatctgagagagcggctggaaaacctgagaaagaagcctgaaaatatcccccagcccatcagcaatacatctagagccaacctgaataagctgctgaccgattacaccgaaatgaagaaggcgatcctgcatgtgtactgggaagagttccagaaggaccctgtgggcctgatgagccgggtggcccagcctgccagcaagaagatcgatcagaacaagctgaaacctgagatggacgagaagggcaacctgaccaccgccggctttgcctgctctcagtgtggccagcccctgttcgtgtacaagctggagcaggtgtctgagaagggcaaggcttacaccaactacttcggacggtgcaatgtggccgagcacgaaaagctgatcctgctggcccagctgaagcccgagaaggatagcgacgaagccgtgacatatagcctgggaaagtttgggcagagggccctggatttctacagcattcatgtgaccaaggagtccacccaccccgtgaagcccctggcccagatcgccggaaacagatacgcctccggacctgtgggaaaggccctgagcgacgcatgtatgggcacaatcgcctccttcctgtctaagtaccaggacatcatcatcgaacaccagaaggtggtgaagggcaaccagaagagactggagagcctgcgggagctggccggcaaggaaaacctggaataccctagcgtgaccctgccacctcagcctcacaccaaggagggcgttgatgcctacaacgaagtgatcgcccgggtgcgaatgtgggtgaacctgaacctgtggcagaagctgaagctaagcagagatgatgccaagcctctgctgagactgaagggattcccttcctttcctctggtcgagagacaggccaacgaagtggactggtgggacatggtgtgtaacgtgaagaagctgatcaacgagaaaaaggaggatggcaaggtgttttggcagaatctggctggctacaagagacaggaagccctgagaccatacctgagcagcgaggaagatcggaagaagggaaagaaattcgctcggtaccagctgggcgacctgctgctgcacctggaaaagaagcacggcgaggactggggaaaggtgtacgacgaggcctgggagcggattgacaagaaagtggaaggcctgagcaagcacatcaagctggaagaggaacggagaagcgaggacgcccagagcaaggccgccctgaccgactggctgcgggctaaggccagcttcgtgatcgagggcctgaaggaggccgacaaggacgagttctgcagatgcgagctgaagctgcagaagtggtacggggacctgcggggaaagcccttcgccatcgaagccgagaacagcatcctggacatcagcggcttcagcaagcagtacaactgtgccttcatctggcagaaggacggcgtgaagaagctgaacctgtacctgatcatcaactacttcaagggcggcaagctgcggttcaagaagatcaaacctgaagccttcgaagccaacagattctacaccgtgatcaacaaaaagagcggcgagatcgtgcccatggaggtgaacttcaacttcgacgaccccaacctgatcatcctgcctctggcctttggcaagagacagggcagagaattcatctggaacgacctgctgtccctggaaaccggcagcctgaagctggccaacggaagagtgatcgagaagacactgtacaacagaagaacccggcaggatgagcctgccctgttcgtggccctgaccttcgagcggcgggaggtcctggactcctccaatatcaaaccaatgaacctgatcggcgtggcaagaggcgaaaacatccccgccgtgatcgccctgaccgaccccgagggctgcccactgagccggtttaaggatagcctgggaaacccaacccacatcctgagaatcggcgagagctataaggagaagcagcggaccatccaggccaagaaggaggtggagcagcggagagccggcggctacagccggaagtacgccagcaaagccaagaatctggcagacgatatggtgagaaacaccgctagagatctgctgtactacgccgtgacccaggatgccatgctgatcttcgccaacctgagccggggcttcggccggcagggcaagcggaccttcatggccgagagacagtacacacggatggaggactggctgaccgccaagctggcctacgagggcctgagcaagacctacctgtccaagacactggcccagtacacctccaagacatgcagcaactgtgggtttaccatcaccagcgccgactacgacagggtgctggagaagctgaagaagacagcaacaggctggatgaccacaattaacggcaaggagctgaaggtggagggccagattacctactacaacagatacaagagacagaacgtagtcaaggacctgtccgtcgagctggatagactgagcgaagaatctgtgaacaacgacatctcctcctggacaaagggcagaagcggagaagctctgagcctcctgaagaaaagattctcccatagacccgtgcaggagaagttcgtgtgcctgaactgcggcttcgagacacacgcagccgagcaagccgccctgaacatcgccagatcctggctgttcctgcggagccaggagtacaagaaataccagacaaacaagacaaccggcaacaccgataagagagccttcgtcgagacctggcagtccttttaccggaagaagcttaaggaggtgtggaaacctgccgtgcggtctggcggatctggcggaggctccacaagcatgaagctgggcagcgtgaccttcgaggacgtggccgtgtacttcagctgggaggagtgggccctgctggacgaggcccagaggtgcctgtaccacgacgtgatgctggagaacttcgccctgaccagcagcctggtggtgagcagcagcagccacaccatcgcccagctgggcctgggcgaggagagcttcgtgctgcccaggatgcacatgatccccctgagcaccaggtgggcccagaggaccagccccaagaaaaagagaaaagtctaagctgccttctgcggggcttgccttctggccatgcccttcttctctcccttgcacctgtacctcttggtctttgaataaagcctgagtaggaaggctagcaaaaaaaaaaaaaaaaaaaaaaaaaaaaaaaaaaaaaaaaaaaaaaaaaaaaaaaaaaaaaaaaaaaaaaaaaaaaaaaa

SEQ ID NO: 7229 - RNA, 5797 nt, synthetic construct
  source 1..5797: mol_type = other RNA
aggaaataagagagaaaagaagagtaagaagaaatataagagccaccatggcccctaagaagaagcgtaaagtgagccggatggaacgcctcgtctacgaggtgcggcagaagtgcagaaacatcgaggacatctgcatctcctgcggatctctgaacgtgaccctggagcacccactgttcatcggcggcatgtgccagaactgtaaaaactgttttctggagtgtgcctatcaatacgacgatgacggctaccagagctactgcaccatctgttgcggcggaagagaggtgctgatgtgtggaaataacaactgctgccggtgcttctgcgtggaatgcgtggacctgctggtgggccccggcgccgcccaggccgctattaaggaagatccttggaactgctacatgtgcggccacaagggcacatacggcctgctgagacggagagaggactggcctagcagactgcagatgttcttcgccaataaccacgaccaggagttcgacccccctaaggtgtaccctcccgtccccgccgagaagagaaagcccatccgggtcctgagcctgttcgatggcatcgccaccggtctgctggtgctgaaggacctgggcatccaggtggataggtacattgcctccgaggtgtgcgaggactccatcaccgtgggaatggtgcgtcatcagggcaagatcatgtacgtgggcgacgtgcggagcgtgacacagaagcatatccaggagtggggccctttcgacctggtgatcggcggcagcccttgcaatgacctgagcatcgtgaacccagcccggaagggcctgtacgagggaaccggcagactgttcttcgagttttacagactgctgcacgacgcccggcctaaggaaggcgacgaccggcccttcttttggctgttcgagaatgtggtggccatgggagtcagcgacaagcgggatattagccggttcctggagagcaaccccgtgatgatcgatgccaaggaagtgagcgccgcccaccgggccagatacttctggggcaatctgcctggcatgaacagacccctggccagcaccgtgaacgacaagctggagctgcaggagtgcctggagcacggccggatcgccaagttcagcaaggtgagaaccatcaccacccgaagcaacagcatcaaacaaggcaaggaccagcactttcctgtgttcatgaacgagaaggaggacatcctgtggtgtaccgagatggagagagtgttcgggttcccagtccactacacagatgtcagcaacatgtctagactggccagacagagactgctgggaagaagctggtccgtccctgtgatcagacacctgttcgcccctctgaaggagtacttcgcctgcgtgagcagcggcaacagcaacgccaacagccggggccccagcttctctagcggcctggtgccactgtccctgagagggagccacatgggccccatggagatctacaaaaccgtgagcgcctggaagcggcagcctgtgcgcgtgctgagcctgtttcggaatatcgataaagtcctgaaaagcctgggattcctggagagcggctctggctccggcggtggcaccctgaagtacgtggaggatgtgacaaacgtggtcagacgggatgtggagaagtggggccccttcgatctggtgtacggcagcacccaacccctgggcagctcttgtgaccggtgccctggctggtacatgtttcagttccaccggatcctgcagtacgccctgccgagacaggagtcccagcggccattcttttggattttcatggacaacttgctgctgaccgaggatgaccaggaaactaccactcggttcctgcagaccgaagccgtgaccctgcaggacgtgagaggccgggactaccagaacgccatgcgggtgtggtccaacatccctggactgaaaagcaagcacgcacctctgacccctaaagaagaggagtacctgcaggcccaggtgcggagcagaagcaagctggacgcccctaaggtggatctgctggtgaagaattgcctcctgcccctgagagagtacttcaagtatttcagccagaatagtctgcccctgggcggcccaagcagcggcgcccctcctcccagcggcggcagcccagccggctccccaacctctaccgaggagggcacctctgagtccgccacccccgagagcggccctggcacctccaccgagcccagcgagggcagcgcacccggcagccctgccggcagccccacctccacagaggagggaaccagcaccgagcccagcgaaggcagcgccccaggcaccagcaccgagcctagtgagggcggctctggcggcggcagcgcccaggagattaaacggatcaacaagatcagaagaagacttgtgaaagacagcaacaccaagaaggccggcaagacaggccccatgaaaaccctgctggttagagtgatgacacccgatctgagagagcggctggaaaacctgagaaagaagcctgaaaatatcccccagcccatcagcaatacatctagagccaacctgaataagctgctgaccgattacaccgaaatgaagaaggcgatcctgcatgtgtactgggaagagttccagaaggaccctgtgggcctgatgagccgggtggcccagcctgccagcaagaagatcgatcagaacaagctgaaacctgagatggacgagaagggcaacctgaccaccgccggctttgcctgctctcagtgtggccagcccctgttcgtgtacaagctggagcaggtgtctgagaagggcaaggcttacaccaactacttcggacggtgcaatgtggccgagcacgaaaagctgatcctgctggcccagctgaagcccgagaaggatagcgacgaagccgtgacatatagcctgggaaagtttgggcagagggccctggatttctacagcattcatgtgaccaaggagtccacccaccccgtgaagcccctggcccagatcgccggaaacagatacgcctccggacctgtgggaaaggccctgagcgacgcatgtatgggcacaatcgcctccttcctgtctaagtaccaggacatcatcatcgaacaccagaaggtggtgaagggcaaccagaagagactggagagcctgcgggagctggccggcaaggaaaacctggaataccctagcgtgaccctgccacctcagcctcacaccaaggagggcgttgatgcctacaacgaagtgatcgcccgggtgcgaatgtgggtgaacctgaacctgtggcagaagctgaagctaagcagagatgatgccaagcctctgctgagactgaagggattcccttcctttcctctggtcgagagacaggccaacgaagtggactggtgggacatggtgtgtaacgtgaagaagctgatcaacgagaaaaaggaggatggcaaggtgttttggcagaatctggctggctacaagagacaggaagccctgagaccatacctgagcagcgaggaagatcggaagaagggaaagaaattcgctcggtaccagctgggcgacctgctgctgcacctggaaaagaagcacggcgaggactggggaaaggtgtacgacgaggcctgggagcggattgacaagaaagtggaaggcctgagcaagcacatcaagctggaagaggaacggagaagcgaggacgcccagagcaaggccgccctgaccgactggctgcgggctaaggccagcttcgtgatcgagggcctgaaggaggccgacaaggacgagttctgcagatgcgagctgaagctgcagaagtggtacggggacctgcggggaaagcccttcgccatcgaagccgagaacagcatcctggacatcagcggcttcagcaagcagtacaactgtgccttcatctggcagaaggacggcgtgaagaagctgaacctgtacctgatcatcaactacttcaagggcggcaagctgcggttcaagaagatcaaacctgaagccttcgaagccaacagattctacaccgtgatcaacaaaaagagcggcgagatcgtgcccatggaggtgaacttcaacttcgacgaccccaacctgatcatcctgcctctggcctttggcaagagacagggcagagaattcatctggaacgacctgctgtccctggaaaccggcagcctgaagctggccaacggaagagtgatcgagaagacactgtacaacagaagaacccggcaggatgagcctgccctgttcgtggccctgaccttcgagcggcgggaggtcctggactcctccaatatcaaaccaatgaacctgatcggcgtggcaagaggcgaaaacatccccgccgtgatcgccctgaccgaccccgagggctgcccactgagccggtttaaggatagcctgggaaacccaacccacatcctgagaatcggcgagagctataaggagaagcagcggaccatccaggccaagaaggaggtggagcagcggagagccggcggctacagccggaagtacgccagcaaagccaagaatctggcagacgatatggtgagaaacaccgctagagatctgctgtactacgccgtgacccaggatgccatgctgatcttcgccaacctgagccggggcttcggccggcagggcaagcggaccttcatggccgagagacagtacacacggatggaggactggctgaccgccaagctggcctacgagggcctgagcaagacctacctgtccaagacactggcccagtacacctccaagacatgcagcaactgtgggtttaccatcaccagcgccgactacgacagggtgctggagaagctgaagaagacagcaacaggctggatgaccacaattaacggcaaggagctgaaggtggagggccagattacctactacaacagatacaagagacagaacgtagtcaaggacctgtccgtcgagctggatagactgagcgaagaatctgtgaacaacgacatctcctcctggacaaagggcagaagcggagaagctctgagcctcctgaagaaaagattctcccatagacccgtgcaggagaagttcgtgtgcctgaactgcggcttcgagacacacgcagccgagcaagccgccctgaacatcgccagatcctggctgttcctgcggagccaggagtacaagaaataccagacaaacaagacaaccggcaacaccgataagagagccttcgtcgagacctggcagtccttttaccggaagaagcttaaggaggtgtggaaacctgccgtgcggtctggcggatctggcggaggctccacaagccagatgtgggtgaccttcgaggacgtggccgtgagcttcagccaggaggagtgggtgtacctggacgagggccagaaggagctgtacagggaggtgatgaaggagaactacgagaccgtgatgagcctggccggcgaggagttcagcaggggcaaggagaaggagggcagcatcgagcagcagagcctgaagaccgaggtgcacgagatgaacaagagggtgaagctgttcaagtgcagcgagaccagccccaagaaaaagagaaaagtctaagctgccttctgcggggcttgccttctggccatgcccttcttctctcccttgcacctgtacctcttggtctttgaataaagcctgagtaggaaggctagcaaaaaaaaaaaaaaaaaaaaaaaaaaaaaaaaaaaaaaaaaaaaaaaaaaaaaaaaaaaaaaaaaaaaaaaaaaaaaaaa

SEQ ID NO: 7230 - RNA, 5797 nt, synthetic construct
  source 1..5797: mol_type = other RNA
aggaaataagagagaaaagaagagtaagaagaaatataagagccaccatggcccctaagaagaagcgtaaagtgagccggatggaacgcctcgtctacgaggtgcggcagaagtgcagaaacatcgaggacatctgcatctcctgcggatctctgaacgtgaccctggagcacccactgttcatcggcggcatgtgccagaactgtaaaaactgttttctggagtgtgcctatcaatacgacgatgacggctaccagagctactgcaccatctgttgcggcggaagagaggtgctgatgtgtggaaataacaactgctgccggtgcttctgcgtggaatgcgtggacctgctggtgggccccggcgccgcccaggccgctattaaggaagatccttggaactgctacatgtgcggccacaagggcacatacggcctgctgagacggagagaggactggcctagcagactgcagatgttcttcgccaataaccacgaccaggagttcgacccccctaaggtgtaccctcccgtccccgccgagaagagaaagcccatccgggtcctgagcctgttcgatggcatcgccaccggtctgctggtgctgaaggacctgggcatccaggtggataggtacattgcctccgaggtgtgcgaggactccatcaccgtgggaatggtgcgtcatcagggcaagatcatgtacgtgggcgacgtgcggagcgtgacacagaagcatatccaggagtggggccctttcgacctggtgatcggcggcagcccttgcaatgacctgagcatcgtgaacccagcccggaagggcctgtacgagggaaccggcagactgttcttcgagttttacagactgctgcacgacgcccggcctaaggaaggcgacgaccggcccttcttttggctgttcgagaatgtggtggccatgggagtcagcgacaagcgggatattagccggttcctggagagcaaccccgtgatgatcgatgccaaggaagtgagcgccgcccaccgggccagatacttctggggcaatctgcctggcatgaacagacccctggccagcaccgtgaacgacaagctggagctgcaggagtgcctggagcacggccggatcgccaagttcagcaaggtgagaaccatcaccacccgaagcaacagcatcaaacaaggcaaggaccagcactttcctgtgttcatgaacgagaaggaggacatcctgtggtgtaccgagatggagagagtgttcgggttcccagtccactacacagatgtcagcaacatgtctagactggccagacagagactgctgggaagaagctggtccgtccctgtgatcagacacctgttcgcccctctgaaggagtacttcgcctgcgtgagcagcggcaacagcaacgccaacagccggggccccagcttctctagcggcctggtgccactgtccctgagagggagccacatgggccccatggagatctacaaaaccgtgagcgcctggaagcggcagcctgtgcgcgtgctgagcctgtttcggaatatcgataaagtcctgaaaagcctgggattcctggagagcggctctggctccggcggtggcaccctgaagtacgtggaggatgtgacaaacgtggtcagacgggatgtggagaagtggggccccttcgatctggtgtacggcagcacccaacccctgggcagctcttgtgaccggtgccctggctggtacatgtttcagttccaccggatcctgcagtacgccctgccgagacaggagtcccagcggccattcttttggattttcatggacaacttgctgctgaccgaggatgaccaggaaactaccactcggttcctgcagaccgaagccgtgaccctgcaggacgtgagaggccgggactaccagaacgccatgcgggtgtggtccaacatccctggactgaaaagcaagcacgcacctctgacccctaaagaagaggagtacctgcaggcccaggtgcggagcagaagcaagctggacgcccctaaggtggatctgctggtgaagaattgcctcctgcccctgagagagtacttcaagtatttcagccagaatagtctgcccctgggcggcccaagcagcggcgcccctcctcccagcggcggcagcccagccggctccccaacctctaccgaggagggcacctctgagtccgccacccccgagagcggccctggcacctccaccgagcccagcgagggcagcgcacccggcagccctgccggcagccccacctccacagaggagggaaccagcaccgagcccagcgaaggcagcgccccaggcaccagcaccgagcctagtgagggcggctctggcggcggcagcgcccaggagattaaacggatcaacaagatcagaagaagacttgtgaaagacagcaacaccaagaaggccggcaagacaggccccatgaaaaccctgctggttagagtgatgacacccgatctgagagagcggctggaaaacctgagaaagaagcctgaaaatatcccccagcccatcagcaatacatctagagccaacctgaataagctgctgaccgattacaccgaaatgaagaaggcgatcctgcatgtgtactgggaagagttccagaaggaccctgtgggcctgatgagccgggtggcccagcctgccagcaagaagatcgatcagaacaagctgaaacctgagatggacgagaagggcaacctgaccaccgccggctttgcctgctctcagtgtggccagcccctgttcgtgtacaagctggagcaggtgtctgagaagggcaaggcttacaccaactacttcggacggtgcaatgtggccgagcacgaaaagctgatcctgctggcccagctgaagcccgagaaggatagcgacgaagccgtgacatatagcctgggaaagtttgggcagagggccctggatttctacagcattcatgtgaccaaggagtccacccaccccgtgaagcccctggcccagatcgccggaaacagatacgcctccggacctgtgggaaaggccctgagcgacgcatgtatgggcacaatcgcctccttcctgtctaagtaccaggacatcatcatcgaacaccagaaggtggtgaagggcaaccagaagagactggagagcctgcgggagctggccggcaaggaaaacctggaataccctagcgtgaccctgccacctcagcctcacaccaaggagggcgttgatgcctacaacgaagtgatcgcccgggtgcgaatgtgggtgaacctgaacctgtggcagaagctgaagctaagcagagatgatgccaagcctctgctgagactgaagggattcccttcctttcctctggtcgagagacaggccaacgaagtggactggtgggacatggtgtgtaacgtgaagaagctgatcaacgagaaaaaggaggatggcaaggtgttttggcagaatctggctggctacaagagacaggaagccctgagaccatacctgagcagcgaggaagatcggaagaagggaaagaaattcgctcggtaccagctgggcgacctgctgctgcacctggaaaagaagcacggcgaggactggggaaaggtgtacgacgaggcctgggagcggattgacaagaaagtggaaggcctgagcaagcacatcaagctggaagaggaacggagaagcgaggacgcccagagcaaggccgccctgaccgactggctgcgggctaaggccagcttcgtgatcgagggcctgaaggaggccgacaaggacgagttctgcagatgcgagctgaagctgcagaagtggtacggggacctgcggggaaagcccttcgccatcgaagccgagaacagcatcctggacatcagcggcttcagcaagcagtacaactgtgccttcatctggcagaaggacggcgtgaagaagctgaacctgtacctgatcatcaactacttcaagggcggcaagctgcggttcaagaagatcaaacctgaagccttcgaagccaacagattctacaccgtgatcaacaaaaagagcggcgagatcgtgcccatggaggtgaacttcaacttcgacgaccccaacctgatcatcctgcctctggcctttggcaagagacagggcagagaattcatctggaacgacctgctgtccctggaaaccggcagcctgaagctggccaacggaagagtgatcgagaagacactgtacaacagaagaacccggcaggatgagcctgccctgttcgtggccctgaccttcgagcggcgggaggtcctggactcctccaatatcaaaccaatgaacctgatcggcgtggcaagaggcgaaaacatccccgccgtgatcgccctgaccgaccccgagggctgcccactgagccggtttaaggatagcctgggaaacccaacccacatcctgagaatcggcgagagctataaggagaagcagcggaccatccaggccaagaaggaggtggagcagcggagagccggcggctacagccggaagtacgccagcaaagccaagaatctggcagacgatatggtgagaaacaccgctagagatctgctgtactacgccgtgacccaggatgccatgctgatcttcgccaacctgagccggggcttcggccggcagggcaagcggaccttcatggccgagagacagtacacacggatggaggactggctgaccgccaagctggcctacgagggcctgagcaagacctacctgtccaagacactggcccagtacacctccaagacatgcagcaactgtgggtttaccatcaccagcgccgactacgacagggtgctggagaagctgaagaagacagcaacaggctggatgaccacaattaacggcaaggagctgaaggtggagggccagattacctactacaacagatacaagagacagaacgtagtcaaggacctgtccgtcgagctggatagactgagcgaagaatctgtgaacaacgacatctcctcctggacaaagggcagaagcggagaagctctgagcctcctgaagaaaagattctcccatagacccgtgcaggagaagttcgtgtgcctgaactgcggcttcgagacacacgcagccgagcaagccgccctgaacatcgccagatcctggctgttcctgcggagccaggagtacaagaaataccagacaaacaagacaaccggcaacaccgataagagagccttcgtcgagacctggcagtccttttaccggaagaagcttaaggaggtgtggaaacctgccgtgcggtctggcggatctggcggaggctccacaagcctgcaggccagcgtgaccttcgaggacgtggccgtggacttcagcgccgaggagtggaggaggctgaggcccctgcagagggagctgtacagggaggtgatgctggagaactacaggagcctggcctggctgggcctggccgccagcaagcccggcgtgatctgcaggctggagaggggcgaggcccccagggagcccgaccccgacggcccccagagcggctgggccgactgcggcaccggcaccagccccaagaaaaagagaaaagtctaagctgccttctgcggggcttgccttctggccatgcccttcttctctcccttgcacctgtacctcttggtctttgaataaagcctgagtaggaaggctagcaaaaaaaaaaaaaaaaaaaaaaaaaaaaaaaaaaaaaaaaaaaaaaaaaaaaaaaaaaaaaaaaaaaaaaaaaaaaaaaa

SEQ ID NO: 7231 - RNA, 5797 nt, synthetic construct
  source 1..5797: mol_type = other RNA
aggaaataagagagaaaagaagagtaagaagaaatataagagccaccatggcccctaagaagaagcgtaaagtgagccggatggaacgcctcgtctacgaggtgcggcagaagtgcagaaacatcgaggacatctgcatctcctgcggatctctgaacgtgaccctggagcacccactgttcatcggcggcatgtgccagaactgtaaaaactgttttctggagtgtgcctatcaatacgacgatgacggctaccagagctactgcaccatctgttgcggcggaagagaggtgctgatgtgtggaaataacaactgctgccggtgcttctgcgtggaatgcgtggacctgctggtgggccccggcgccgcccaggccgctattaaggaagatccttggaactgctacatgtgcggccacaagggcacatacggcctgctgagacggagagaggactggcctagcagactgcagatgttcttcgccaataaccacgaccaggagttcgacccccctaaggtgtaccctcccgtccccgccgagaagagaaagcccatccgggtcctgagcctgttcgatggcatcgccaccggtctgctggtgctgaaggacctgggcatccaggtggataggtacattgcctccgaggtgtgcgaggactccatcaccgtgggaatggtgcgtcatcagggcaagatcatgtacgtgggcgacgtgcggagcgtgacacagaagcatatccaggagtggggccctttcgacctggtgatcggcggcagcccttgcaatgacctgagcatcgtgaacccagcccggaagggcctgtacgagggaaccggcagactgttcttcgagttttacagactgctgcacgacgcccggcctaaggaaggcgacgaccggcccttcttttggctgttcgagaatgtggtggccatgggagtcagcgacaagcgggatattagccggttcctggagagcaaccccgtgatgatcgatgccaaggaagtgagcgccgcccaccgggccagatacttctggggcaatctgcctggcatgaacagacccctggccagcaccgtgaacgacaagctggagctgcaggagtgcctggagcacggccggatcgccaagttcagcaaggtgagaaccatcaccacccgaagcaacagcatcaaacaaggcaaggaccagcactttcctgtgttcatgaacgagaaggaggacatcctgtggtgtaccgagatggagagagtgttcgggttcccagtccactacacagatgtcagcaacatgtctagactggccagacagagactgctgggaagaagctggtccgtccctgtgatcagacacctgttcgcccctctgaaggagtacttcgcctgcgtgagcagcggcaacagcaacgccaacagccggggccccagcttctctagcggcctggtgccactgtccctgagagggagccacatgggccccatggagatctacaaaaccgtgagcgcctggaagcggcagcctgtgcgcgtgctgagcctgtttcggaatatcgataaagtcctgaaaagcctgggattcctggagagcggctctggctccggcggtggcaccctgaagtacgtggaggatgtgacaaacgtggtcagacgggatgtggagaagtggggccccttcgatctggtgtacggcagcacccaacccctgggcagctcttgtgaccggtgccctggctggtacatgtttcagttccaccggatcctgcagtacgccctgccgagacaggagtcccagcggccattcttttggattttcatggacaacttgctgctgaccgaggatgaccaggaaactaccactcggttcctgcagaccgaagccgtgaccctgcaggacgtgagaggccgggactaccagaacgccatgcgggtgtggtccaacatccctggactgaaaagcaagcacgcacctctgacccctaaagaagaggagtacctgcaggcccaggtgcggagcagaagcaagctggacgcccctaaggtggatctgctggtgaagaattgcctcctgcccctgagagagtacttcaagtatttcagccagaatagtctgcccctgggcggcccaagcagcggcgcccctcctcccagcggcggcagcccagccggctccccaacctctaccgaggagggcacctctgagtccgccacccccgagagcggccctggcacctccaccgagcccagcgagggcagcgcacccggcagccctgccggcagccccacctccacagaggagggaaccagcaccgagcccagcgaaggcagcgccccaggcaccagcaccgagcctagtgagggcggctctggcggcggcagcgcccaggagattaaacggatcaacaagatcagaagaagacttgtgaaagacagcaacaccaagaaggccggcaagacaggccccatgaaaaccctgctggttagagtgatgacacccgatctgagagagcggctggaaaacctgagaaagaagcctgaaaatatcccccagcccatcagcaatacatctagagccaacctgaataagctgctgaccgattacaccgaaatgaagaaggcgatcctgcatgtgtactgggaagagttccagaaggaccctgtgggcctgatgagccgggtggcccagcctgccagcaagaagatcgatcagaacaagctgaaacctgagatggacgagaagggcaacctgaccaccgccggctttgcctgctctcagtgtggccagcccctgttcgtgtacaagctggagcaggtgtctgagaagggcaaggcttacaccaactacttcggacggtgcaatgtggccgagcacgaaaagctgatcctgctggcccagctgaagcccgagaaggatagcgacgaagccgtgacatatagcctgggaaagtttgggcagagggccctggatttctacagcattcatgtgaccaaggagtccacccaccccgtgaagcccctggcccagatcgccggaaacagatacgcctccggacctgtgggaaaggccctgagcgacgcatgtatgggcacaatcgcctccttcctgtctaagtaccaggacatcatcatcgaacaccagaaggtggtgaagggcaaccagaagagactggagagcctgcgggagctggccggcaaggaaaacctggaataccctagcgtgaccctgccacctcagcctcacaccaaggagggcgttgatgcctacaacgaagtgatcgcccgggtgcgaatgtgggtgaacctgaacctgtggcagaagctgaagctaagcagagatgatgccaagcctctgctgagactgaagggattcccttcctttcctctggtcgagagacaggccaacgaagtggactggtgggacatggtgtgtaacgtgaagaagctgatcaacgagaaaaaggaggatggcaaggtgttttggcagaatctggctggctacaagagacaggaagccctgagaccatacctgagcagcgaggaagatcggaagaagggaaagaaattcgctcggtaccagctgggcgacctgctgctgcacctggaaaagaagcacggcgaggactggggaaaggtgtacgacgaggcctgggagcggattgacaagaaagtggaaggcctgagcaagcacatcaagctggaagaggaacggagaagcgaggacgcccagagcaaggccgccctgaccgactggctgcgggctaaggccagcttcgtgatcgagggcctgaaggaggccgacaaggacgagttctgcagatgcgagctgaagctgcagaagtggtacggggacctgcggggaaagcccttcgccatcgaagccgagaacagcatcctggacatcagcggcttcagcaagcagtacaactgtgccttcatctggcagaaggacggcgtgaagaagctgaacctgtacctgatcatcaactacttcaagggcggcaagctgcggttcaagaagatcaaacctgaagccttcgaagccaacagattctacaccgtgatcaacaaaaagagcggcgagatcgtgcccatggaggtgaacttcaacttcgacgaccccaacctgatcatcctgcctctggcctttggcaagagacagggcagagaattcatctggaacgacctgctgtccctggaaaccggcagcctgaagctggccaacggaagagtgatcgagaagacactgtacaacagaagaacccggcaggatgagcctgccctgttcgtggccctgaccttcgagcggcgggaggtcctggactcctccaatatcaaaccaatgaacctgatcggcgtggcaagaggcgaaaacatccccgccgtgatcgccctgaccgaccccgagggctgcccactgagccggtttaaggatagcctgggaaacccaacccacatcctgagaatcggcgagagctataaggagaagcagcggaccatccaggccaagaaggaggtggagcagcggagagccggcggctacagccggaagtacgccagcaaagccaagaatctggcagacgatatggtgagaaacaccgctagagatctgctgtactacgccgtgacccaggatgccatgctgatcttcgccaacctgagccggggcttcggccggcagggcaagcggaccttcatggccgagagacagtacacacggatggaggactggctgaccgccaagctggcctacgagggcctgagcaagacctacctgtccaagacactggcccagtacacctccaagacatgcagcaactgtgggtttaccatcaccagcgccgactacgacagggtgctggagaagctgaagaagacagcaacaggctggatgaccacaattaacggcaaggagctgaaggtggagggccagattacctactacaacagatacaagagacagaacgtagtcaaggacctgtccgtcgagctggatagactgagcgaagaatctgtgaacaacgacatctcctcctggacaaagggcagaagcggagaagctctgagcctcctgaagaaaagattctcccatagacccgtgcaggagaagttcgtgtgcctgaactgcggcttcgagacacacgcagccgagcaagccgccctgaacatcgccagatcctggctgttcctgcggagccaggagtacaagaaataccagacaaacaagacaaccggcaacaccgataagagagccttcgtcgagacctggcagtccttttaccggaagaagcttaaggaggtgtggaaacctgccgtgcggtctggcggatctggcggaggctccacaagcagccagggcctggtgaccttcggcgacgtggccgtggtgttcagccaggaggagtgggagtggctgagcagcgagcagaggagcctgtactggaaggtgatgctggacaactacaggaacctggccagcctgggcctgtgcgccagcaagcccgacatgatcaccagcctggagcagggcagggacccctggatgatgaagaggaagatgaggaagggccagaggctggacctgaaggccatgaccagccccaagaaaaagagaaaagtctaagctgccttctgcggggcttgccttctggccatgcccttcttctctcccttgcacctgtacctcttggtctttgaataaagcctgagtaggaaggctagcaaaaaaaaaaaaaaaaaaaaaaaaaaaaaaaaaaaaaaaaaaaaaaaaaaaaaaaaaaaaaaaaaaaaaaaaaaaaaaaa

SEQ ID NO: 7232 - RNA, 5797 nt, synthetic construct
  source 1..5797: mol_type = other RNA
aggaaataagagagaaaagaagagtaagaagaaatataagagccaccatggcccctaagaagaagcgtaaagtgagccggatggaacgcctcgtctacgaggtgcggcagaagtgcagaaacatcgaggacatctgcatctcctgcggatctctgaacgtgaccctggagcacccactgttcatcggcggcatgtgccagaactgtaaaaactgttttctggagtgtgcctatcaatacgacgatgacggctaccagagctactgcaccatctgttgcggcggaagagaggtgctgatgtgtggaaataacaactgctgccggtgcttctgcgtggaatgcgtggacctgctggtgggccccggcgccgcccaggccgctattaaggaagatccttggaactgctacatgtgcggccacaagggcacatacggcctgctgagacggagagaggactggcctagcagactgcagatgttcttcgccaataaccacgaccaggagttcgacccccctaaggtgtaccctcccgtccccgccgagaagagaaagcccatccgggtcctgagcctgttcgatggcatcgccaccggtctgctggtgctgaaggacctgggcatccaggtggataggtacattgcctccgaggtgtgcgaggactccatcaccgtgggaatggtgcgtcatcagggcaagatcatgtacgtgggcgacgtgcggagcgtgacacagaagcatatccaggagtggggccctttcgacctggtgatcggcggcagcccttgcaatgacctgagcatcgtgaacccagcccggaagggcctgtacgagggaaccggcagactgttcttcgagttttacagactgctgcacgacgcccggcctaaggaaggcgacgaccggcccttcttttggctgttcgagaatgtggtggccatgggagtcagcgacaagcgggatattagccggttcctggagagcaaccccgtgatgatcgatgccaaggaagtgagcgccgcccaccgggccagatacttctggggcaatctgcctggcatgaacagacccctggccagcaccgtgaacgacaagctggagctgcaggagtgcctggagcacggccggatcgccaagttcagcaaggtgagaaccatcaccacccgaagcaacagcatcaaacaaggcaaggaccagcactttcctgtgttcatgaacgagaaggaggacatcctgtggtgtaccgagatggagagagtgttcgggttcccagtccactacacagatgtcagcaacatgtctagactggccagacagagactgctgggaagaagctggtccgtccctgtgatcagacacctgttcgcccctctgaaggagtacttcgcctgcgtgagcagcggcaacagcaacgccaacagccggggccccagcttctctagcggcctggtgccactgtccctgagagggagccacatgggccccatggagatctacaaaaccgtgagcgcctggaagcggcagcctgtgcgcgtgctgagcctgtttcggaatatcgataaagtcctgaaaagcctgggattcctggagagcggctctggctccggcggtggcaccctgaagtacgtggaggatgtgacaaacgtggtcagacgggatgtggagaagtggggccccttcgatctggtgtacggcagcacccaacccctgggcagctcttgtgaccggtgccctggctggtacatgtttcagttccaccggatcctgcagtacgccctgccgagacaggagtcccagcggccattcttttggattttcatggacaacttgctgctgaccgaggatgaccaggaaactaccactcggttcctgcagaccgaagccgtgaccctgcaggacgtgagaggccgggactaccagaacgccatgcgggtgtggtccaacatccctggactgaaaagcaagcacgcacctctgacccctaaagaagaggagtacctgcaggcccaggtgcggagcagaagcaagctggacgcccctaaggtggatctgctggtgaagaattgcctcctgcccctgagagagtacttcaagtatttcagccagaatagtctgcccctgggcggcccaagcagcggcgcccctcctcccagcggcggcagcccagccggctccccaacctctaccgaggagggcacctctgagtccgccacccccgagagcggccctggcacctccaccgagcccagcgagggcagcgcacccggcagccctgccggcagccccacctccacagaggagggaaccagcaccgagcccagcgaaggcagcgccccaggcaccagcaccgagcctagtgagggcggctctggcggcggcagcgcccaggagattaaacggatcaacaagatcagaagaagacttgtgaaagacagcaacaccaagaaggccggcaagacaggccccatgaaaaccctgctggttagagtgatgacacccgatctgagagagcggctggaaaacctgagaaagaagcctgaaaatatcccccagcccatcagcaatacatctagagccaacctgaataagctgctgaccgattacaccgaaatgaagaaggcgatcctgcatgtgtactgggaagagttccagaaggaccctgtgggcctgatgagccgggtggcccagcctgccagcaagaagatcgatcagaacaagctgaaacctgagatggacgagaagggcaacctgaccaccgccggctttgcctgctctcagtgtggccagcccctgttcgtgtacaagctggagcaggtgtctgagaagggcaaggcttacaccaactacttcggacggtgcaatgtggccgagcacgaaaagctgatcctgctggcccagctgaagcccgagaaggatagcgacgaagccgtgacatatagcctgggaaagtttgggcagagggccctggatttctacagcattcatgtgaccaaggagtccacccaccccgtgaagcccctggcccagatcgccggaaacagatacgcctccggacctgtgggaaaggccctgagcgacgcatgtatgggcacaatcgcctccttcctgtctaagtaccaggacatcatcatcgaacaccagaaggtggtgaagggcaaccagaagagactggagagcctgcgggagctggccggcaaggaaaacctggaataccctagcgtgaccctgccacctcagcctcacaccaaggagggcgttgatgcctacaacgaagtgatcgcccgggtgcgaatgtgggtgaacctgaacctgtggcagaagctgaagctaagcagagatgatgccaagcctctgctgagactgaagggattcccttcctttcctctggtcgagagacaggccaacgaagtggactggtgggacatggtgtgtaacgtgaagaagctgatcaacgagaaaaaggaggatggcaaggtgttttggcagaatctggctggctacaagagacaggaagccctgagaccatacctgagcagcgaggaagatcggaagaagggaaagaaattcgctcggtaccagctgggcgacctgctgctgcacctggaaaagaagcacggcgaggactggggaaaggtgtacgacgaggcctgggagcggattgacaagaaagtggaaggcctgagcaagcacatcaagctggaagaggaacggagaagcgaggacgcccagagcaaggccgccctgaccgactggctgcgggctaaggccagcttcgtgatcgagggcctgaaggaggccgacaaggacgagttctgcagatgcgagctgaagctgcagaagtggtacggggacctgcggggaaagcccttcgccatcgaagccgagaacagcatcctggacatcagcggcttcagcaagcagtacaactgtgccttcatctggcagaaggacggcgtgaagaagctgaacctgtacctgatcatcaactacttcaagggcggcaagctgcggttcaagaagatcaaacctgaagccttcgaagccaacagattctacaccgtgatcaacaaaaagagcggcgagatcgtgcccatggaggtgaacttcaacttcgacgaccccaacctgatcatcctgcctctggcctttggcaagagacagggcagagaattcatctggaacgacctgctgtccctggaaaccggcagcctgaagctggccaacggaagagtgatcgagaagacactgtacaacagaagaacccggcaggatgagcctgccctgttcgtggccctgaccttcgagcggcgggaggtcctggactcctccaatatcaaaccaatgaacctgatcggcgtggcaagaggcgaaaacatccccgccgtgatcgccctgaccgaccccgagggctgcccactgagccggtttaaggatagcctgggaaacccaacccacatcctgagaatcggcgagagctataaggagaagcagcggaccatccaggccaagaaggaggtggagcagcggagagccggcggctacagccggaagtacgccagcaaagccaagaatctggcagacgatatggtgagaaacaccgctagagatctgctgtactacgccgtgacccaggatgccatgctgatcttcgccaacctgagccggggcttcggccggcagggcaagcggaccttcatggccgagagacagtacacacggatggaggactggctgaccgccaagctggcctacgagggcctgagcaagacctacctgtccaagacactggcccagtacacctccaagacatgcagcaactgtgggtttaccatcaccagcgccgactacgacagggtgctggagaagctgaagaagacagcaacaggctggatgaccacaattaacggcaaggagctgaaggtggagggccagattacctactacaacagatacaagagacagaacgtagtcaaggacctgtccgtcgagctggatagactgagcgaagaatctgtgaacaacgacatctcctcctggacaaagggcagaagcggagaagctctgagcctcctgaagaaaagattctcccatagacccgtgcaggagaagttcgtgtgcctgaactgcggcttcgagacacacgcagccgagcaagccgccctgaacatcgccagatcctggctgttcctgcggagccaggagtacaagaaataccagacaaacaagacaaccggcaacaccgataagagagccttcgtcgagacctggcagtccttttaccggaagaagcttaaggaggtgtggaaacctgccgtgcggtctggcggatctggcggaggctccacaagcaggcccgagctggtgaccttcgaggacgtggccgtgtacttcagcgagaacgagtggaccagcctggcccccacccagagggtgctgtacagggacgtgatgctggagaactacggcgccgtggccagcctggccgtgcccttccccaagcccgccctgatcagccagctggagaggggcgaggccccctggtgcaaggccccccagggcgccctggacggcgagggccccaggggcatcagcaccagccccaagaaaaagagaaaagtctaagctgccttctgcggggcttgccttctggccatgcccttcttctctcccttgcacctgtacctcttggtctttgaataaagcctgagtaggaaggctagcaaaaaaaaaaaaaaaaaaaaaaaaaaaaaaaaaaaaaaaaaaaaaaaaaaaaaaaaaaaaaaaaaaaaaaaaaaaaaaaa

SEQ ID NO: 7233 - RNA, 5797 nt, synthetic construct
  source 1..5797: mol_type = other RNA
aggaaataagagagaaaagaagagtaagaagaaatataagagccaccatggcccctaagaagaagcgtaaagtgagccggatggaacgcctcgtctacgaggtgcggcagaagtgcagaaacatcgaggacatctgcatctcctgcggatctctgaacgtgaccctggagcacccactgttcatcggcggcatgtgccagaactgtaaaaactgttttctggagtgtgcctatcaatacgacgatgacggctaccagagctactgcaccatctgttgcggcggaagagaggtgctgatgtgtggaaataacaactgctgccggtgcttctgcgtggaatgcgtggacctgctggtgggccccggcgccgcccaggccgctattaaggaagatccttggaactgctacatgtgcggccacaagggcacatacggcctgctgagacggagagaggactggcctagcagactgcagatgttcttcgccaataaccacgaccaggagttcgacccccctaaggtgtaccctcccgtccccgccgagaagagaaagcccatccgggtcctgagcctgttcgatggcatcgccaccggtctgctggtgctgaaggacctgggcatccaggtggataggtacattgcctccgaggtgtgcgaggactccatcaccgtgggaatggtgcgtcatcagggcaagatcatgtacgtgggcgacgtgcggagcgtgacacagaagcatatccaggagtggggccctttcgacctggtgatcggcggcagcccttgcaatgacctgagcatcgtgaacccagcccggaagggcctgtacgagggaaccggcagactgttcttcgagttttacagactgctgcacgacgcccggcctaaggaaggcgacgaccggcccttcttttggctgttcgagaatgtggtggccatgggagtcagcgacaagcgggatattagccggttcctggagagcaaccccgtgatgatcgatgccaaggaagtgagcgccgcccaccgggccagatacttctggggcaatctgcctggcatgaacagacccctggccagcaccgtgaacgacaagctggagctgcaggagtgcctggagcacggccggatcgccaagttcagcaaggtgagaaccatcaccacccgaagcaacagcatcaaacaaggcaaggaccagcactttcctgtgttcatgaacgagaaggaggacatcctgtggtgtaccgagatggagagagtgttcgggttcccagtccactacacagatgtcagcaacatgtctagactggccagacagagactgctgggaagaagctggtccgtccctgtgatcagacacctgttcgcccctctgaaggagtacttcgcctgcgtgagcagcggcaacagcaacgccaacagccggggccccagcttctctagcggcctggtgccactgtccctgagagggagccacatgggccccatggagatctacaaaaccgtgagcgcctggaagcggcagcctgtgcgcgtgctgagcctgtttcggaatatcgataaagtcctgaaaagcctgggattcctggagagcggctctggctccggcggtggcaccctgaagtacgtggaggatgtgacaaacgtggtcagacgggatgtggagaagtggggccccttcgatctggtgtacggcagcacccaacccctgggcagctcttgtgaccggtgccctggctggtacatgtttcagttccaccggatcctgcagtacgccctgccgagacaggagtcccagcggccattcttttggattttcatggacaacttgctgctgaccgaggatgaccaggaaactaccactcggttcctgcagaccgaagccgtgaccctgcaggacgtgagaggccgggactaccagaacgccatgcgggtgtggtccaacatccctggactgaaaagcaagcacgcacctctgacccctaaagaagaggagtacctgcaggcccaggtgcggagcagaagcaagctggacgcccctaaggtggatctgctggtgaagaattgcctcctgcccctgagagagtacttcaagtatttcagccagaatagtctgcccctgggcggcccaagcagcggcgcccctcctcccagcggcggcagcccagccggctccccaacctctaccgaggagggcacctctgagtccgccacccccgagagcggccctggcacctccaccgagcccagcgagggcagcgcacccggcagccctgccggcagccccacctccacagaggagggaaccagcaccgagcccagcgaaggcagcgccccaggcaccagcaccgagcctagtgagggcggctctggcggcggcagcgcccaggagattaaacggatcaacaagatcagaagaagacttgtgaaagacagcaacaccaagaaggccggcaagacaggccccatgaaaaccctgctggttagagtgatgacacccgatctgagagagcggctggaaaacctgagaaagaagcctgaaaatatcccccagcccatcagcaatacatctagagccaacctgaataagctgctgaccgattacaccgaaatgaagaaggcgatcctgcatgtgtactgggaagagttccagaaggaccctgtgggcctgatgagccgggtggcccagcctgccagcaagaagatcgatcagaacaagctgaaacctgagatggacgagaagggcaacctgaccaccgccggctttgcctgctctcagtgtggccagcccctgttcgtgtacaagctggagcaggtgtctgagaagggcaaggcttacaccaactacttcggacggtgcaatgtggccgagcacgaaaagctgatcctgctggcccagctgaagcccgagaaggatagcgacgaagccgtgacatatagcctgggaaagtttgggcagagggccctggatttctacagcattcatgtgaccaaggagtccacccaccccgtgaagcccctggcccagatcgccggaaacagatacgcctccggacctgtgggaaaggccctgagcgacgcatgtatgggcacaatcgcctccttcctgtctaagtaccaggacatcatcatcgaacaccagaaggtggtgaagggcaaccagaagagactggagagcctgcgggagctggccggcaaggaaaacctggaataccctagcgtgaccctgccacctcagcctcacaccaaggagggcgttgatgcctacaacgaagtgatcgcccgggtgcgaatgtgggtgaacctgaacctgtggcagaagctgaagctaagcagagatgatgccaagcctctgctgagactgaagggattcccttcctttcctctggtcgagagacaggccaacgaagtggactggtgggacatggtgtgtaacgtgaagaagctgatcaacgagaaaaaggaggatggcaaggtgttttggcagaatctggctggctacaagagacaggaagccctgagaccatacctgagcagcgaggaagatcggaagaagggaaagaaattcgctcggtaccagctgggcgacctgctgctgcacctggaaaagaagcacggcgaggactggggaaaggtgtacgacgaggcctgggagcggattgacaagaaagtggaaggcctgagcaagcacatcaagctggaagaggaacggagaagcgaggacgcccagagcaaggccgccctgaccgactggctgcgggctaaggccagcttcgtgatcgagggcctgaaggaggccgacaaggacgagttctgcagatgcgagctgaagctgcagaagtggtacggggacctgcggggaaagcccttcgccatcgaagccgagaacagcatcctggacatcagcggcttcagcaagcagtacaactgtgccttcatctggcagaaggacggcgtgaagaagctgaacctgtacctgatcatcaactacttcaagggcggcaagctgcggttcaagaagatcaaacctgaagccttcgaagccaacagattctacaccgtgatcaacaaaaagagcggcgagatcgtgcccatggaggtgaacttcaacttcgacgaccccaacctgatcatcctgcctctggcctttggcaagagacagggcagagaattcatctggaacgacctgctgtccctggaaaccggcagcctgaagctggccaacggaagagtgatcgagaagacactgtacaacagaagaacccggcaggatgagcctgccctgttcgtggccctgaccttcgagcggcgggaggtcctggactcctccaatatcaaaccaatgaacctgatcggcgtggcaagaggcgaaaacatccccgccgtgatcgccctgaccgaccccgagggctgcccactgagccggtttaaggatagcctgggaaacccaacccacatcctgagaatcggcgagagctataaggagaagcagcggaccatccaggccaagaaggaggtggagcagcggagagccggcggctacagccggaagtacgccagcaaagccaagaatctggcagacgatatggtgagaaacaccgctagagatctgctgtactacgccgtgacccaggatgccatgctgatcttcgccaacctgagccggggcttcggccggcagggcaagcggaccttcatggccgagagacagtacacacggatggaggactggctgaccgccaagctggcctacgagggcctgagcaagacctacctgtccaagacactggcccagtacacctccaagacatgcagcaactgtgggtttaccatcaccagcgccgactacgacagggtgctggagaagctgaagaagacagcaacaggctggatgaccacaattaacggcaaggagctgaaggtggagggccagattacctactacaacagatacaagagacagaacgtagtcaaggacctgtccgtcgagctggatagactgagcgaagaatctgtgaacaacgacatctcctcctggacaaagggcagaagcggagaagctctgagcctcctgaagaaaagattctcccatagacccgtgcaggagaagttcgtgtgcctgaactgcggcttcgagacacacgcagccgagcaagccgccctgaacatcgccagatcctggctgttcctgcggagccaggagtacaagaaataccagacaaacaagacaaccggcaacaccgataagagagccttcgtcgagacctggcagtccttttaccggaagaagcttaaggaggtgtggaaacctgccgtgcggtctggcggatctggcggaggctccacaagcttccagggcagcgtgaccttcgaggacgtggccatcgccttcagccagcaggagtgggagagcctggacagcagccagaggggcctgtacagggacgtgatgctggagaactacaggaacctggtgagcatggccggccacagcctgagcaagccccacgtgatcgccctgctggagaggtggaaggagcccaaggtgaccgagaggaaggacggcaggaggtggtgcaccgacctgcagctgaccagccccaagaaaaagagaaaagtctaagctgccttctgcggggcttgccttctggccatgcccttcttctctcccttgcacctgtacctcttggtctttgaataaagcctgagtaggaaggctagcaaaaaaaaaaaaaaaaaaaaaaaaaaaaaaaaaaaaaaaaaaaaaaaaaaaaaaaaaaaaaaaaaaaaaaaaaaaaaaaa

SEQ ID NO: 7234 - RNA, 5797 nt, synthetic construct
  source 1..5797: mol_type = other RNA
aggaaataagagagaaaagaagagtaagaagaaatataagagccaccatggcccctaagaagaagcgtaaagtgagccggatggaacgcctcgtctacgaggtgcggcagaagtgcagaaacatcgaggacatctgcatctcctgcggatctctgaacgtgaccctggagcacccactgttcatcggcggcatgtgccagaactgtaaaaactgttttctggagtgtgcctatcaatacgacgatgacggctaccagagctactgcaccatctgttgcggcggaagagaggtgctgatgtgtggaaataacaactgctgccggtgcttctgcgtggaatgcgtggacctgctggtgggccccggcgccgcccaggccgctattaaggaagatccttggaactgctacatgtgcggccacaagggcacatacggcctgctgagacggagagaggactggcctagcagactgcagatgttcttcgccaataaccacgaccaggagttcgacccccctaaggtgtaccctcccgtccccgccgagaagagaaagcccatccgggtcctgagcctgttcgatggcatcgccaccggtctgctggtgctgaaggacctgggcatccaggtggataggtacattgcctccgaggtgtgcgaggactccatcaccgtgggaatggtgcgtcatcagggcaagatcatgtacgtgggcgacgtgcggagcgtgacacagaagcatatccaggagtggggccctttcgacctggtgatcggcggcagcccttgcaatgacctgagcatcgtgaacccagcccggaagggcctgtacgagggaaccggcagactgttcttcgagttttacagactgctgcacgacgcccggcctaaggaaggcgacgaccggcccttcttttggctgttcgagaatgtggtggccatgggagtcagcgacaagcgggatattagccggttcctggagagcaaccccgtgatgatcgatgccaaggaagtgagcgccgcccaccgggccagatacttctggggcaatctgcctggcatgaacagacccctggccagcaccgtgaacgacaagctggagctgcaggagtgcctggagcacggccggatcgccaagttcagcaaggtgagaaccatcaccacccgaagcaacagcatcaaacaaggcaaggaccagcactttcctgtgttcatgaacgagaaggaggacatcctgtggtgtaccgagatggagagagtgttcgggttcccagtccactacacagatgtcagcaacatgtctagactggccagacagagactgctgggaagaagctggtccgtccctgtgatcagacacctgttcgcccctctgaaggagtacttcgcctgcgtgagcagcggcaacagcaacgccaacagccggggccccagcttctctagcggcctggtgccactgtccctgagagggagccacatgggccccatggagatctacaaaaccgtgagcgcctggaagcggcagcctgtgcgcgtgctgagcctgtttcggaatatcgataaagtcctgaaaagcctgggattcctggagagcggctctggctccggcggtggcaccctgaagtacgtggaggatgtgacaaacgtggtcagacgggatgtggagaagtggggccccttcgatctggtgtacggcagcacccaacccctgggcagctcttgtgaccggtgccctggctggtacatgtttcagttccaccggatcctgcagtacgccctgccgagacaggagtcccagcggccattcttttggattttcatggacaacttgctgctgaccgaggatgaccaggaaactaccactcggttcctgcagaccgaagccgtgaccctgcaggacgtgagaggccgggactaccagaacgccatgcgggtgtggtccaacatccctggactgaaaagcaagcacgcacctctgacccctaaagaagaggagtacctgcaggcccaggtgcggagcagaagcaagctggacgcccctaaggtggatctgctggtgaagaattgcctcctgcccctgagagagtacttcaagtatttcagccagaatagtctgcccctgggcggcccaagcagcggcgcccctcctcccagcggcggcagcccagccggctccccaacctctaccgaggagggcacctctgagtccgccacccccgagagcggccctggcacctccaccgagcccagcgagggcagcgcacccggcagccctgccggcagccccacctccacagaggagggaaccagcaccgagcccagcgaaggcagcgccccaggcaccagcaccgagcctagtgagggcggctctggcggcggcagcgcccaggagattaaacggatcaacaagatcagaagaagacttgtgaaagacagcaacaccaagaaggccggcaagacaggccccatgaaaaccctgctggttagagtgatgacacccgatctgagagagcggctggaaaacctgagaaagaagcctgaaaatatcccccagcccatcagcaatacatctagagccaacctgaataagctgctgaccgattacaccgaaatgaagaaggcgatcctgcatgtgtactgggaagagttccagaaggaccctgtgggcctgatgagccgggtggcccagcctgccagcaagaagatcgatcagaacaagctgaaacctgagatggacgagaagggcaacctgaccaccgccggctttgcctgctctcagtgtggccagcccctgttcgtgtacaagctggagcaggtgtctgagaagggcaaggcttacaccaactacttcggacggtgcaatgtggccgagcacgaaaagctgatcctgctggcccagctgaagcccgagaaggatagcgacgaagccgtgacatatagcctgggaaagtttgggcagagggccctggatttctacagcattcatgtgaccaaggagtccacccaccccgtgaagcccctggcccagatcgccggaaacagatacgcctccggacctgtgggaaaggccctgagcgacgcatgtatgggcacaatcgcctccttcctgtctaagtaccaggacatcatcatcgaacaccagaaggtggtgaagggcaaccagaagagactggagagcctgcgggagctggccggcaaggaaaacctggaataccctagcgtgaccctgccacctcagcctcacaccaaggagggcgttgatgcctacaacgaagtgatcgcccgggtgcgaatgtgggtgaacctgaacctgtggcagaagctgaagctaagcagagatgatgccaagcctctgctgagactgaagggattcccttcctttcctctggtcgagagacaggccaacgaagtggactggtgggacatggtgtgtaacgtgaagaagctgatcaacgagaaaaaggaggatggcaaggtgttttggcagaatctggctggctacaagagacaggaagccctgagaccatacctgagcagcgaggaagatcggaagaagggaaagaaattcgctcggtaccagctgggcgacctgctgctgcacctggaaaagaagcacggcgaggactggggaaaggtgtacgacgaggcctgggagcggattgacaagaaagtggaaggcctgagcaagcacatcaagctggaagaggaacggagaagcgaggacgcccagagcaaggccgccctgaccgactggctgcgggctaaggccagcttcgtgatcgagggcctgaaggaggccgacaaggacgagttctgcagatgcgagctgaagctgcagaagtggtacggggacctgcggggaaagcccttcgccatcgaagccgagaacagcatcctggacatcagcggcttcagcaagcagtacaactgtgccttcatctggcagaaggacggcgtgaagaagctgaacctgtacctgatcatcaactacttcaagggcggcaagctgcggttcaagaagatcaaacctgaagccttcgaagccaacagattctacaccgtgatcaacaaaaagagcggcgagatcgtgcccatggaggtgaacttcaacttcgacgaccccaacctgatcatcctgcctctggcctttggcaagagacagggcagagaattcatctggaacgacctgctgtccctggaaaccggcagcctgaagctggccaacggaagagtgatcgagaagacactgtacaacagaagaacccggcaggatgagcctgccctgttcgtggccctgaccttcgagcggcgggaggtcctggactcctccaatatcaaaccaatgaacctgatcggcgtggcaagaggcgaaaacatccccgccgtgatcgccctgaccgaccccgagggctgcccactgagccggtttaaggatagcctgggaaacccaacccacatcctgagaatcggcgagagctataaggagaagcagcggaccatccaggccaagaaggaggtggagcagcggagagccggcggctacagccggaagtacgccagcaaagccaagaatctggcagacgatatggtgagaaacaccgctagagatctgctgtactacgccgtgacccaggatgccatgctgatcttcgccaacctgagccggggcttcggccggcagggcaagcggaccttcatggccgagagacagtacacacggatggaggactggctgaccgccaagctggcctacgagggcctgagcaagacctacctgtccaagacactggcccagtacacctccaagacatgcagcaactgtgggtttaccatcaccagcgccgactacgacagggtgctggagaagctgaagaagacagcaacaggctggatgaccacaattaacggcaaggagctgaaggtggagggccagattacctactacaacagatacaagagacagaacgtagtcaaggacctgtccgtcgagctggatagactgagcgaagaatctgtgaacaacgacatctcctcctggacaaagggcagaagcggagaagctctgagcctcctgaagaaaagattctcccatagacccgtgcaggagaagttcgtgtgcctgaactgcggcttcgagacacacgcagccgagcaagccgccctgaacatcgccagatcctggctgttcctgcggagccaggagtacaagaaataccagacaaacaagacaaccggcaacaccgataagagagccttcgtcgagacctggcagtccttttaccggaagaagcttaaggaggtgtggaaacctgccgtgcggtctggcggatctggcggaggctccacaagcagcctggagagcgacgtgttcaccgacgtggccatcgtgttcagccaggaggagtgggagcagctggcccccgcccagagggacctgtacagggacgtgatgctggagacctacagcaacctggtgagcctgggcctggccatcgccaagcccgacgtgatcagcttcctggaggagggcaaggagccctgggtggtggagaagaccagcaggggcggcctgtgccccgtgctggagagcaggaccagccccaagaaaaagagaaaagtctaagctgccttctgcggggcttgccttctggccatgcccttcttctctcccttgcacctgtacctcttggtctttgaataaagcctgagtaggaaggctagcaaaaaaaaaaaaaaaaaaaaaaaaaaaaaaaaaaaaaaaaaaaaaaaaaaaaaaaaaaaaaaaaaaaaaaaaaaaaaaaa

SEQ ID NO: 7235 - RNA, 5797 nt, synthetic construct
  source 1..5797: mol_type = other RNA
aggaaataagagagaaaagaagagtaagaagaaatataagagccaccatggcccctaagaagaagcgtaaagtgagccggatggaacgcctcgtctacgaggtgcggcagaagtgcagaaacatcgaggacatctgcatctcctgcggatctctgaacgtgaccctggagcacccactgttcatcggcggcatgtgccagaactgtaaaaactgttttctggagtgtgcctatcaatacgacgatgacggctaccagagctactgcaccatctgttgcggcggaagagaggtgctgatgtgtggaaataacaactgctgccggtgcttctgcgtggaatgcgtggacctgctggtgggccccggcgccgcccaggccgctattaaggaagatccttggaactgctacatgtgcggccacaagggcacatacggcctgctgagacggagagaggactggcctagcagactgcagatgttcttcgccaataaccacgaccaggagttcgacccccctaaggtgtaccctcccgtccccgccgagaagagaaagcccatccgggtcctgagcctgttcgatggcatcgccaccggtctgctggtgctgaaggacctgggcatccaggtggataggtacattgcctccgaggtgtgcgaggactccatcaccgtgggaatggtgcgtcatcagggcaagatcatgtacgtgggcgacgtgcggagcgtgacacagaagcatatccaggagtggggccctttcgacctggtgatcggcggcagcccttgcaatgacctgagcatcgtgaacccagcccggaagggcctgtacgagggaaccggcagactgttcttcgagttttacagactgctgcacgacgcccggcctaaggaaggcgacgaccggcccttcttttggctgttcgagaatgtggtggccatgggagtcagcgacaagcgggatattagccggttcctggagagcaaccccgtgatgatcgatgccaaggaagtgagcgccgcccaccgggccagatacttctggggcaatctgcctggcatgaacagacccctggccagcaccgtgaacgacaagctggagctgcaggagtgcctggagcacggccggatcgccaagttcagcaaggtgagaaccatcaccacccgaagcaacagcatcaaacaaggcaaggaccagcactttcctgtgttcatgaacgagaaggaggacatcctgtggtgtaccgagatggagagagtgttcgggttcccagtccactacacagatgtcagcaacatgtctagactggccagacagagactgctgggaagaagctggtccgtccctgtgatcagacacctgttcgcccctctgaaggagtacttcgcctgcgtgagcagcggcaacagcaacgccaacagccggggccccagcttctctagcggcctggtgccactgtccctgagagggagccacatgggccccatggagatctacaaaaccgtgagcgcctggaagcggcagcctgtgcgcgtgctgagcctgtttcggaatatcgataaagtcctgaaaagcctgggattcctggagagcggctctggctccggcggtggcaccctgaagtacgtggaggatgtgacaaacgtggtcagacgggatgtggagaagtggggccccttcgatctggtgtacggcagcacccaacccctgggcagctcttgtgaccggtgccctggctggtacatgtttcagttccaccggatcctgcagtacgccctgccgagacaggagtcccagcggccattcttttggattttcatggacaacttgctgctgaccgaggatgaccaggaaactaccactcggttcctgcagaccgaagccgtgaccctgcaggacgtgagaggccgggactaccagaacgccatgcgggtgtggtccaacatccctggactgaaaagcaagcacgcacctctgacccctaaagaagaggagtacctgcaggcccaggtgcggagcagaagcaagctggacgcccctaaggtggatctgctggtgaagaattgcctcctgcccctgagagagtacttcaagtatttcagccagaatagtctgcccctgggcggcccaagcagcggcgcccctcctcccagcggcggcagcccagccggctccccaacctctaccgaggagggcacctctgagtccgccacccccgagagcggccctggcacctccaccgagcccagcgagggcagcgcacccggcagccctgccggcagccccacctccacagaggagggaaccagcaccgagcccagcgaaggcagcgccccaggcaccagcaccgagcctagtgagggcggctctggcggcggcagcgcccaggagattaaacggatcaacaagatcagaagaagacttgtgaaagacagcaacaccaagaaggccggcaagacaggccccatgaaaaccctgctggttagagtgatgacacccgatctgagagagcggctggaaaacctgagaaagaagcctgaaaatatcccccagcccatcagcaatacatctagagccaacctgaataagctgctgaccgattacaccgaaatgaagaaggcgatcctgcatgtgtactgggaagagttccagaaggaccctgtgggcctgatgagccgggtggcccagcctgccagcaagaagatcgatcagaacaagctgaaacctgagatggacgagaagggcaacctgaccaccgccggctttgcctgctctcagtgtggccagcccctgttcgtgtacaagctggagcaggtgtctgagaagggcaaggcttacaccaactacttcggacggtgcaatgtggccgagcacgaaaagctgatcctgctggcccagctgaagcccgagaaggatagcgacgaagccgtgacatatagcctgggaaagtttgggcagagggccctggatttctacagcattcatgtgaccaaggagtccacccaccccgtgaagcccctggcccagatcgccggaaacagatacgcctccggacctgtgggaaaggccctgagcgacgcatgtatgggcacaatcgcctccttcctgtctaagtaccaggacatcatcatcgaacaccagaaggtggtgaagggcaaccagaagagactggagagcctgcgggagctggccggcaaggaaaacctggaataccctagcgtgaccctgccacctcagcctcacaccaaggagggcgttgatgcctacaacgaagtgatcgcccgggtgcgaatgtgggtgaacctgaacctgtggcagaagctgaagctaagcagagatgatgccaagcctctgctgagactgaagggattcccttcctttcctctggtcgagagacaggccaacgaagtggactggtgggacatggtgtgtaacgtgaagaagctgatcaacgagaaaaaggaggatggcaaggtgttttggcagaatctggctggctacaagagacaggaagccctgagaccatacctgagcagcgaggaagatcggaagaagggaaagaaattcgctcggtaccagctgggcgacctgctgctgcacctggaaaagaagcacggcgaggactggggaaaggtgtacgacgaggcctgggagcggattgacaagaaagtggaaggcctgagcaagcacatcaagctggaagaggaacggagaagcgaggacgcccagagcaaggccgccctgaccgactggctgcgggctaaggccagcttcgtgatcgagggcctgaaggaggccgacaaggacgagttctgcagatgcgagctgaagctgcagaagtggtacggggacctgcggggaaagcccttcgccatcgaagccgagaacagcatcctggacatcagcggcttcagcaagcagtacaactgtgccttcatctggcagaaggacggcgtgaagaagctgaacctgtacctgatcatcaactacttcaagggcggcaagctgcggttcaagaagatcaaacctgaagccttcgaagccaacagattctacaccgtgatcaacaaaaagagcggcgagatcgtgcccatggaggtgaacttcaacttcgacgaccccaacctgatcatcctgcctctggcctttggcaagagacagggcagagaattcatctggaacgacctgctgtccctggaaaccggcagcctgaagctggccaacggaagagtgatcgagaagacactgtacaacagaagaacccggcaggatgagcctgccctgttcgtggccctgaccttcgagcggcgggaggtcctggactcctccaatatcaaaccaatgaacctgatcggcgtggcaagaggcgaaaacatccccgccgtgatcgccctgaccgaccccgagggctgcccactgagccggtttaaggatagcctgggaaacccaacccacatcctgagaatcggcgagagctataaggagaagcagcggaccatccaggccaagaaggaggtggagcagcggagagccggcggctacagccggaagtacgccagcaaagccaagaatctggcagacgatatggtgagaaacaccgctagagatctgctgtactacgccgtgacccaggatgccatgctgatcttcgccaacctgagccggggcttcggccggcagggcaagcggaccttcatggccgagagacagtacacacggatggaggactggctgaccgccaagctggcctacgagggcctgagcaagacctacctgtccaagacactggcccagtacacctccaagacatgcagcaactgtgggtttaccatcaccagcgccgactacgacagggtgctggagaagctgaagaagacagcaacaggctggatgaccacaattaacggcaaggagctgaaggtggagggccagattacctactacaacagatacaagagacagaacgtagtcaaggacctgtccgtcgagctggatagactgagcgaagaatctgtgaacaacgacatctcctcctggacaaagggcagaagcggagaagctctgagcctcctgaagaaaagattctcccatagacccgtgcaggagaagttcgtgtgcctgaactgcggcttcgagacacacgcagccgagcaagccgccctgaacatcgccagatcctggctgttcctgcggagccaggagtacaagaaataccagacaaacaagacaaccggcaacaccgataagagagccttcgtcgagacctggcagtccttttaccggaagaagcttaaggaggtgtggaaacctgccgtgcggtctggcggatctggcggaggctccacaagcctgctggagagcgtgaccttcggcgacgtggccgtggtgttcagcagggacgagtggctgcacctggacgccgcccagaggagcctgtacagggaggtgatgctggagaactacagcgccctggtgagcctgggcatccccctgagcatccccaagctgatctgccagctgcagcagggcgaggacccctgcatggtggagagggagatcccccaggacgtgtgcctgggcttcaagacctggaccagccccaagaaaaagagaaaagtctaagctgccttctgcggggcttgccttctggccatgcccttcttctctcccttgcacctgtacctcttggtctttgaataaagcctgagtaggaaggctagcaaaaaaaaaaaaaaaaaaaaaaaaaaaaaaaaaaaaaaaaaaaaaaaaaaaaaaaaaaaaaaaaaaaaaaaaaaaaaaaa

SEQ ID NO: 7236 - RNA, 5797 nt, synthetic construct
  source 1..5797: mol_type = other RNA
aggaaataagagagaaaagaagagtaagaagaaatataagagccaccatggcccctaagaagaagcgtaaagtgagccggatggaacgcctcgtctacgaggtgcggcagaagtgcagaaacatcgaggacatctgcatctcctgcggatctctgaacgtgaccctggagcacccactgttcatcggcggcatgtgccagaactgtaaaaactgttttctggagtgtgcctatcaatacgacgatgacggctaccagagctactgcaccatctgttgcggcggaagagaggtgctgatgtgtggaaataacaactgctgccggtgcttctgcgtggaatgcgtggacctgctggtgggccccggcgccgcccaggccgctattaaggaagatccttggaactgctacatgtgcggccacaagggcacatacggcctgctgagacggagagaggactggcctagcagactgcagatgttcttcgccaataaccacgaccaggagttcgacccccctaaggtgtaccctcccgtccccgccgagaagagaaagcccatccgggtcctgagcctgttcgatggcatcgccaccggtctgctggtgctgaaggacctgggcatccaggtggataggtacattgcctccgaggtgtgcgaggactccatcaccgtgggaatggtgcgtcatcagggcaagatcatgtacgtgggcgacgtgcggagcgtgacacagaagcatatccaggagtggggccctttcgacctggtgatcggcggcagcccttgcaatgacctgagcatcgtgaacccagcccggaagggcctgtacgagggaaccggcagactgttcttcgagttttacagactgctgcacgacgcccggcctaaggaaggcgacgaccggcccttcttttggctgttcgagaatgtggtggccatgggagtcagcgacaagcgggatattagccggttcctggagagcaaccccgtgatgatcgatgccaaggaagtgagcgccgcccaccgggccagatacttctggggcaatctgcctggcatgaacagacccctggccagcaccgtgaacgacaagctggagctgcaggagtgcctggagcacggccggatcgccaagttcagcaaggtgagaaccatcaccacccgaagcaacagcatcaaacaaggcaaggaccagcactttcctgtgttcatgaacgagaaggaggacatcctgtggtgtaccgagatggagagagtgttcgggttcccagtccactacacagatgtcagcaacatgtctagactggccagacagagactgctgggaagaagctggtccgtccctgtgatcagacacctgttcgcccctctgaaggagtacttcgcctgcgtgagcagcggcaacagcaacgccaacagccggggccccagcttctctagcggcctggtgccactgtccctgagagggagccacatgggccccatggagatctacaaaaccgtgagcgcctggaagcggcagcctgtgcgcgtgctgagcctgtttcggaatatcgataaagtcctgaaaagcctgggattcctggagagcggctctggctccggcggtggcaccctgaagtacgtggaggatgtgacaaacgtggtcagacgggatgtggagaagtggggccccttcgatctggtgtacggcagcacccaacccctgggcagctcttgtgaccggtgccctggctggtacatgtttcagttccaccggatcctgcagtacgccctgccgagacaggagtcccagcggccattcttttggattttcatggacaacttgctgctgaccgaggatgaccaggaaactaccactcggttcctgcagaccgaagccgtgaccctgcaggacgtgagaggccgggactaccagaacgccatgcgggtgtggtccaacatccctggactgaaaagcaagcacgcacctctgacccctaaagaagaggagtacctgcaggcccaggtgcggagcagaagcaagctggacgcccctaaggtggatctgctggtgaagaattgcctcctgcccctgagagagtacttcaagtatttcagccagaatagtctgcccctgggcggcccaagcagcggcgcccctcctcccagcggcggcagcccagccggctccccaacctctaccgaggagggcacctctgagtccgccacccccgagagcggccctggcacctccaccgagcccagcgagggcagcgcacccggcagccctgccggcagccccacctccacagaggagggaaccagcaccgagcccagcgaaggcagcgccccaggcaccagcaccgagcctagtgagggcggctctggcggcggcagcgcccaggagattaaacggatcaacaagatcagaagaagacttgtgaaagacagcaacaccaagaaggccggcaagacaggccccatgaaaaccctgctggttagagtgatgacacccgatctgagagagcggctggaaaacctgagaaagaagcctgaaaatatcccccagcccatcagcaatacatctagagccaacctgaataagctgctgaccgattacaccgaaatgaagaaggcgatcctgcatgtgtactgggaagagttccagaaggaccctgtgggcctgatgagccgggtggcccagcctgccagcaagaagatcgatcagaacaagctgaaacctgagatggacgagaagggcaacctgaccaccgccggctttgcctgctctcagtgtggccagcccctgttcgtgtacaagctggagcaggtgtctgagaagggcaaggcttacaccaactacttcggacggtgcaatgtggccgagcacgaaaagctgatcctgctggcccagctgaagcccgagaaggatagcgacgaagccgtgacatatagcctgggaaagtttgggcagagggccctggatttctacagcattcatgtgaccaaggagtccacccaccccgtgaagcccctggcccagatcgccggaaacagatacgcctccggacctgtgggaaaggccctgagcgacgcatgtatgggcacaatcgcctccttcctgtctaagtaccaggacatcatcatcgaacaccagaaggtggtgaagggcaaccagaagagactggagagcctgcgggagctggccggcaaggaaaacctggaataccctagcgtgaccctgccacctcagcctcacaccaaggagggcgttgatgcctacaacgaagtgatcgcccgggtgcgaatgtgggtgaacctgaacctgtggcagaagctgaagctaagcagagatgatgccaagcctctgctgagactgaagggattcccttcctttcctctggtcgagagacaggccaacgaagtggactggtgggacatggtgtgtaacgtgaagaagctgatcaacgagaaaaaggaggatggcaaggtgttttggcagaatctggctggctacaagagacaggaagccctgagaccatacctgagcagcgaggaagatcggaagaagggaaagaaattcgctcggtaccagctgggcgacctgctgctgcacctggaaaagaagcacggcgaggactggggaaaggtgtacgacgaggcctgggagcggattgacaagaaagtggaaggcctgagcaagcacatcaagctggaagaggaacggagaagcgaggacgcccagagcaaggccgccctgaccgactggctgcgggctaaggccagcttcgtgatcgagggcctgaaggaggccgacaaggacgagttctgcagatgcgagctgaagctgcagaagtggtacggggacctgcggggaaagcccttcgccatcgaagccgagaacagcatcctggacatcagcggcttcagcaagcagtacaactgtgccttcatctggcagaaggacggcgtgaagaagctgaacctgtacctgatcatcaactacttcaagggcggcaagctgcggttcaagaagatcaaacctgaagccttcgaagccaacagattctacaccgtgatcaacaaaaagagcggcgagatcgtgcccatggaggtgaacttcaacttcgacgaccccaacctgatcatcctgcctctggcctttggcaagagacagggcagagaattcatctggaacgacctgctgtccctggaaaccggcagcctgaagctggccaacggaagagtgatcgagaagacactgtacaacagaagaacccggcaggatgagcctgccctgttcgtggccctgaccttcgagcggcgggaggtcctggactcctccaatatcaaaccaatgaacctgatcggcgtggcaagaggcgaaaacatccccgccgtgatcgccctgaccgaccccgagggctgcccactgagccggtttaaggatagcctgggaaacccaacccacatcctgagaatcggcgagagctataaggagaagcagcggaccatccaggccaagaaggaggtggagcagcggagagccggcggctacagccggaagtacgccagcaaagccaagaatctggcagacgatatggtgagaaacaccgctagagatctgctgtactacgccgtgacccaggatgccatgctgatcttcgccaacctgagccggggcttcggccggcagggcaagcggaccttcatggccgagagacagtacacacggatggaggactggctgaccgccaagctggcctacgagggcctgagcaagacctacctgtccaagacactggcccagtacacctccaagacatgcagcaactgtgggtttaccatcaccagcgccgactacgacagggtgctggagaagctgaagaagacagcaacaggctggatgaccacaattaacggcaaggagctgaaggtggagggccagattacctactacaacagatacaagagacagaacgtagtcaaggacctgtccgtcgagctggatagactgagcgaagaatctgtgaacaacgacatctcctcctggacaaagggcagaagcggagaagctctgagcctcctgaagaaaagattctcccatagacccgtgcaggagaagttcgtgtgcctgaactgcggcttcgagacacacgcagccgagcaagccgccctgaacatcgccagatcctggctgttcctgcggagccaggagtacaagaaataccagacaaacaagacaaccggcaacaccgataagagagccttcgtcgagacctggcagtccttttaccggaagaagcttaaggaggtgtggaaacctgccgtgcggtctggcggatctggcggaggctccacaagcagccagggcagggtgaccttcgaggacgtgaccgtgaacttcaccaagggcgagtggcagaggctgaaccccgagcagaggaacctgtacagggacgtgatgctggagaactacagcaacctggtgagcgtgggcagggaggagaccaccaagcccaacgtgatcctgaggctggagcagggcaaggagccctggctggtggaggaggaggtgctgggcagcggcaggcccgagaagaacggcaccagccccaagaaaaagagaaaagtctaagctgccttctgcggggcttgccttctggccatgcccttcttctctcccttgcacctgtacctcttggtctttgaataaagcctgagtaggaaggctagcaaaaaaaaaaaaaaaaaaaaaaaaaaaaaaaaaaaaaaaaaaaaaaaaaaaaaaaaaaaaaaaaaaaaaaaaaaaaaaaa

SEQ ID NO: 7237 - RNA, 5797 nt, synthetic construct
  source 1..5797: mol_type = other RNA
aggaaataagagagaaaagaagagtaagaagaaatataagagccaccatggcccctaagaagaagcgtaaagtgagccggatggaacgcctcgtctacgaggtgcggcagaagtgcagaaacatcgaggacatctgcatctcctgcggatctctgaacgtgaccctggagcacccactgttcatcggcggcatgtgccagaactgtaaaaactgttttctggagtgtgcctatcaatacgacgatgacggctaccagagctactgcaccatctgttgcggcggaagagaggtgctgatgtgtggaaataacaactgctgccggtgcttctgcgtggaatgcgtggacctgctggtgggccccggcgccgcccaggccgctattaaggaagatccttggaactgctacatgtgcggccacaagggcacatacggcctgctgagacggagagaggactggcctagcagactgcagatgttcttcgccaataaccacgaccaggagttcgacccccctaaggtgtaccctcccgtccccgccgagaagagaaagcccatccgggtcctgagcctgttcgatggcatcgccaccggtctgctggtgctgaaggacctgggcatccaggtggataggtacattgcctccgaggtgtgcgaggactccatcaccgtgggaatggtgcgtcatcagggcaagatcatgtacgtgggcgacgtgcggagcgtgacacagaagcatatccaggagtggggccctttcgacctggtgatcggcggcagcccttgcaatgacctgagcatcgtgaacccagcccggaagggcctgtacgagggaaccggcagactgttcttcgagttttacagactgctgcacgacgcccggcctaaggaaggcgacgaccggcccttcttttggctgttcgagaatgtggtggccatgggagtcagcgacaagcgggatattagccggttcctggagagcaaccccgtgatgatcgatgccaaggaagtgagcgccgcccaccgggccagatacttctggggcaatctgcctggcatgaacagacccctggccagcaccgtgaacgacaagctggagctgcaggagtgcctggagcacggccggatcgccaagttcagcaaggtgagaaccatcaccacccgaagcaacagcatcaaacaaggcaaggaccagcactttcctgtgttcatgaacgagaaggaggacatcctgtggtgtaccgagatggagagagtgttcgggttcccagtccactacacagatgtcagcaacatgtctagactggccagacagagactgctgggaagaagctggtccgtccctgtgatcagacacctgttcgcccctctgaaggagtacttcgcctgcgtgagcagcggcaacagcaacgccaacagccggggccccagcttctctagcggcctggtgccactgtccctgagagggagccacatgggccccatggagatctacaaaaccgtgagcgcctggaagcggcagcctgtgcgcgtgctgagcctgtttcggaatatcgataaagtcctgaaaagcctgggattcctggagagcggctctggctccggcggtggcaccctgaagtacgtggaggatgtgacaaacgtggtcagacgggatgtggagaagtggggccccttcgatctggtgtacggcagcacccaacccctgggcagctcttgtgaccggtgccctggctggtacatgtttcagttccaccggatcctgcagtacgccctgccgagacaggagtcccagcggccattcttttggattttcatggacaacttgctgctgaccgaggatgaccaggaaactaccactcggttcctgcagaccgaagccgtgaccctgcaggacgtgagaggccgggactaccagaacgccatgcgggtgtggtccaacatccctggactgaaaagcaagcacgcacctctgacccctaaagaagaggagtacctgcaggcccaggtgcggagcagaagcaagctggacgcccctaaggtggatctgctggtgaagaattgcctcctgcccctgagagagtacttcaagtatttcagccagaatagtctgcccctgggcggcccaagcagcggcgcccctcctcccagcggcggcagcccagccggctccccaacctctaccgaggagggcacctctgagtccgccacccccgagagcggccctggcacctccaccgagcccagcgagggcagcgcacccggcagccctgccggcagccccacctccacagaggagggaaccagcaccgagcccagcgaaggcagcgccccaggcaccagcaccgagcctagtgagggcggctctggcggcggcagcgcccaggagattaaacggatcaacaagatcagaagaagacttgtgaaagacagcaacaccaagaaggccggcaagacaggccccatgaaaaccctgctggttagagtgatgacacccgatctgagagagcggctggaaaacctgagaaagaagcctgaaaatatcccccagcccatcagcaatacatctagagccaacctgaataagctgctgaccgattacaccgaaatgaagaaggcgatcctgcatgtgtactgggaagagttccagaaggaccctgtgggcctgatgagccgggtggcccagcctgccagcaagaagatcgatcagaacaagctgaaacctgagatggacgagaagggcaacctgaccaccgccggctttgcctgctctcagtgtggccagcccctgttcgtgtacaagctggagcaggtgtctgagaagggcaaggcttacaccaactacttcggacggtgcaatgtggccgagcacgaaaagctgatcctgctggcccagctgaagcccgagaaggatagcgacgaagccgtgacatatagcctgggaaagtttgggcagagggccctggatttctacagcattcatgtgaccaaggagtccacccaccccgtgaagcccctggcccagatcgccggaaacagatacgcctccggacctgtgggaaaggccctgagcgacgcatgtatgggcacaatcgcctccttcctgtctaagtaccaggacatcatcatcgaacaccagaaggtggtgaagggcaaccagaagagactggagagcctgcgggagctggccggcaaggaaaacctggaataccctagcgtgaccctgccacctcagcctcacaccaaggagggcgttgatgcctacaacgaagtgatcgcccgggtgcgaatgtgggtgaacctgaacctgtggcagaagctgaagctaagcagagatgatgccaagcctctgctgagactgaagggattcccttcctttcctctggtcgagagacaggccaacgaagtggactggtgggacatggtgtgtaacgtgaagaagctgatcaacgagaaaaaggaggatggcaaggtgttttggcagaatctggctggctacaagagacaggaagccctgagaccatacctgagcagcgaggaagatcggaagaagggaaagaaattcgctcggtaccagctgggcgacctgctgctgcacctggaaaagaagcacggcgaggactggggaaaggtgtacgacgaggcctgggagcggattgacaagaaagtggaaggcctgagcaagcacatcaagctggaagaggaacggagaagcgaggacgcccagagcaaggccgccctgaccgactggctgcgggctaaggccagcttcgtgatcgagggcctgaaggaggccgacaaggacgagttctgcagatgcgagctgaagctgcagaagtggtacggggacctgcggggaaagcccttcgccatcgaagccgagaacagcatcctggacatcagcggcttcagcaagcagtacaactgtgccttcatctggcagaaggacggcgtgaagaagctgaacctgtacctgatcatcaactacttcaagggcggcaagctgcggttcaagaagatcaaacctgaagccttcgaagccaacagattctacaccgtgatcaacaaaaagagcggcgagatcgtgcccatggaggtgaacttcaacttcgacgaccccaacctgatcatcctgcctctggcctttggcaagagacagggcagagaattcatctggaacgacctgctgtccctggaaaccggcagcctgaagctggccaacggaagagtgatcgagaagacactgtacaacagaagaacccggcaggatgagcctgccctgttcgtggccctgaccttcgagcggcgggaggtcctggactcctccaatatcaaaccaatgaacctgatcggcgtggcaagaggcgaaaacatccccgccgtgatcgccctgaccgaccccgagggctgcccactgagccggtttaaggatagcctgggaaacccaacccacatcctgagaatcggcgagagctataaggagaagcagcggaccatccaggccaagaaggaggtggagcagcggagagccggcggctacagccggaagtacgccagcaaagccaagaatctggcagacgatatggtgagaaacaccgctagagatctgctgtactacgccgtgacccaggatgccatgctgatcttcgccaacctgagccggggcttcggccggcagggcaagcggaccttcatggccgagagacagtacacacggatggaggactggctgaccgccaagctggcctacgagggcctgagcaagacctacctgtccaagacactggcccagtacacctccaagacatgcagcaactgtgggtttaccatcaccagcgccgactacgacagggtgctggagaagctgaagaagacagcaacaggctggatgaccacaattaacggcaaggagctgaaggtggagggccagattacctactacaacagatacaagagacagaacgtagtcaaggacctgtccgtcgagctggatagactgagcgaagaatctgtgaacaacgacatctcctcctggacaaagggcagaagcggagaagctctgagcctcctgaagaaaagattctcccatagacccgtgcaggagaagttcgtgtgcctgaactgcggcttcgagacacacgcagccgagcaagccgccctgaacatcgccagatcctggctgttcctgcggagccaggagtacaagaaataccagacaaacaagacaaccggcaacaccgataagagagccttcgtcgagacctggcagtccttttaccggaagaagcttaaggaggtgtggaaacctgccgtgcggtctggcggatctggcggaggctccacaagcgccctgaggagcgtgatgttcagcgacgtgagcatcgacttcagccccgaggagtgggagtacctggacctggagcagaaggacctgtacagggacgtgatgctggagaactacagcaacctggtgagcctgggctgcttcatcagcaagcccgacgtgatcagcctgctggagcagggcaaggagccctggaaggtggtgaggaagggcaggaggcagtaccccgacctggagaccaagtacaccagccccaagaaaaagagaaaagtctaagctgccttctgcggggcttgccttctggccatgcccttcttctctcccttgcacctgtacctcttggtctttgaataaagcctgagtaggaaggctagcaaaaaaaaaaaaaaaaaaaaaaaaaaaaaaaaaaaaaaaaaaaaaaaaaaaaaaaaaaaaaaaaaaaaaaaaaaaaaaaa

SEQ ID NO: 7238 - RNA, 5797 nt, synthetic construct
  source 1..5797: mol_type = other RNA
aggaaataagagagaaaagaagagtaagaagaaatataagagccaccatggcccctaagaagaagcgtaaagtgagccggatggaacgcctcgtctacgaggtgcggcagaagtgcagaaacatcgaggacatctgcatctcctgcggatctctgaacgtgaccctggagcacccactgttcatcggcggcatgtgccagaactgtaaaaactgttttctggagtgtgcctatcaatacgacgatgacggctaccagagctactgcaccatctgttgcggcggaagagaggtgctgatgtgtggaaataacaactgctgccggtgcttctgcgtggaatgcgtggacctgctggtgggccccggcgccgcccaggccgctattaaggaagatccttggaactgctacatgtgcggccacaagggcacatacggcctgctgagacggagagaggactggcctagcagactgcagatgttcttcgccaataaccacgaccaggagttcgacccccctaaggtgtaccctcccgtccccgccgagaagagaaagcccatccgggtcctgagcctgttcgatggcatcgccaccggtctgctggtgctgaaggacctgggcatccaggtggataggtacattgcctccgaggtgtgcgaggactccatcaccgtgggaatggtgcgtcatcagggcaagatcatgtacgtgggcgacgtgcggagcgtgacacagaagcatatccaggagtggggccctttcgacctggtgatcggcggcagcccttgcaatgacctgagcatcgtgaacccagcccggaagggcctgtacgagggaaccggcagactgttcttcgagttttacagactgctgcacgacgcccggcctaaggaaggcgacgaccggcccttcttttggctgttcgagaatgtggtggccatgggagtcagcgacaagcgggatattagccggttcctggagagcaaccccgtgatgatcgatgccaaggaagtgagcgccgcccaccgggccagatacttctggggcaatctgcctggcatgaacagacccctggccagcaccgtgaacgacaagctggagctgcaggagtgcctggagcacggccggatcgccaagttcagcaaggtgagaaccatcaccacccgaagcaacagcatcaaacaaggcaaggaccagcactttcctgtgttcatgaacgagaaggaggacatcctgtggtgtaccgagatggagagagtgttcgggttcccagtccactacacagatgtcagcaacatgtctagactggccagacagagactgctgggaagaagctggtccgtccctgtgatcagacacctgttcgcccctctgaaggagtacttcgcctgcgtgagcagcggcaacagcaacgccaacagccggggccccagcttctctagcggcctggtgccactgtccctgagagggagccacatgggccccatggagatctacaaaaccgtgagcgcctggaagcggcagcctgtgcgcgtgctgagcctgtttcggaatatcgataaagtcctgaaaagcctgggattcctggagagcggctctggctccggcggtggcaccctgaagtacgtggaggatgtgacaaacgtggtcagacgggatgtggagaagtggggccccttcgatctggtgtacggcagcacccaacccctgggcagctcttgtgaccggtgccctggctggtacatgtttcagttccaccggatcctgcagtacgccctgccgagacaggagtcccagcggccattcttttggattttcatggacaacttgctgctgaccgaggatgaccaggaaactaccactcggttcctgcagaccgaagccgtgaccctgcaggacgtgagaggccgggactaccagaacgccatgcgggtgtggtccaacatccctggactgaaaagcaagcacgcacctctgacccctaaagaagaggagtacctgcaggcccaggtgcggagcagaagcaagctggacgcccctaaggtggatctgctggtgaagaattgcctcctgcccctgagagagtacttcaagtatttcagccagaatagtctgcccctgggcggcccaagcagcggcgcccctcctcccagcggcggcagcccagccggctccccaacctctaccgaggagggcacctctgagtccgccacccccgagagcggccctggcacctccaccgagcccagcgagggcagcgcacccggcagccctgccggcagccccacctccacagaggagggaaccagcaccgagcccagcgaaggcagcgccccaggcaccagcaccgagcctagtgagggcggctctggcggcggcagcgcccaggagattaaacggatcaacaagatcagaagaagacttgtgaaagacagcaacaccaagaaggccggcaagacaggccccatgaaaaccctgctggttagagtgatgacacccgatctgagagagcggctggaaaacctgagaaagaagcctgaaaatatcccccagcccatcagcaatacatctagagccaacctgaataagctgctgaccgattacaccgaaatgaagaaggcgatcctgcatgtgtactgggaagagttccagaaggaccctgtgggcctgatgagccgggtggcccagcctgccagcaagaagatcgatcagaacaagctgaaacctgagatggacgagaagggcaacctgaccaccgccggctttgcctgctctcagtgtggccagcccctgttcgtgtacaagctggagcaggtgtctgagaagggcaaggcttacaccaactacttcggacggtgcaatgtggccgagcacgaaaagctgatcctgctggcccagctgaagcccgagaaggatagcgacgaagccgtgacatatagcctgggaaagtttgggcagagggccctggatttctacagcattcatgtgaccaaggagtccacccaccccgtgaagcccctggcccagatcgccggaaacagatacgcctccggacctgtgggaaaggccctgagcgacgcatgtatgggcacaatcgcctccttcctgtctaagtaccaggacatcatcatcgaacaccagaaggtggtgaagggcaaccagaagagactggagagcctgcgggagctggccggcaaggaaaacctggaataccctagcgtgaccctgccacctcagcctcacaccaaggagggcgttgatgcctacaacgaagtgatcgcccgggtgcgaatgtgggtgaacctgaacctgtggcagaagctgaagctaagcagagatgatgccaagcctctgctgagactgaagggattcccttcctttcctctggtcgagagacaggccaacgaagtggactggtgggacatggtgtgtaacgtgaagaagctgatcaacgagaaaaaggaggatggcaaggtgttttggcagaatctggctggctacaagagacaggaagccctgagaccatacctgagcagcgaggaagatcggaagaagggaaagaaattcgctcggtaccagctgggcgacctgctgctgcacctggaaaagaagcacggcgaggactggggaaaggtgtacgacgaggcctgggagcggattgacaagaaagtggaaggcctgagcaagcacatcaagctggaagaggaacggagaagcgaggacgcccagagcaaggccgccctgaccgactggctgcgggctaaggccagcttcgtgatcgagggcctgaaggaggccgacaaggacgagttctgcagatgcgagctgaagctgcagaagtggtacggggacctgcggggaaagcccttcgccatcgaagccgagaacagcatcctggacatcagcggcttcagcaagcagtacaactgtgccttcatctggcagaaggacggcgtgaagaagctgaacctgtacctgatcatcaactacttcaagggcggcaagctgcggttcaagaagatcaaacctgaagccttcgaagccaacagattctacaccgtgatcaacaaaaagagcggcgagatcgtgcccatggaggtgaacttcaacttcgacgaccccaacctgatcatcctgcctctggcctttggcaagagacagggcagagaattcatctggaacgacctgctgtccctggaaaccggcagcctgaagctggccaacggaagagtgatcgagaagacactgtacaacagaagaacccggcaggatgagcctgccctgttcgtggccctgaccttcgagcggcgggaggtcctggactcctccaatatcaaaccaatgaacctgatcggcgtggcaagaggcgaaaacatccccgccgtgatcgccctgaccgaccccgagggctgcccactgagccggtttaaggatagcctgggaaacccaacccacatcctgagaatcggcgagagctataaggagaagcagcggaccatccaggccaagaaggaggtggagcagcggagagccggcggctacagccggaagtacgccagcaaagccaagaatctggcagacgatatggtgagaaacaccgctagagatctgctgtactacgccgtgacccaggatgccatgctgatcttcgccaacctgagccggggcttcggccggcagggcaagcggaccttcatggccgagagacagtacacacggatggaggactggctgaccgccaagctggcctacgagggcctgagcaagacctacctgtccaagacactggcccagtacacctccaagacatgcagcaactgtgggtttaccatcaccagcgccgactacgacagggtgctggagaagctgaagaagacagcaacaggctggatgaccacaattaacggcaaggagctgaaggtggagggccagattacctactacaacagatacaagagacagaacgtagtcaaggacctgtccgtcgagctggatagactgagcgaagaatctgtgaacaacgacatctcctcctggacaaagggcagaagcggagaagctctgagcctcctgaagaaaagattctcccatagacccgtgcaggagaagttcgtgtgcctgaactgcggcttcgagacacacgcagccgagcaagccgccctgaacatcgccagatcctggctgttcctgcggagccaggagtacaagaaataccagacaaacaagacaaccggcaacaccgataagagagccttcgtcgagacctggcagtccttttaccggaagaagcttaaggaggtgtggaaacctgccgtgcggtctggcggatctggcggaggctccacaagcgagcaggacgccgtgacctacgaggacgtgcacgtgaacttcacccacgaggagtgggccctgctggaccccagccagaagagcctgtacaaggacgtgatgatggagacctactggaacctgacctgcatcggctacaagtgggaggaccacaacatcgaggagcactgccagagctgcaggaggaacggcagcaggtgcgtgatctgccacagcggccacaacccctgcgagcacaagggcaccagccccaagaaaaagagaaaagtctaagctgccttctgcggggcttgccttctggccatgcccttcttctctcccttgcacctgtacctcttggtctttgaataaagcctgagtaggaaggctagcaaaaaaaaaaaaaaaaaaaaaaaaaaaaaaaaaaaaaaaaaaaaaaaaaaaaaaaaaaaaaaaaaaaaaaaaaaaaaaaa

SEQ ID NO: 7239 - RNA, 5797 nt, synthetic construct
  source 1..5797: mol_type = other RNA
aggaaataagagagaaaagaagagtaagaagaaatataagagccaccatggcccctaagaagaagcgtaaagtgagccggatggaacgcctcgtctacgaggtgcggcagaagtgcagaaacatcgaggacatctgcatctcctgcggatctctgaacgtgaccctggagcacccactgttcatcggcggcatgtgccagaactgtaaaaactgttttctggagtgtgcctatcaatacgacgatgacggctaccagagctactgcaccatctgttgcggcggaagagaggtgctgatgtgtggaaataacaactgctgccggtgcttctgcgtggaatgcgtggacctgctggtgggccccggcgccgcccaggccgctattaaggaagatccttggaactgctacatgtgcggccacaagggcacatacggcctgctgagacggagagaggactggcctagcagactgcagatgttcttcgccaataaccacgaccaggagttcgacccccctaaggtgtaccctcccgtccccgccgagaagagaaagcccatccgggtcctgagcctgttcgatggcatcgccaccggtctgctggtgctgaaggacctgggcatccaggtggataggtacattgcctccgaggtgtgcgaggactccatcaccgtgggaatggtgcgtcatcagggcaagatcatgtacgtgggcgacgtgcggagcgtgacacagaagcatatccaggagtggggccctttcgacctggtgatcggcggcagcccttgcaatgacctgagcatcgtgaacccagcccggaagggcctgtacgagggaaccggcagactgttcttcgagttttacagactgctgcacgacgcccggcctaaggaaggcgacgaccggcccttcttttggctgttcgagaatgtggtggccatgggagtcagcgacaagcgggatattagccggttcctggagagcaaccccgtgatgatcgatgccaaggaagtgagcgccgcccaccgggccagatacttctggggcaatctgcctggcatgaacagacccctggccagcaccgtgaacgacaagctggagctgcaggagtgcctggagcacggccggatcgccaagttcagcaaggtgagaaccatcaccacccgaagcaacagcatcaaacaaggcaaggaccagcactttcctgtgttcatgaacgagaaggaggacatcctgtggtgtaccgagatggagagagtgttcgggttcccagtccactacacagatgtcagcaacatgtctagactggccagacagagactgctgggaagaagctggtccgtccctgtgatcagacacctgttcgcccctctgaaggagtacttcgcctgcgtgagcagcggcaacagcaacgccaacagccggggccccagcttctctagcggcctggtgccactgtccctgagagggagccacatgggccccatggagatctacaaaaccgtgagcgcctggaagcggcagcctgtgcgcgtgctgagcctgtttcggaatatcgataaagtcctgaaaagcctgggattcctggagagcggctctggctccggcggtggcaccctgaagtacgtggaggatgtgacaaacgtggtcagacgggatgtggagaagtggggccccttcgatctggtgtacggcagcacccaacccctgggcagctcttgtgaccggtgccctggctggtacatgtttcagttccaccggatcctgcagtacgccctgccgagacaggagtcccagcggccattcttttggattttcatggacaacttgctgctgaccgaggatgaccaggaaactaccactcggttcctgcagaccgaagccgtgaccctgcaggacgtgagaggccgggactaccagaacgccatgcgggtgtggtccaacatccctggactgaaaagcaagcacgcacctctgacccctaaagaagaggagtacctgcaggcccaggtgcggagcagaagcaagctggacgcccctaaggtggatctgctggtgaagaattgcctcctgcccctgagagagtacttcaagtatttcagccagaatagtctgcccctgggcggcccaagcagcggcgcccctcctcccagcggcggcagcccagccggctccccaacctctaccgaggagggcacctctgagtccgccacccccgagagcggccctggcacctccaccgagcccagcgagggcagcgcacccggcagccctgccggcagccccacctccacagaggagggaaccagcaccgagcccagcgaaggcagcgccccaggcaccagcaccgagcctagtgagggcggctctggcggcggcagcgcccaggagattaaacggatcaacaagatcagaagaagacttgtgaaagacagcaacaccaagaaggccggcaagacaggccccatgaaaaccctgctggttagagtgatgacacccgatctgagagagcggctggaaaacctgagaaagaagcctgaaaatatcccccagcccatcagcaatacatctagagccaacctgaataagctgctgaccgattacaccgaaatgaagaaggcgatcctgcatgtgtactgggaagagttccagaaggaccctgtgggcctgatgagccgggtggcccagcctgccagcaagaagatcgatcagaacaagctgaaacctgagatggacgagaagggcaacctgaccaccgccggctttgcctgctctcagtgtggccagcccctgttcgtgtacaagctggagcaggtgtctgagaagggcaaggcttacaccaactacttcggacggtgcaatgtggccgagcacgaaaagctgatcctgctggcccagctgaagcccgagaaggatagcgacgaagccgtgacatatagcctgggaaagtttgggcagagggccctggatttctacagcattcatgtgaccaaggagtccacccaccccgtgaagcccctggcccagatcgccggaaacagatacgcctccggacctgtgggaaaggccctgagcgacgcatgtatgggcacaatcgcctccttcctgtctaagtaccaggacatcatcatcgaacaccagaaggtggtgaagggcaaccagaagagactggagagcctgcgggagctggccggcaaggaaaacctggaataccctagcgtgaccctgccacctcagcctcacaccaaggagggcgttgatgcctacaacgaagtgatcgcccgggtgcgaatgtgggtgaacctgaacctgtggcagaagctgaagctaagcagagatgatgccaagcctctgctgagactgaagggattcccttcctttcctctggtcgagagacaggccaacgaagtggactggtgggacatggtgtgtaacgtgaagaagctgatcaacgagaaaaaggaggatggcaaggtgttttggcagaatctggctggctacaagagacaggaagccctgagaccatacctgagcagcgaggaagatcggaagaagggaaagaaattcgctcggtaccagctgggcgacctgctgctgcacctggaaaagaagcacggcgaggactggggaaaggtgtacgacgaggcctgggagcggattgacaagaaagtggaaggcctgagcaagcacatcaagctggaagaggaacggagaagcgaggacgcccagagcaaggccgccctgaccgactggctgcgggctaaggccagcttcgtgatcgagggcctgaaggaggccgacaaggacgagttctgcagatgcgagctgaagctgcagaagtggtacggggacctgcggggaaagcccttcgccatcgaagccgagaacagcatcctggacatcagcggcttcagcaagcagtacaactgtgccttcatctggcagaaggacggcgtgaagaagctgaacctgtacctgatcatcaactacttcaagggcggcaagctgcggttcaagaagatcaaacctgaagccttcgaagccaacagattctacaccgtgatcaacaaaaagagcggcgagatcgtgcccatggaggtgaacttcaacttcgacgaccccaacctgatcatcctgcctctggcctttggcaagagacagggcagagaattcatctggaacgacctgctgtccctggaaaccggcagcctgaagctggccaacggaagagtgatcgagaagacactgtacaacagaagaacccggcaggatgagcctgccctgttcgtggccctgaccttcgagcggcgggaggtcctggactcctccaatatcaaaccaatgaacctgatcggcgtggcaagaggcgaaaacatccccgccgtgatcgccctgaccgaccccgagggctgcccactgagccggtttaaggatagcctgggaaacccaacccacatcctgagaatcggcgagagctataaggagaagcagcggaccatccaggccaagaaggaggtggagcagcggagagccggcggctacagccggaagtacgccagcaaagccaagaatctggcagacgatatggtgagaaacaccgctagagatctgctgtactacgccgtgacccaggatgccatgctgatcttcgccaacctgagccggggcttcggccggcagggcaagcggaccttcatggccgagagacagtacacacggatggaggactggctgaccgccaagctggcctacgagggcctgagcaagacctacctgtccaagacactggcccagtacacctccaagacatgcagcaactgtgggtttaccatcaccagcgccgactacgacagggtgctggagaagctgaagaagacagcaacaggctggatgaccacaattaacggcaaggagctgaaggtggagggccagattacctactacaacagatacaagagacagaacgtagtcaaggacctgtccgtcgagctggatagactgagcgaagaatctgtgaacaacgacatctcctcctggacaaagggcagaagcggagaagctctgagcctcctgaagaaaagattctcccatagacccgtgcaggagaagttcgtgtgcctgaactgcggcttcgagacacacgcagccgagcaagccgccctgaacatcgccagatcctggctgttcctgcggagccaggagtacaagaaataccagacaaacaagacaaccggcaacaccgataagagagccttcgtcgagacctggcagtccttttaccggaagaagcttaaggaggtgtggaaacctgccgtgcggtctggcggatctggcggaggctccacaagctgcaaggagagcgtgatcttcaaggacgtgtgcgtgaacttcagcctggaggagtgggagtgcctggacctgacccagaggaacctgtacaggtgcgtgatgctggagaactacagcaacctggtgagcgtggtgggcctgagcatccccaagcccgacgtgatcagcctgctggagcagggcaaggagccctggggcgtgttcgacagcgagatgaccaggggcctgaaccaggactgcggcaccagccccaagaaaaagagaaaagtctaagctgccttctgcggggcttgccttctggccatgcccttcttctctcccttgcacctgtacctcttggtctttgaataaagcctgagtaggaaggctagcaaaaaaaaaaaaaaaaaaaaaaaaaaaaaaaaaaaaaaaaaaaaaaaaaaaaaaaaaaaaaaaaaaaaaaaaaaaaaaaa

SEQ ID NO: 7240 - RNA, 5797 nt, synthetic construct
  source 1..5797: mol_type = other RNA
aggaaataagagagaaaagaagagtaagaagaaatataagagccaccatggcccctaagaagaagcgtaaagtgagccggatggaacgcctcgtctacgaggtgcggcagaagtgcagaaacatcgaggacatctgcatctcctgcggatctctgaacgtgaccctggagcacccactgttcatcggcggcatgtgccagaactgtaaaaactgttttctggagtgtgcctatcaatacgacgatgacggctaccagagctactgcaccatctgttgcggcggaagagaggtgctgatgtgtggaaataacaactgctgccggtgcttctgcgtggaatgcgtggacctgctggtgggccccggcgccgcccaggccgctattaaggaagatccttggaactgctacatgtgcggccacaagggcacatacggcctgctgagacggagagaggactggcctagcagactgcagatgttcttcgccaataaccacgaccaggagttcgacccccctaaggtgtaccctcccgtccccgccgagaagagaaagcccatccgggtcctgagcctgttcgatggcatcgccaccggtctgctggtgctgaaggacctgggcatccaggtggataggtacattgcctccgaggtgtgcgaggactccatcaccgtgggaatggtgcgtcatcagggcaagatcatgtacgtgggcgacgtgcggagcgtgacacagaagcatatccaggagtggggccctttcgacctggtgatcggcggcagcccttgcaatgacctgagcatcgtgaacccagcccggaagggcctgtacgagggaaccggcagactgttcttcgagttttacagactgctgcacgacgcccggcctaaggaaggcgacgaccggcccttcttttggctgttcgagaatgtggtggccatgggagtcagcgacaagcgggatattagccggttcctggagagcaaccccgtgatgatcgatgccaaggaagtgagcgccgcccaccgggccagatacttctggggcaatctgcctggcatgaacagacccctggccagcaccgtgaacgacaagctggagctgcaggagtgcctggagcacggccggatcgccaagttcagcaaggtgagaaccatcaccacccgaagcaacagcatcaaacaaggcaaggaccagcactttcctgtgttcatgaacgagaaggaggacatcctgtggtgtaccgagatggagagagtgttcgggttcccagtccactacacagatgtcagcaacatgtctagactggccagacagagactgctgggaagaagctggtccgtccctgtgatcagacacctgttcgcccctctgaaggagtacttcgcctgcgtgagcagcggcaacagcaacgccaacagccggggccccagcttctctagcggcctggtgccactgtccctgagagggagccacatgggccccatggagatctacaaaaccgtgagcgcctggaagcggcagcctgtgcgcgtgctgagcctgtttcggaatatcgataaagtcctgaaaagcctgggattcctggagagcggctctggctccggcggtggcaccctgaagtacgtggaggatgtgacaaacgtggtcagacgggatgtggagaagtggggccccttcgatctggtgtacggcagcacccaacccctgggcagctcttgtgaccggtgccctggctggtacatgtttcagttccaccggatcctgcagtacgccctgccgagacaggagtcccagcggccattcttttggattttcatggacaacttgctgctgaccgaggatgaccaggaaactaccactcggttcctgcagaccgaagccgtgaccctgcaggacgtgagaggccgggactaccagaacgccatgcgggtgtggtccaacatccctggactgaaaagcaagcacgcacctctgacccctaaagaagaggagtacctgcaggcccaggtgcggagcagaagcaagctggacgcccctaaggtggatctgctggtgaagaattgcctcctgcccctgagagagtacttcaagtatttcagccagaatagtctgcccctgggcggcccaagcagcggcgcccctcctcccagcggcggcagcccagccggctccccaacctctaccgaggagggcacctctgagtccgccacccccgagagcggccctggcacctccaccgagcccagcgagggcagcgcacccggcagccctgccggcagccccacctccacagaggagggaaccagcaccgagcccagcgaaggcagcgccccaggcaccagcaccgagcctagtgagggcggctctggcggcggcagcgcccaggagattaaacggatcaacaagatcagaagaagacttgtgaaagacagcaacaccaagaaggccggcaagacaggccccatgaaaaccctgctggttagagtgatgacacccgatctgagagagcggctggaaaacctgagaaagaagcctgaaaatatcccccagcccatcagcaatacatctagagccaacctgaataagctgctgaccgattacaccgaaatgaagaaggcgatcctgcatgtgtactgggaagagttccagaaggaccctgtgggcctgatgagccgggtggcccagcctgccagcaagaagatcgatcagaacaagctgaaacctgagatggacgagaagggcaacctgaccaccgccggctttgcctgctctcagtgtggccagcccctgttcgtgtacaagctggagcaggtgtctgagaagggcaaggcttacaccaactacttcggacggtgcaatgtggccgagcacgaaaagctgatcctgctggcccagctgaagcccgagaaggatagcgacgaagccgtgacatatagcctgggaaagtttgggcagagggccctggatttctacagcattcatgtgaccaaggagtccacccaccccgtgaagcccctggcccagatcgccggaaacagatacgcctccggacctgtgggaaaggccctgagcgacgcatgtatgggcacaatcgcctccttcctgtctaagtaccaggacatcatcatcgaacaccagaaggtggtgaagggcaaccagaagagactggagagcctgcgggagctggccggcaaggaaaacctggaataccctagcgtgaccctgccacctcagcctcacaccaaggagggcgttgatgcctacaacgaagtgatcgcccgggtgcgaatgtgggtgaacctgaacctgtggcagaagctgaagctaagcagagatgatgccaagcctctgctgagactgaagggattcccttcctttcctctggtcgagagacaggccaacgaagtggactggtgggacatggtgtgtaacgtgaagaagctgatcaacgagaaaaaggaggatggcaaggtgttttggcagaatctggctggctacaagagacaggaagccctgagaccatacctgagcagcgaggaagatcggaagaagggaaagaaattcgctcggtaccagctgggcgacctgctgctgcacctggaaaagaagcacggcgaggactggggaaaggtgtacgacgaggcctgggagcggattgacaagaaagtggaaggcctgagcaagcacatcaagctggaagaggaacggagaagcgaggacgcccagagcaaggccgccctgaccgactggctgcgggctaaggccagcttcgtgatcgagggcctgaaggaggccgacaaggacgagttctgcagatgcgagctgaagctgcagaagtggtacggggacctgcggggaaagcccttcgccatcgaagccgagaacagcatcctggacatcagcggcttcagcaagcagtacaactgtgccttcatctggcagaaggacggcgtgaagaagctgaacctgtacctgatcatcaactacttcaagggcggcaagctgcggttcaagaagatcaaacctgaagccttcgaagccaacagattctacaccgtgatcaacaaaaagagcggcgagatcgtgcccatggaggtgaacttcaacttcgacgaccccaacctgatcatcctgcctctggcctttggcaagagacagggcagagaattcatctggaacgacctgctgtccctggaaaccggcagcctgaagctggccaacggaagagtgatcgagaagacactgtacaacagaagaacccggcaggatgagcctgccctgttcgtggccctgaccttcgagcggcgggaggtcctggactcctccaatatcaaaccaatgaacctgatcggcgtggcaagaggcgaaaacatccccgccgtgatcgccctgaccgaccccgagggctgcccactgagccggtttaaggatagcctgggaaacccaacccacatcctgagaatcggcgagagctataaggagaagcagcggaccatccaggccaagaaggaggtggagcagcggagagccggcggctacagccggaagtacgccagcaaagccaagaatctggcagacgatatggtgagaaacaccgctagagatctgctgtactacgccgtgacccaggatgccatgctgatcttcgccaacctgagccggggcttcggccggcagggcaagcggaccttcatggccgagagacagtacacacggatggaggactggctgaccgccaagctggcctacgagggcctgagcaagacctacctgtccaagacactggcccagtacacctccaagacatgcagcaactgtgggtttaccatcaccagcgccgactacgacagggtgctggagaagctgaagaagacagcaacaggctggatgaccacaattaacggcaaggagctgaaggtggagggccagattacctactacaacagatacaagagacagaacgtagtcaaggacctgtccgtcgagctggatagactgagcgaagaatctgtgaacaacgacatctcctcctggacaaagggcagaagcggagaagctctgagcctcctgaagaaaagattctcccatagacccgtgcaggagaagttcgtgtgcctgaactgcggcttcgagacacacgcagccgagcaagccgccctgaacatcgccagatcctggctgttcctgcggagccaggagtacaagaaataccagacaaacaagacaaccggcaacaccgataagagagccttcgtcgagacctggcagtccttttaccggaagaagcttaaggaggtgtggaaacctgccgtgcggtctggcggatctggcggaggctccacaagcggcagggtgaccttcagggacgtggccgtggagttcagcctggccgagtggaagtgcctgaaccccgtgcagagggccctgtacagggaggtgatgctggagaactacaggaacctggagttcgtggacagcagcctgaagagcatgatggagttcagcagccacgagcacagcaacaccggcgagggcttccacaccggcaccctggagaggcacaagagctaccacatcggcgacttctggaccagccccaagaaaaagagaaaagtctaagctgccttctgcggggcttgccttctggccatgcccttcttctctcccttgcacctgtacctcttggtctttgaataaagcctgagtaggaaggctagcaaaaaaaaaaaaaaaaaaaaaaaaaaaaaaaaaaaaaaaaaaaaaaaaaaaaaaaaaaaaaaaaaaaaaaaaaaaaaaaa

SEQ ID NO: 7241 - RNA, 5797 nt, synthetic construct
  source 1..5797: mol_type = other RNA
aggaaataagagagaaaagaagagtaagaagaaatataagagccaccatggcccctaagaagaagcgtaaagtgagccggatggaacgcctcgtctacgaggtgcggcagaagtgcagaaacatcgaggacatctgcatctcctgcggatctctgaacgtgaccctggagcacccactgttcatcggcggcatgtgccagaactgtaaaaactgttttctggagtgtgcctatcaatacgacgatgacggctaccagagctactgcaccatctgttgcggcggaagagaggtgctgatgtgtggaaataacaactgctgccggtgcttctgcgtggaatgcgtggacctgctggtgggccccggcgccgcccaggccgctattaaggaagatccttggaactgctacatgtgcggccacaagggcacatacggcctgctgagacggagagaggactggcctagcagactgcagatgttcttcgccaataaccacgaccaggagttcgacccccctaaggtgtaccctcccgtccccgccgagaagagaaagcccatccgggtcctgagcctgttcgatggcatcgccaccggtctgctggtgctgaaggacctgggcatccaggtggataggtacattgcctccgaggtgtgcgaggactccatcaccgtgggaatggtgcgtcatcagggcaagatcatgtacgtgggcgacgtgcggagcgtgacacagaagcatatccaggagtggggccctttcgacctggtgatcggcggcagcccttgcaatgacctgagcatcgtgaacccagcccggaagggcctgtacgagggaaccggcagactgttcttcgagttttacagactgctgcacgacgcccggcctaaggaaggcgacgaccggcccttcttttggctgttcgagaatgtggtggccatgggagtcagcgacaagcgggatattagccggttcctggagagcaaccccgtgatgatcgatgccaaggaagtgagcgccgcccaccgggccagatacttctggggcaatctgcctggcatgaacagacccctggccagcaccgtgaacgacaagctggagctgcaggagtgcctggagcacggccggatcgccaagttcagcaaggtgagaaccatcaccacccgaagcaacagcatcaaacaaggcaaggaccagcactttcctgtgttcatgaacgagaaggaggacatcctgtggtgtaccgagatggagagagtgttcgggttcccagtccactacacagatgtcagcaacatgtctagactggccagacagagactgctgggaagaagctggtccgtccctgtgatcagacacctgttcgcccctctgaaggagtacttcgcctgcgtgagcagcggcaacagcaacgccaacagccggggccccagcttctctagcggcctggtgccactgtccctgagagggagccacatgggccccatggagatctacaaaaccgtgagcgcctggaagcggcagcctgtgcgcgtgctgagcctgtttcggaatatcgataaagtcctgaaaagcctgggattcctggagagcggctctggctccggcggtggcaccctgaagtacgtggaggatgtgacaaacgtggtcagacgggatgtggagaagtggggccccttcgatctggtgtacggcagcacccaacccctgggcagctcttgtgaccggtgccctggctggtacatgtttcagttccaccggatcctgcagtacgccctgccgagacaggagtcccagcggccattcttttggattttcatggacaacttgctgctgaccgaggatgaccaggaaactaccactcggttcctgcagaccgaagccgtgaccctgcaggacgtgagaggccgggactaccagaacgccatgcgggtgtggtccaacatccctggactgaaaagcaagcacgcacctctgacccctaaagaagaggagtacctgcaggcccaggtgcggagcagaagcaagctggacgcccctaaggtggatctgctggtgaagaattgcctcctgcccctgagagagtacttcaagtatttcagccagaatagtctgcccctgggcggcccaagcagcggcgcccctcctcccagcggcggcagcccagccggctccccaacctctaccgaggagggcacctctgagtccgccacccccgagagcggccctggcacctccaccgagcccagcgagggcagcgcacccggcagccctgccggcagccccacctccacagaggagggaaccagcaccgagcccagcgaaggcagcgccccaggcaccagcaccgagcctagtgagggcggctctggcggcggcagcgcccaggagattaaacggatcaacaagatcagaagaagacttgtgaaagacagcaacaccaagaaggccggcaagacaggccccatgaaaaccctgctggttagagtgatgacacccgatctgagagagcggctggaaaacctgagaaagaagcctgaaaatatcccccagcccatcagcaatacatctagagccaacctgaataagctgctgaccgattacaccgaaatgaagaaggcgatcctgcatgtgtactgggaagagttccagaaggaccctgtgggcctgatgagccgggtggcccagcctgccagcaagaagatcgatcagaacaagctgaaacctgagatggacgagaagggcaacctgaccaccgccggctttgcctgctctcagtgtggccagcccctgttcgtgtacaagctggagcaggtgtctgagaagggcaaggcttacaccaactacttcggacggtgcaatgtggccgagcacgaaaagctgatcctgctggcccagctgaagcccgagaaggatagcgacgaagccgtgacatatagcctgggaaagtttgggcagagggccctggatttctacagcattcatgtgaccaaggagtccacccaccccgtgaagcccctggcccagatcgccggaaacagatacgcctccggacctgtgggaaaggccctgagcgacgcatgtatgggcacaatcgcctccttcctgtctaagtaccaggacatcatcatcgaacaccagaaggtggtgaagggcaaccagaagagactggagagcctgcgggagctggccggcaaggaaaacctggaataccctagcgtgaccctgccacctcagcctcacaccaaggagggcgttgatgcctacaacgaagtgatcgcccgggtgcgaatgtgggtgaacctgaacctgtggcagaagctgaagctaagcagagatgatgccaagcctctgctgagactgaagggattcccttcctttcctctggtcgagagacaggccaacgaagtggactggtgggacatggtgtgtaacgtgaagaagctgatcaacgagaaaaaggaggatggcaaggtgttttggcagaatctggctggctacaagagacaggaagccctgagaccatacctgagcagcgaggaagatcggaagaagggaaagaaattcgctcggtaccagctgggcgacctgctgctgcacctggaaaagaagcacggcgaggactggggaaaggtgtacgacgaggcctgggagcggattgacaagaaagtggaaggcctgagcaagcacatcaagctggaagaggaacggagaagcgaggacgcccagagcaaggccgccctgaccgactggctgcgggctaaggccagcttcgtgatcgagggcctgaaggaggccgacaaggacgagttctgcagatgcgagctgaagctgcagaagtggtacggggacctgcggggaaagcccttcgccatcgaagccgagaacagcatcctggacatcagcggcttcagcaagcagtacaactgtgccttcatctggcagaaggacggcgtgaagaagctgaacctgtacctgatcatcaactacttcaagggcggcaagctgcggttcaagaagatcaaacctgaagccttcgaagccaacagattctacaccgtgatcaacaaaaagagcggcgagatcgtgcccatggaggtgaacttcaacttcgacgaccccaacctgatcatcctgcctctggcctttggcaagagacagggcagagaattcatctggaacgacctgctgtccctggaaaccggcagcctgaagctggccaacggaagagtgatcgagaagacactgtacaacagaagaacccggcaggatgagcctgccctgttcgtggccctgaccttcgagcggcgggaggtcctggactcctccaatatcaaaccaatgaacctgatcggcgtggcaagaggcgaaaacatccccgccgtgatcgccctgaccgaccccgagggctgcccactgagccggtttaaggatagcctgggaaacccaacccacatcctgagaatcggcgagagctataaggagaagcagcggaccatccaggccaagaaggaggtggagcagcggagagccggcggctacagccggaagtacgccagcaaagccaagaatctggcagacgatatggtgagaaacaccgctagagatctgctgtactacgccgtgacccaggatgccatgctgatcttcgccaacctgagccggggcttcggccggcagggcaagcggaccttcatggccgagagacagtacacacggatggaggactggctgaccgccaagctggcctacgagggcctgagcaagacctacctgtccaagacactggcccagtacacctccaagacatgcagcaactgtgggtttaccatcaccagcgccgactacgacagggtgctggagaagctgaagaagacagcaacaggctggatgaccacaattaacggcaaggagctgaaggtggagggccagattacctactacaacagatacaagagacagaacgtagtcaaggacctgtccgtcgagctggatagactgagcgaagaatctgtgaacaacgacatctcctcctggacaaagggcagaagcggagaagctctgagcctcctgaagaaaagattctcccatagacccgtgcaggagaagttcgtgtgcctgaactgcggcttcgagacacacgcagccgagcaagccgccctgaacatcgccagatcctggctgttcctgcggagccaggagtacaagaaataccagacaaacaagacaaccggcaacaccgataagagagccttcgtcgagacctggcagtccttttaccggaagaagcttaaggaggtgtggaaacctgccgtgcggtctggcggatctggcggaggctccacaagcggcaaggagctgctgagcttcgaggacgtggccatgtacttcaccagggaggagtggggccacctgaacctgggccagaaggacctgtacagggacgtgatgctggagaactacaggaacatggtgctgctgggcttccagttccccaagcccgaggtgatctgccagctggagaactgggacgagcagtggatcctggacctgcccagggccggcaacaggaaggccagcggcagcgcctgcaccagccccaagaaaaagagaaaagtctaagctgccttctgcggggcttgccttctggccatgcccttcttctctcccttgcacctgtacctcttggtctttgaataaagcctgagtaggaaggctagcaaaaaaaaaaaaaaaaaaaaaaaaaaaaaaaaaaaaaaaaaaaaaaaaaaaaaaaaaaaaaaaaaaaaaaaaaaaaaaaa

SEQ ID NO: 7242 - RNA, 5797 nt, synthetic construct
  source 1..5797: mol_type = other RNA
aggaaataagagagaaaagaagagtaagaagaaatataagagccaccatggcccctaagaagaagcgtaaagtgagccggatggaacgcctcgtctacgaggtgcggcagaagtgcagaaacatcgaggacatctgcatctcctgcggatctctgaacgtgaccctggagcacccactgttcatcggcggcatgtgccagaactgtaaaaactgttttctggagtgtgcctatcaatacgacgatgacggctaccagagctactgcaccatctgttgcggcggaagagaggtgctgatgtgtggaaataacaactgctgccggtgcttctgcgtggaatgcgtggacctgctggtgggccccggcgccgcccaggccgctattaaggaagatccttggaactgctacatgtgcggccacaagggcacatacggcctgctgagacggagagaggactggcctagcagactgcagatgttcttcgccaataaccacgaccaggagttcgacccccctaaggtgtaccctcccgtccccgccgagaagagaaagcccatccgggtcctgagcctgttcgatggcatcgccaccggtctgctggtgctgaaggacctgggcatccaggtggataggtacattgcctccgaggtgtgcgaggactccatcaccgtgggaatggtgcgtcatcagggcaagatcatgtacgtgggcgacgtgcggagcgtgacacagaagcatatccaggagtggggccctttcgacctggtgatcggcggcagcccttgcaatgacctgagcatcgtgaacccagcccggaagggcctgtacgagggaaccggcagactgttcttcgagttttacagactgctgcacgacgcccggcctaaggaaggcgacgaccggcccttcttttggctgttcgagaatgtggtggccatgggagtcagcgacaagcgggatattagccggttcctggagagcaaccccgtgatgatcgatgccaaggaagtgagcgccgcccaccgggccagatacttctggggcaatctgcctggcatgaacagacccctggccagcaccgtgaacgacaagctggagctgcaggagtgcctggagcacggccggatcgccaagttcagcaaggtgagaaccatcaccacccgaagcaacagcatcaaacaaggcaaggaccagcactttcctgtgttcatgaacgagaaggaggacatcctgtggtgtaccgagatggagagagtgttcgggttcccagtccactacacagatgtcagcaacatgtctagactggccagacagagactgctgggaagaagctggtccgtccctgtgatcagacacctgttcgcccctctgaaggagtacttcgcctgcgtgagcagcggcaacagcaacgccaacagccggggccccagcttctctagcggcctggtgccactgtccctgagagggagccacatgggccccatggagatctacaaaaccgtgagcgcctggaagcggcagcctgtgcgcgtgctgagcctgtttcggaatatcgataaagtcctgaaaagcctgggattcctggagagcggctctggctccggcggtggcaccctgaagtacgtggaggatgtgacaaacgtggtcagacgggatgtggagaagtggggccccttcgatctggtgtacggcagcacccaacccctgggcagctcttgtgaccggtgccctggctggtacatgtttcagttccaccggatcctgcagtacgccctgccgagacaggagtcccagcggccattcttttggattttcatggacaacttgctgctgaccgaggatgaccaggaaactaccactcggttcctgcagaccgaagccgtgaccctgcaggacgtgagaggccgggactaccagaacgccatgcgggtgtggtccaacatccctggactgaaaagcaagcacgcacctctgacccctaaagaagaggagtacctgcaggcccaggtgcggagcagaagcaagctggacgcccctaaggtggatctgctggtgaagaattgcctcctgcccctgagagagtacttcaagtatttcagccagaatagtctgcccctgggcggcccaagcagcggcgcccctcctcccagcggcggcagcccagccggctccccaacctctaccgaggagggcacctctgagtccgccacccccgagagcggccctggcacctccaccgagcccagcgagggcagcgcacccggcagccctgccggcagccccacctccacagaggagggaaccagcaccgagcccagcgaaggcagcgccccaggcaccagcaccgagcctagtgagggcggctctggcggcggcagcgcccaggagattaaacggatcaacaagatcagaagaagacttgtgaaagacagcaacaccaagaaggccggcaagacaggccccatgaaaaccctgctggttagagtgatgacacccgatctgagagagcggctggaaaacctgagaaagaagcctgaaaatatcccccagcccatcagcaatacatctagagccaacctgaataagctgctgaccgattacaccgaaatgaagaaggcgatcctgcatgtgtactgggaagagttccagaaggaccctgtgggcctgatgagccgggtggcccagcctgccagcaagaagatcgatcagaacaagctgaaacctgagatggacgagaagggcaacctgaccaccgccggctttgcctgctctcagtgtggccagcccctgttcgtgtacaagctggagcaggtgtctgagaagggcaaggcttacaccaactacttcggacggtgcaatgtggccgagcacgaaaagctgatcctgctggcccagctgaagcccgagaaggatagcgacgaagccgtgacatatagcctgggaaagtttgggcagagggccctggatttctacagcattcatgtgaccaaggagtccacccaccccgtgaagcccctggcccagatcgccggaaacagatacgcctccggacctgtgggaaaggccctgagcgacgcatgtatgggcacaatcgcctccttcctgtctaagtaccaggacatcatcatcgaacaccagaaggtggtgaagggcaaccagaagagactggagagcctgcgggagctggccggcaaggaaaacctggaataccctagcgtgaccctgccacctcagcctcacaccaaggagggcgttgatgcctacaacgaagtgatcgcccgggtgcgaatgtgggtgaacctgaacctgtggcagaagctgaagctaagcagagatgatgccaagcctctgctgagactgaagggattcccttcctttcctctggtcgagagacaggccaacgaagtggactggtgggacatggtgtgtaacgtgaagaagctgatcaacgagaaaaaggaggatggcaaggtgttttggcagaatctggctggctacaagagacaggaagccctgagaccatacctgagcagcgaggaagatcggaagaagggaaagaaattcgctcggtaccagctgggcgacctgctgctgcacctggaaaagaagcacggcgaggactggggaaaggtgtacgacgaggcctgggagcggattgacaagaaagtggaaggcctgagcaagcacatcaagctggaagaggaacggagaagcgaggacgcccagagcaaggccgccctgaccgactggctgcgggctaaggccagcttcgtgatcgagggcctgaaggaggccgacaaggacgagttctgcagatgcgagctgaagctgcagaagtggtacggggacctgcggggaaagcccttcgccatcgaagccgagaacagcatcctggacatcagcggcttcagcaagcagtacaactgtgccttcatctggcagaaggacggcgtgaagaagctgaacctgtacctgatcatcaactacttcaagggcggcaagctgcggttcaagaagatcaaacctgaagccttcgaagccaacagattctacaccgtgatcaacaaaaagagcggcgagatcgtgcccatggaggtgaacttcaacttcgacgaccccaacctgatcatcctgcctctggcctttggcaagagacagggcagagaattcatctggaacgacctgctgtccctggaaaccggcagcctgaagctggccaacggaagagtgatcgagaagacactgtacaacagaagaacccggcaggatgagcctgccctgttcgtggccctgaccttcgagcggcgggaggtcctggactcctccaatatcaaaccaatgaacctgatcggcgtggcaagaggcgaaaacatccccgccgtgatcgccctgaccgaccccgagggctgcccactgagccggtttaaggatagcctgggaaacccaacccacatcctgagaatcggcgagagctataaggagaagcagcggaccatccaggccaagaaggaggtggagcagcggagagccggcggctacagccggaagtacgccagcaaagccaagaatctggcagacgatatggtgagaaacaccgctagagatctgctgtactacgccgtgacccaggatgccatgctgatcttcgccaacctgagccggggcttcggccggcagggcaagcggaccttcatggccgagagacagtacacacggatggaggactggctgaccgccaagctggcctacgagggcctgagcaagacctacctgtccaagacactggcccagtacacctccaagacatgcagcaactgtgggtttaccatcaccagcgccgactacgacagggtgctggagaagctgaagaagacagcaacaggctggatgaccacaattaacggcaaggagctgaaggtggagggccagattacctactacaacagatacaagagacagaacgtagtcaaggacctgtccgtcgagctggatagactgagcgaagaatctgtgaacaacgacatctcctcctggacaaagggcagaagcggagaagctctgagcctcctgaagaaaagattctcccatagacccgtgcaggagaagttcgtgtgcctgaactgcggcttcgagacacacgcagccgagcaagccgccctgaacatcgccagatcctggctgttcctgcggagccaggagtacaagaaataccagacaaacaagacaaccggcaacaccgataagagagccttcgtcgagacctggcagtccttttaccggaagaagcttaaggaggtgtggaaacctgccgtgcggtctggcggatctggcggaggctccacaagccccctggagagcgtgaccttcgaggacgtggccgtggacttcacccaggaggagtggagcctgctggacaagagccagaagaacctgttcaggaacgtgatgctggagaccgtgacccacctggtgagcgtgggctaccagatcagcaagagcgacgtgatcttccagctggagcagggcaaggagctgtggcccgaggccgccggcggcctgcagggccagagccccgacgaggtgacccccaccagccccaagaaaaagagaaaagtctaagctgccttctgcggggcttgccttctggccatgcccttcttctctcccttgcacctgtacctcttggtctttgaataaagcctgagtaggaaggctagcaaaaaaaaaaaaaaaaaaaaaaaaaaaaaaaaaaaaaaaaaaaaaaaaaaaaaaaaaaaaaaaaaaaaaaaaaaaaaaaa

SEQ ID NO: 7243 - RNA, 5797 nt, synthetic construct
  source 1..5797: mol_type = other RNA
aggaaataagagagaaaagaagagtaagaagaaatataagagccaccatggcccctaagaagaagcgtaaagtgagccggatggaacgcctcgtctacgaggtgcggcagaagtgcagaaacatcgaggacatctgcatctcctgcggatctctgaacgtgaccctggagcacccactgttcatcggcggcatgtgccagaactgtaaaaactgttttctggagtgtgcctatcaatacgacgatgacggctaccagagctactgcaccatctgttgcggcggaagagaggtgctgatgtgtggaaataacaactgctgccggtgcttctgcgtggaatgcgtggacctgctggtgggccccggcgccgcccaggccgctattaaggaagatccttggaactgctacatgtgcggccacaagggcacatacggcctgctgagacggagagaggactggcctagcagactgcagatgttcttcgccaataaccacgaccaggagttcgacccccctaaggtgtaccctcccgtccccgccgagaagagaaagcccatccgggtcctgagcctgttcgatggcatcgccaccggtctgctggtgctgaaggacctgggcatccaggtggataggtacattgcctccgaggtgtgcgaggactccatcaccgtgggaatggtgcgtcatcagggcaagatcatgtacgtgggcgacgtgcggagcgtgacacagaagcatatccaggagtggggccctttcgacctggtgatcggcggcagcccttgcaatgacctgagcatcgtgaacccagcccggaagggcctgtacgagggaaccggcagactgttcttcgagttttacagactgctgcacgacgcccggcctaaggaaggcgacgaccggcccttcttttggctgttcgagaatgtggtggccatgggagtcagcgacaagcgggatattagccggttcctggagagcaaccccgtgatgatcgatgccaaggaagtgagcgccgcccaccgggccagatacttctggggcaatctgcctggcatgaacagacccctggccagcaccgtgaacgacaagctggagctgcaggagtgcctggagcacggccggatcgccaagttcagcaaggtgagaaccatcaccacccgaagcaacagcatcaaacaaggcaaggaccagcactttcctgtgttcatgaacgagaaggaggacatcctgtggtgtaccgagatggagagagtgttcgggttcccagtccactacacagatgtcagcaacatgtctagactggccagacagagactgctgggaagaagctggtccgtccctgtgatcagacacctgttcgcccctctgaaggagtacttcgcctgcgtgagcagcggcaacagcaacgccaacagccggggccccagcttctctagcggcctggtgccactgtccctgagagggagccacatgggccccatggagatctacaaaaccgtgagcgcctggaagcggcagcctgtgcgcgtgctgagcctgtttcggaatatcgataaagtcctgaaaagcctgggattcctggagagcggctctggctccggcggtggcaccctgaagtacgtggaggatgtgacaaacgtggtcagacgggatgtggagaagtggggccccttcgatctggtgtacggcagcacccaacccctgggcagctcttgtgaccggtgccctggctggtacatgtttcagttccaccggatcctgcagtacgccctgccgagacaggagtcccagcggccattcttttggattttcatggacaacttgctgctgaccgaggatgaccaggaaactaccactcggttcctgcagaccgaagccgtgaccctgcaggacgtgagaggccgggactaccagaacgccatgcgggtgtggtccaacatccctggactgaaaagcaagcacgcacctctgacccctaaagaagaggagtacctgcaggcccaggtgcggagcagaagcaagctggacgcccctaaggtggatctgctggtgaagaattgcctcctgcccctgagagagtacttcaagtatttcagccagaatagtctgcccctgggcggcccaagcagcggcgcccctcctcccagcggcggcagcccagccggctccccaacctctaccgaggagggcacctctgagtccgccacccccgagagcggccctggcacctccaccgagcccagcgagggcagcgcacccggcagccctgccggcagccccacctccacagaggagggaaccagcaccgagcccagcgaaggcagcgccccaggcaccagcaccgagcctagtgagggcggctctggcggcggcagcgcccaggagattaaacggatcaacaagatcagaagaagacttgtgaaagacagcaacaccaagaaggccggcaagacaggccccatgaaaaccctgctggttagagtgatgacacccgatctgagagagcggctggaaaacctgagaaagaagcctgaaaatatcccccagcccatcagcaatacatctagagccaacctgaataagctgctgaccgattacaccgaaatgaagaaggcgatcctgcatgtgtactgggaagagttccagaaggaccctgtgggcctgatgagccgggtggcccagcctgccagcaagaagatcgatcagaacaagctgaaacctgagatggacgagaagggcaacctgaccaccgccggctttgcctgctctcagtgtggccagcccctgttcgtgtacaagctggagcaggtgtctgagaagggcaaggcttacaccaactacttcggacggtgcaatgtggccgagcacgaaaagctgatcctgctggcccagctgaagcccgagaaggatagcgacgaagccgtgacatatagcctgggaaagtttgggcagagggccctggatttctacagcattcatgtgaccaaggagtccacccaccccgtgaagcccctggcccagatcgccggaaacagatacgcctccggacctgtgggaaaggccctgagcgacgcatgtatgggcacaatcgcctccttcctgtctaagtaccaggacatcatcatcgaacaccagaaggtggtgaagggcaaccagaagagactggagagcctgcgggagctggccggcaaggaaaacctggaataccctagcgtgaccctgccacctcagcctcacaccaaggagggcgttgatgcctacaacgaagtgatcgcccgggtgcgaatgtgggtgaacctgaacctgtggcagaagctgaagctaagcagagatgatgccaagcctctgctgagactgaagggattcccttcctttcctctggtcgagagacaggccaacgaagtggactggtgggacatggtgtgtaacgtgaagaagctgatcaacgagaaaaaggaggatggcaaggtgttttggcagaatctggctggctacaagagacaggaagccctgagaccatacctgagcagcgaggaagatcggaagaagggaaagaaattcgctcggtaccagctgggcgacctgctgctgcacctggaaaagaagcacggcgaggactggggaaaggtgtacgacgaggcctgggagcggattgacaagaaagtggaaggcctgagcaagcacatcaagctggaagaggaacggagaagcgaggacgcccagagcaaggccgccctgaccgactggctgcgggctaaggccagcttcgtgatcgagggcctgaaggaggccgacaaggacgagttctgcagatgcgagctgaagctgcagaagtggtacggggacctgcggggaaagcccttcgccatcgaagccgagaacagcatcctggacatcagcggcttcagcaagcagtacaactgtgccttcatctggcagaaggacggcgtgaagaagctgaacctgtacctgatcatcaactacttcaagggcggcaagctgcggttcaagaagatcaaacctgaagccttcgaagccaacagattctacaccgtgatcaacaaaaagagcggcgagatcgtgcccatggaggtgaacttcaacttcgacgaccccaacctgatcatcctgcctctggcctttggcaagagacagggcagagaattcatctggaacgacctgctgtccctggaaaccggcagcctgaagctggccaacggaagagtgatcgagaagacactgtacaacagaagaacccggcaggatgagcctgccctgttcgtggccctgaccttcgagcggcgggaggtcctggactcctccaatatcaaaccaatgaacctgatcggcgtggcaagaggcgaaaacatccccgccgtgatcgccctgaccgaccccgagggctgcccactgagccggtttaaggatagcctgggaaacccaacccacatcctgagaatcggcgagagctataaggagaagcagcggaccatccaggccaagaaggaggtggagcagcggagagccggcggctacagccggaagtacgccagcaaagccaagaatctggcagacgatatggtgagaaacaccgctagagatctgctgtactacgccgtgacccaggatgccatgctgatcttcgccaacctgagccggggcttcggccggcagggcaagcggaccttcatggccgagagacagtacacacggatggaggactggctgaccgccaagctggcctacgagggcctgagcaagacctacctgtccaagacactggcccagtacacctccaagacatgcagcaactgtgggtttaccatcaccagcgccgactacgacagggtgctggagaagctgaagaagacagcaacaggctggatgaccacaattaacggcaaggagctgaaggtggagggccagattacctactacaacagatacaagagacagaacgtagtcaaggacctgtccgtcgagctggatagactgagcgaagaatctgtgaacaacgacatctcctcctggacaaagggcagaagcggagaagctctgagcctcctgaagaaaagattctcccatagacccgtgcaggagaagttcgtgtgcctgaactgcggcttcgagacacacgcagccgagcaagccgccctgaacatcgccagatcctggctgttcctgcggagccaggagtacaagaaataccagacaaacaagacaaccggcaacaccgataagagagccttcgtcgagacctggcagtccttttaccggaagaagcttaaggaggtgtggaaacctgccgtgcggtctggcggatctggcggaggctccacaagcatggcccagggcctggtgaccttcagggacgtggccatcgagttcagcctggaggagtggaagtgcctggagcccgcccagagggacctgtacagggaggtgaccctggagaacttcggccacctggccagcctgggcctgagcatcagcaagcccgacgtggtgagcctgctggagcagggcaaggagccctggatgatcgccaacgacgtgaccggcccctggtaccccgacctggagagcaccagccccaagaaaaagagaaaagtctaagctgccttctgcggggcttgccttctggccatgcccttcttctctcccttgcacctgtacctcttggtctttgaataaagcctgagtaggaaggctagcaaaaaaaaaaaaaaaaaaaaaaaaaaaaaaaaaaaaaaaaaaaaaaaaaaaaaaaaaaaaaaaaaaaaaaaaaaaaaaaa

SEQ ID NO: 7244 - RNA, 5797 nt, synthetic construct
  source 1..5797: mol_type = other RNA
aggaaataagagagaaaagaagagtaagaagaaatataagagccaccatggcccctaagaagaagcgtaaagtgagccggatggaacgcctcgtctacgaggtgcggcagaagtgcagaaacatcgaggacatctgcatctcctgcggatctctgaacgtgaccctggagcacccactgttcatcggcggcatgtgccagaactgtaaaaactgttttctggagtgtgcctatcaatacgacgatgacggctaccagagctactgcaccatctgttgcggcggaagagaggtgctgatgtgtggaaataacaactgctgccggtgcttctgcgtggaatgcgtggacctgctggtgggccccggcgccgcccaggccgctattaaggaagatccttggaactgctacatgtgcggccacaagggcacatacggcctgctgagacggagagaggactggcctagcagactgcagatgttcttcgccaataaccacgaccaggagttcgacccccctaaggtgtaccctcccgtccccgccgagaagagaaagcccatccgggtcctgagcctgttcgatggcatcgccaccggtctgctggtgctgaaggacctgggcatccaggtggataggtacattgcctccgaggtgtgcgaggactccatcaccgtgggaatggtgcgtcatcagggcaagatcatgtacgtgggcgacgtgcggagcgtgacacagaagcatatccaggagtggggccctttcgacctggtgatcggcggcagcccttgcaatgacctgagcatcgtgaacccagcccggaagggcctgtacgagggaaccggcagactgttcttcgagttttacagactgctgcacgacgcccggcctaaggaaggcgacgaccggcccttcttttggctgttcgagaatgtggtggccatgggagtcagcgacaagcgggatattagccggttcctggagagcaaccccgtgatgatcgatgccaaggaagtgagcgccgcccaccgggccagatacttctggggcaatctgcctggcatgaacagacccctggccagcaccgtgaacgacaagctggagctgcaggagtgcctggagcacggccggatcgccaagttcagcaaggtgagaaccatcaccacccgaagcaacagcatcaaacaaggcaaggaccagcactttcctgtgttcatgaacgagaaggaggacatcctgtggtgtaccgagatggagagagtgttcgggttcccagtccactacacagatgtcagcaacatgtctagactggccagacagagactgctgggaagaagctggtccgtccctgtgatcagacacctgttcgcccctctgaaggagtacttcgcctgcgtgagcagcggcaacagcaacgccaacagccggggccccagcttctctagcggcctggtgccactgtccctgagagggagccacatgggccccatggagatctacaaaaccgtgagcgcctggaagcggcagcctgtgcgcgtgctgagcctgtttcggaatatcgataaagtcctgaaaagcctgggattcctggagagcggctctggctccggcggtggcaccctgaagtacgtggaggatgtgacaaacgtggtcagacgggatgtggagaagtggggccccttcgatctggtgtacggcagcacccaacccctgggcagctcttgtgaccggtgccctggctggtacatgtttcagttccaccggatcctgcagtacgccctgccgagacaggagtcccagcggccattcttttggattttcatggacaacttgctgctgaccgaggatgaccaggaaactaccactcggttcctgcagaccgaagccgtgaccctgcaggacgtgagaggccgggactaccagaacgccatgcgggtgtggtccaacatccctggactgaaaagcaagcacgcacctctgacccctaaagaagaggagtacctgcaggcccaggtgcggagcagaagcaagctggacgcccctaaggtggatctgctggtgaagaattgcctcctgcccctgagagagtacttcaagtatttcagccagaatagtctgcccctgggcggcccaagcagcggcgcccctcctcccagcggcggcagcccagccggctccccaacctctaccgaggagggcacctctgagtccgccacccccgagagcggccctggcacctccaccgagcccagcgagggcagcgcacccggcagccctgccggcagccccacctccacagaggagggaaccagcaccgagcccagcgaaggcagcgccccaggcaccagcaccgagcctagtgagggcggctctggcggcggcagcgcccaggagattaaacggatcaacaagatcagaagaagacttgtgaaagacagcaacaccaagaaggccggcaagacaggccccatgaaaaccctgctggttagagtgatgacacccgatctgagagagcggctggaaaacctgagaaagaagcctgaaaatatcccccagcccatcagcaatacatctagagccaacctgaataagctgctgaccgattacaccgaaatgaagaaggcgatcctgcatgtgtactgggaagagttccagaaggaccctgtgggcctgatgagccgggtggcccagcctgccagcaagaagatcgatcagaacaagctgaaacctgagatggacgagaagggcaacctgaccaccgccggctttgcctgctctcagtgtggccagcccctgttcgtgtacaagctggagcaggtgtctgagaagggcaaggcttacaccaactacttcggacggtgcaatgtggccgagcacgaaaagctgatcctgctggcccagctgaagcccgagaaggatagcgacgaagccgtgacatatagcctgggaaagtttgggcagagggccctggatttctacagcattcatgtgaccaaggagtccacccaccccgtgaagcccctggcccagatcgccggaaacagatacgcctccggacctgtgggaaaggccctgagcgacgcatgtatgggcacaatcgcctccttcctgtctaagtaccaggacatcatcatcgaacaccagaaggtggtgaagggcaaccagaagagactggagagcctgcgggagctggccggcaaggaaaacctggaataccctagcgtgaccctgccacctcagcctcacaccaaggagggcgttgatgcctacaacgaagtgatcgcccgggtgcgaatgtgggtgaacctgaacctgtggcagaagctgaagctaagcagagatgatgccaagcctctgctgagactgaagggattcccttcctttcctctggtcgagagacaggccaacgaagtggactggtgggacatggtgtgtaacgtgaagaagctgatcaacgagaaaaaggaggatggcaaggtgttttggcagaatctggctggctacaagagacaggaagccctgagaccatacctgagcagcgaggaagatcggaagaagggaaagaaattcgctcggtaccagctgggcgacctgctgctgcacctggaaaagaagcacggcgaggactggggaaaggtgtacgacgaggcctgggagcggattgacaagaaagtggaaggcctgagcaagcacatcaagctggaagaggaacggagaagcgaggacgcccagagcaaggccgccctgaccgactggctgcgggctaaggccagcttcgtgatcgagggcctgaaggaggccgacaaggacgagttctgcagatgcgagctgaagctgcagaagtggtacggggacctgcggggaaagcccttcgccatcgaagccgagaacagcatcctggacatcagcggcttcagcaagcagtacaactgtgccttcatctggcagaaggacggcgtgaagaagctgaacctgtacctgatcatcaactacttcaagggcggcaagctgcggttcaagaagatcaaacctgaagccttcgaagccaacagattctacaccgtgatcaacaaaaagagcggcgagatcgtgcccatggaggtgaacttcaacttcgacgaccccaacctgatcatcctgcctctggcctttggcaagagacagggcagagaattcatctggaacgacctgctgtccctggaaaccggcagcctgaagctggccaacggaagagtgatcgagaagacactgtacaacagaagaacccggcaggatgagcctgccctgttcgtggccctgaccttcgagcggcgggaggtcctggactcctccaatatcaaaccaatgaacctgatcggcgtggcaagaggcgaaaacatccccgccgtgatcgccctgaccgaccccgagggctgcccactgagccggtttaaggatagcctgggaaacccaacccacatcctgagaatcggcgagagctataaggagaagcagcggaccatccaggccaagaaggaggtggagcagcggagagccggcggctacagccggaagtacgccagcaaagccaagaatctggcagacgatatggtgagaaacaccgctagagatctgctgtactacgccgtgacccaggatgccatgctgatcttcgccaacctgagccggggcttcggccggcagggcaagcggaccttcatggccgagagacagtacacacggatggaggactggctgaccgccaagctggcctacgagggcctgagcaagacctacctgtccaagacactggcccagtacacctccaagacatgcagcaactgtgggtttaccatcaccagcgccgactacgacagggtgctggagaagctgaagaagacagcaacaggctggatgaccacaattaacggcaaggagctgaaggtggagggccagattacctactacaacagatacaagagacagaacgtagtcaaggacctgtccgtcgagctggatagactgagcgaagaatctgtgaacaacgacatctcctcctggacaaagggcagaagcggagaagctctgagcctcctgaagaaaagattctcccatagacccgtgcaggagaagttcgtgtgcctgaactgcggcttcgagacacacgcagccgagcaagccgccctgaacatcgccagatcctggctgttcctgcggagccaggagtacaagaaataccagacaaacaagacaaccggcaacaccgataagagagccttcgtcgagacctggcagtccttttaccggaagaagcttaaggaggtgtggaaacctgccgtgcggtctggcggatctggcggaggctccacaagcgcccagaaggtgctgaccttcagggacgtggccatcgagttcagcctggaggagtggaagttcctggaccccgcccagcagaacctgtacagggacgtgatgctggagaactacaggaacctgttcagcatcggcctgaccgtgagcaagcccggcctgatcacctgcctggagcagaggaaggccccctggaacctgaagaggagggaggccgtggacggccacatcttcttcgccgagtacaccagccccaagaaaaagagaaaagtctaagctgccttctgcggggcttgccttctggccatgcccttcttctctcccttgcacctgtacctcttggtctttgaataaagcctgagtaggaaggctagcaaaaaaaaaaaaaaaaaaaaaaaaaaaaaaaaaaaaaaaaaaaaaaaaaaaaaaaaaaaaaaaaaaaaaaaaaaaaaaaa

SEQ ID NO: 7245 - RNA, 5797 nt, synthetic construct
  source 1..5797: mol_type = other RNA
aggaaataagagagaaaagaagagtaagaagaaatataagagccaccatggcccctaagaagaagcgtaaagtgagccggatggaacgcctcgtctacgaggtgcggcagaagtgcagaaacatcgaggacatctgcatctcctgcggatctctgaacgtgaccctggagcacccactgttcatcggcggcatgtgccagaactgtaaaaactgttttctggagtgtgcctatcaatacgacgatgacggctaccagagctactgcaccatctgttgcggcggaagagaggtgctgatgtgtggaaataacaactgctgccggtgcttctgcgtggaatgcgtggacctgctggtgggccccggcgccgcccaggccgctattaaggaagatccttggaactgctacatgtgcggccacaagggcacatacggcctgctgagacggagagaggactggcctagcagactgcagatgttcttcgccaataaccacgaccaggagttcgacccccctaaggtgtaccctcccgtccccgccgagaagagaaagcccatccgggtcctgagcctgttcgatggcatcgccaccggtctgctggtgctgaaggacctgggcatccaggtggataggtacattgcctccgaggtgtgcgaggactccatcaccgtgggaatggtgcgtcatcagggcaagatcatgtacgtgggcgacgtgcggagcgtgacacagaagcatatccaggagtggggccctttcgacctggtgatcggcggcagcccttgcaatgacctgagcatcgtgaacccagcccggaagggcctgtacgagggaaccggcagactgttcttcgagttttacagactgctgcacgacgcccggcctaaggaaggcgacgaccggcccttcttttggctgttcgagaatgtggtggccatgggagtcagcgacaagcgggatattagccggttcctggagagcaaccccgtgatgatcgatgccaaggaagtgagcgccgcccaccgggccagatacttctggggcaatctgcctggcatgaacagacccctggccagcaccgtgaacgacaagctggagctgcaggagtgcctggagcacggccggatcgccaagttcagcaaggtgagaaccatcaccacccgaagcaacagcatcaaacaaggcaaggaccagcactttcctgtgttcatgaacgagaaggaggacatcctgtggtgtaccgagatggagagagtgttcgggttcccagtccactacacagatgtcagcaacatgtctagactggccagacagagactgctgggaagaagctggtccgtccctgtgatcagacacctgttcgcccctctgaaggagtacttcgcctgcgtgagcagcggcaacagcaacgccaacagccggggccccagcttctctagcggcctggtgccactgtccctgagagggagccacatgggccccatggagatctacaaaaccgtgagcgcctggaagcggcagcctgtgcgcgtgctgagcctgtttcggaatatcgataaagtcctgaaaagcctgggattcctggagagcggctctggctccggcggtggcaccctgaagtacgtggaggatgtgacaaacgtggtcagacgggatgtggagaagtggggccccttcgatctggtgtacggcagcacccaacccctgggcagctcttgtgaccggtgccctggctggtacatgtttcagttccaccggatcctgcagtacgccctgccgagacaggagtcccagcggccattcttttggattttcatggacaacttgctgctgaccgaggatgaccaggaaactaccactcggttcctgcagaccgaagccgtgaccctgcaggacgtgagaggccgggactaccagaacgccatgcgggtgtggtccaacatccctggactgaaaagcaagcacgcacctctgacccctaaagaagaggagtacctgcaggcccaggtgcggagcagaagcaagctggacgcccctaaggtggatctgctggtgaagaattgcctcctgcccctgagagagtacttcaagtatttcagccagaatagtctgcccctgggcggcccaagcagcggcgcccctcctcccagcggcggcagcccagccggctccccaacctctaccgaggagggcacctctgagtccgccacccccgagagcggccctggcacctccaccgagcccagcgagggcagcgcacccggcagccctgccggcagccccacctccacagaggagggaaccagcaccgagcccagcgaaggcagcgccccaggcaccagcaccgagcctagtgagggcggctctggcggcggcagcgcccaggagattaaacggatcaacaagatcagaagaagacttgtgaaagacagcaacaccaagaaggccggcaagacaggccccatgaaaaccctgctggttagagtgatgacacccgatctgagagagcggctggaaaacctgagaaagaagcctgaaaatatcccccagcccatcagcaatacatctagagccaacctgaataagctgctgaccgattacaccgaaatgaagaaggcgatcctgcatgtgtactgggaagagttccagaaggaccctgtgggcctgatgagccgggtggcccagcctgccagcaagaagatcgatcagaacaagctgaaacctgagatggacgagaagggcaacctgaccaccgccggctttgcctgctctcagtgtggccagcccctgttcgtgtacaagctggagcaggtgtctgagaagggcaaggcttacaccaactacttcggacggtgcaatgtggccgagcacgaaaagctgatcctgctggcccagctgaagcccgagaaggatagcgacgaagccgtgacatatagcctgggaaagtttgggcagagggccctggatttctacagcattcatgtgaccaaggagtccacccaccccgtgaagcccctggcccagatcgccggaaacagatacgcctccggacctgtgggaaaggccctgagcgacgcatgtatgggcacaatcgcctccttcctgtctaagtaccaggacatcatcatcgaacaccagaaggtggtgaagggcaaccagaagagactggagagcctgcgggagctggccggcaaggaaaacctggaataccctagcgtgaccctgccacctcagcctcacaccaaggagggcgttgatgcctacaacgaagtgatcgcccgggtgcgaatgtgggtgaacctgaacctgtggcagaagctgaagctaagcagagatgatgccaagcctctgctgagactgaagggattcccttcctttcctctggtcgagagacaggccaacgaagtggactggtgggacatggtgtgtaacgtgaagaagctgatcaacgagaaaaaggaggatggcaaggtgttttggcagaatctggctggctacaagagacaggaagccctgagaccatacctgagcagcgaggaagatcggaagaagggaaagaaattcgctcggtaccagctgggcgacctgctgctgcacctggaaaagaagcacggcgaggactggggaaaggtgtacgacgaggcctgggagcggattgacaagaaagtggaaggcctgagcaagcacatcaagctggaagaggaacggagaagcgaggacgcccagagcaaggccgccctgaccgactggctgcgggctaaggccagcttcgtgatcgagggcctgaaggaggccgacaaggacgagttctgcagatgcgagctgaagctgcagaagtggtacggggacctgcggggaaagcccttcgccatcgaagccgagaacagcatcctggacatcagcggcttcagcaagcagtacaactgtgccttcatctggcagaaggacggcgtgaagaagctgaacctgtacctgatcatcaactacttcaagggcggcaagctgcggttcaagaagatcaaacctgaagccttcgaagccaacagattctacaccgtgatcaacaaaaagagcggcgagatcgtgcccatggaggtgaacttcaacttcgacgaccccaacctgatcatcctgcctctggcctttggcaagagacagggcagagaattcatctggaacgacctgctgtccctggaaaccggcagcctgaagctggccaacggaagagtgatcgagaagacactgtacaacagaagaacccggcaggatgagcctgccctgttcgtggccctgaccttcgagcggcgggaggtcctggactcctccaatatcaaaccaatgaacctgatcggcgtggcaagaggcgaaaacatccccgccgtgatcgccctgaccgaccccgagggctgcccactgagccggtttaaggatagcctgggaaacccaacccacatcctgagaatcggcgagagctataaggagaagcagcggaccatccaggccaagaaggaggtggagcagcggagagccggcggctacagccggaagtacgccagcaaagccaagaatctggcagacgatatggtgagaaacaccgctagagatctgctgtactacgccgtgacccaggatgccatgctgatcttcgccaacctgagccggggcttcggccggcagggcaagcggaccttcatggccgagagacagtacacacggatggaggactggctgaccgccaagctggcctacgagggcctgagcaagacctacctgtccaagacactggcccagtacacctccaagacatgcagcaactgtgggtttaccatcaccagcgccgactacgacagggtgctggagaagctgaagaagacagcaacaggctggatgaccacaattaacggcaaggagctgaaggtggagggccagattacctactacaacagatacaagagacagaacgtagtcaaggacctgtccgtcgagctggatagactgagcgaagaatctgtgaacaacgacatctcctcctggacaaagggcagaagcggagaagctctgagcctcctgaagaaaagattctcccatagacccgtgcaggagaagttcgtgtgcctgaactgcggcttcgagacacacgcagccgagcaagccgccctgaacatcgccagatcctggctgttcctgcggagccaggagtacaagaaataccagacaaacaagacaaccggcaacaccgataagagagccttcgtcgagacctggcagtccttttaccggaagaagcttaaggaggtgtggaaacctgccgtgcggtctggcggatctggcggaggctccacaagcaccatgaccaccgtgagcagcaccgccaggccccaggagagcgtggccttcgacgacgtggccgtgtacttcaccaagaaggagtgggccatcatggtgcccgaccagagggccctgtacagggacgtgatgctggagaactacgaggccgtggccttcgtggtgccccccaccagcaagcccgccctgatcagccacctggagcagggcaaggagccctgcttcacccagccccagggcgtgaccagccccaagaaaaagagaaaagtctaagctgccttctgcggggcttgccttctggccatgcccttcttctctcccttgcacctgtacctcttggtctttgaataaagcctgagtaggaaggctagcaaaaaaaaaaaaaaaaaaaaaaaaaaaaaaaaaaaaaaaaaaaaaaaaaaaaaaaaaaaaaaaaaaaaaaaaaaaaaaaa

SEQ ID NO: 7246 - RNA, 5797 nt, synthetic construct
  source 1..5797: mol_type = other RNA
aggaaataagagagaaaagaagagtaagaagaaatataagagccaccatggcccctaagaagaagcgtaaagtgagccggatggaacgcctcgtctacgaggtgcggcagaagtgcagaaacatcgaggacatctgcatctcctgcggatctctgaacgtgaccctggagcacccactgttcatcggcggcatgtgccagaactgtaaaaactgttttctggagtgtgcctatcaatacgacgatgacggctaccagagctactgcaccatctgttgcggcggaagagaggtgctgatgtgtggaaataacaactgctgccggtgcttctgcgtggaatgcgtggacctgctggtgggccccggcgccgcccaggccgctattaaggaagatccttggaactgctacatgtgcggccacaagggcacatacggcctgctgagacggagagaggactggcctagcagactgcagatgttcttcgccaataaccacgaccaggagttcgacccccctaaggtgtaccctcccgtccccgccgagaagagaaagcccatccgggtcctgagcctgttcgatggcatcgccaccggtctgctggtgctgaaggacctgggcatccaggtggataggtacattgcctccgaggtgtgcgaggactccatcaccgtgggaatggtgcgtcatcagggcaagatcatgtacgtgggcgacgtgcggagcgtgacacagaagcatatccaggagtggggccctttcgacctggtgatcggcggcagcccttgcaatgacctgagcatcgtgaacccagcccggaagggcctgtacgagggaaccggcagactgttcttcgagttttacagactgctgcacgacgcccggcctaaggaaggcgacgaccggcccttcttttggctgttcgagaatgtggtggccatgggagtcagcgacaagcgggatattagccggttcctggagagcaaccccgtgatgatcgatgccaaggaagtgagcgccgcccaccgggccagatacttctggggcaatctgcctggcatgaacagacccctggccagcaccgtgaacgacaagctggagctgcaggagtgcctggagcacggccggatcgccaagttcagcaaggtgagaaccatcaccacccgaagcaacagcatcaaacaaggcaaggaccagcactttcctgtgttcatgaacgagaaggaggacatcctgtggtgtaccgagatggagagagtgttcgggttcccagtccactacacagatgtcagcaacatgtctagactggccagacagagactgctgggaagaagctggtccgtccctgtgatcagacacctgttcgcccctctgaaggagtacttcgcctgcgtgagcagcggcaacagcaacgccaacagccggggccccagcttctctagcggcctggtgccactgtccctgagagggagccacatgggccccatggagatctacaaaaccgtgagcgcctggaagcggcagcctgtgcgcgtgctgagcctgtttcggaatatcgataaagtcctgaaaagcctgggattcctggagagcggctctggctccggcggtggcaccctgaagtacgtggaggatgtgacaaacgtggtcagacgggatgtggagaagtggggccccttcgatctggtgtacggcagcacccaacccctgggcagctcttgtgaccggtgccctggctggtacatgtttcagttccaccggatcctgcagtacgccctgccgagacaggagtcccagcggccattcttttggattttcatggacaacttgctgctgaccgaggatgaccaggaaactaccactcggttcctgcagaccgaagccgtgaccctgcaggacgtgagaggccgggactaccagaacgccatgcgggtgtggtccaacatccctggactgaaaagcaagcacgcacctctgacccctaaagaagaggagtacctgcaggcccaggtgcggagcagaagcaagctggacgcccctaaggtggatctgctggtgaagaattgcctcctgcccctgagagagtacttcaagtatttcagccagaatagtctgcccctgggcggcccaagcagcggcgcccctcctcccagcggcggcagcccagccggctccccaacctctaccgaggagggcacctctgagtccgccacccccgagagcggccctggcacctccaccgagcccagcgagggcagcgcacccggcagccctgccggcagccccacctccacagaggagggaaccagcaccgagcccagcgaaggcagcgccccaggcaccagcaccgagcctagtgagggcggctctggcggcggcagcgcccaggagattaaacggatcaacaagatcagaagaagacttgtgaaagacagcaacaccaagaaggccggcaagacaggccccatgaaaaccctgctggttagagtgatgacacccgatctgagagagcggctggaaaacctgagaaagaagcctgaaaatatcccccagcccatcagcaatacatctagagccaacctgaataagctgctgaccgattacaccgaaatgaagaaggcgatcctgcatgtgtactgggaagagttccagaaggaccctgtgggcctgatgagccgggtggcccagcctgccagcaagaagatcgatcagaacaagctgaaacctgagatggacgagaagggcaacctgaccaccgccggctttgcctgctctcagtgtggccagcccctgttcgtgtacaagctggagcaggtgtctgagaagggcaaggcttacaccaactacttcggacggtgcaatgtggccgagcacgaaaagctgatcctgctggcccagctgaagcccgagaaggatagcgacgaagccgtgacatatagcctgggaaagtttgggcagagggccctggatttctacagcattcatgtgaccaaggagtccacccaccccgtgaagcccctggcccagatcgccggaaacagatacgcctccggacctgtgggaaaggccctgagcgacgcatgtatgggcacaatcgcctccttcctgtctaagtaccaggacatcatcatcgaacaccagaaggtggtgaagggcaaccagaagagactggagagcctgcgggagctggccggcaaggaaaacctggaataccctagcgtgaccctgccacctcagcctcacaccaaggagggcgttgatgcctacaacgaagtgatcgcccgggtgcgaatgtgggtgaacctgaacctgtggcagaagctgaagctaagcagagatgatgccaagcctctgctgagactgaagggattcccttcctttcctctggtcgagagacaggccaacgaagtggactggtgggacatggtgtgtaacgtgaagaagctgatcaacgagaaaaaggaggatggcaaggtgttttggcagaatctggctggctacaagagacaggaagccctgagaccatacctgagcagcgaggaagatcggaagaagggaaagaaattcgctcggtaccagctgggcgacctgctgctgcacctggaaaagaagcacggcgaggactggggaaaggtgtacgacgaggcctgggagcggattgacaagaaagtggaaggcctgagcaagcacatcaagctggaagaggaacggagaagcgaggacgcccagagcaaggccgccctgaccgactggctgcgggctaaggccagcttcgtgatcgagggcctgaaggaggccgacaaggacgagttctgcagatgcgagctgaagctgcagaagtggtacggggacctgcggggaaagcccttcgccatcgaagccgagaacagcatcctggacatcagcggcttcagcaagcagtacaactgtgccttcatctggcagaaggacggcgtgaagaagctgaacctgtacctgatcatcaactacttcaagggcggcaagctgcggttcaagaagatcaaacctgaagccttcgaagccaacagattctacaccgtgatcaacaaaaagagcggcgagatcgtgcccatggaggtgaacttcaacttcgacgaccccaacctgatcatcctgcctctggcctttggcaagagacagggcagagaattcatctggaacgacctgctgtccctggaaaccggcagcctgaagctggccaacggaagagtgatcgagaagacactgtacaacagaagaacccggcaggatgagcctgccctgttcgtggccctgaccttcgagcggcgggaggtcctggactcctccaatatcaaaccaatgaacctgatcggcgtggcaagaggcgaaaacatccccgccgtgatcgccctgaccgaccccgagggctgcccactgagccggtttaaggatagcctgggaaacccaacccacatcctgagaatcggcgagagctataaggagaagcagcggaccatccaggccaagaaggaggtggagcagcggagagccggcggctacagccggaagtacgccagcaaagccaagaatctggcagacgatatggtgagaaacaccgctagagatctgctgtactacgccgtgacccaggatgccatgctgatcttcgccaacctgagccggggcttcggccggcagggcaagcggaccttcatggccgagagacagtacacacggatggaggactggctgaccgccaagctggcctacgagggcctgagcaagacctacctgtccaagacactggcccagtacacctccaagacatgcagcaactgtgggtttaccatcaccagcgccgactacgacagggtgctggagaagctgaagaagacagcaacaggctggatgaccacaattaacggcaaggagctgaaggtggagggccagattacctactacaacagatacaagagacagaacgtagtcaaggacctgtccgtcgagctggatagactgagcgaagaatctgtgaacaacgacatctcctcctggacaaagggcagaagcggagaagctctgagcctcctgaagaaaagattctcccatagacccgtgcaggagaagttcgtgtgcctgaactgcggcttcgagacacacgcagccgagcaagccgccctgaacatcgccagatcctggctgttcctgcggagccaggagtacaagaaataccagacaaacaagacaaccggcaacaccgataagagagccttcgtcgagacctggcagtccttttaccggaagaagcttaaggaggtgtggaaacctgccgtgcggtctggcggatctggcggaggctccacaagcatgagccaggtgaccttcagcgacgtggccatcgacttcagccacgaggagtgggcctgcctggacagcgcccagagggacctgtacaaggacgtgatggtgcagaactacgagaacctggtgagcgtgggcctgagcgtgaccaagccctacgtgatcatgctgctggaggacggcaaggagccctggatgatggagaagaagctgagcaaggactgggagagcaggtgggagaacaaggagaccagccccaagaaaaagagaaaagtctaagctgccttctgcggggcttgccttctggccatgcccttcttctctcccttgcacctgtacctcttggtctttgaataaagcctgagtaggaaggctagcaaaaaaaaaaaaaaaaaaaaaaaaaaaaaaaaaaaaaaaaaaaaaaaaaaaaaaaaaaaaaaaaaaaaaaaaaaaaaaaa

SEQ ID NO: 7247 - RNA, 5797 nt, synthetic construct
  source 1..5797: mol_type = other RNA
aggaaataagagagaaaagaagagtaagaagaaatataagagccaccatggcccctaagaagaagcgtaaagtgagccggatggaacgcctcgtctacgaggtgcggcagaagtgcagaaacatcgaggacatctgcatctcctgcggatctctgaacgtgaccctggagcacccactgttcatcggcggcatgtgccagaactgtaaaaactgttttctggagtgtgcctatcaatacgacgatgacggctaccagagctactgcaccatctgttgcggcggaagagaggtgctgatgtgtggaaataacaactgctgccggtgcttctgcgtggaatgcgtggacctgctggtgggccccggcgccgcccaggccgctattaaggaagatccttggaactgctacatgtgcggccacaagggcacatacggcctgctgagacggagagaggactggcctagcagactgcagatgttcttcgccaataaccacgaccaggagttcgacccccctaaggtgtaccctcccgtccccgccgagaagagaaagcccatccgggtcctgagcctgttcgatggcatcgccaccggtctgctggtgctgaaggacctgggcatccaggtggataggtacattgcctccgaggtgtgcgaggactccatcaccgtgggaatggtgcgtcatcagggcaagatcatgtacgtgggcgacgtgcggagcgtgacacagaagcatatccaggagtggggccctttcgacctggtgatcggcggcagcccttgcaatgacctgagcatcgtgaacccagcccggaagggcctgtacgagggaaccggcagactgttcttcgagttttacagactgctgcacgacgcccggcctaaggaaggcgacgaccggcccttcttttggctgttcgagaatgtggtggccatgggagtcagcgacaagcgggatattagccggttcctggagagcaaccccgtgatgatcgatgccaaggaagtgagcgccgcccaccgggccagatacttctggggcaatctgcctggcatgaacagacccctggccagcaccgtgaacgacaagctggagctgcaggagtgcctggagcacggccggatcgccaagttcagcaaggtgagaaccatcaccacccgaagcaacagcatcaaacaaggcaaggaccagcactttcctgtgttcatgaacgagaaggaggacatcctgtggtgtaccgagatggagagagtgttcgggttcccagtccactacacagatgtcagcaacatgtctagactggccagacagagactgctgggaagaagctggtccgtccctgtgatcagacacctgttcgcccctctgaaggagtacttcgcctgcgtgagcagcggcaacagcaacgccaacagccggggccccagcttctctagcggcctggtgccactgtccctgagagggagccacatgggccccatggagatctacaaaaccgtgagcgcctggaagcggcagcctgtgcgcgtgctgagcctgtttcggaatatcgataaagtcctgaaaagcctgggattcctggagagcggctctggctccggcggtggcaccctgaagtacgtggaggatgtgacaaacgtggtcagacgggatgtggagaagtggggccccttcgatctggtgtacggcagcacccaacccctgggcagctcttgtgaccggtgccctggctggtacatgtttcagttccaccggatcctgcagtacgccctgccgagacaggagtcccagcggccattcttttggattttcatggacaacttgctgctgaccgaggatgaccaggaaactaccactcggttcctgcagaccgaagccgtgaccctgcaggacgtgagaggccgggactaccagaacgccatgcgggtgtggtccaacatccctggactgaaaagcaagcacgcacctctgacccctaaagaagaggagtacctgcaggcccaggtgcggagcagaagcaagctggacgcccctaaggtggatctgctggtgaagaattgcctcctgcccctgagagagtacttcaagtatttcagccagaatagtctgcccctgggcggcccaagcagcggcgcccctcctcccagcggcggcagcccagccggctccccaacctctaccgaggagggcacctctgagtccgccacccccgagagcggccctggcacctccaccgagcccagcgagggcagcgcacccggcagccctgccggcagccccacctccacagaggagggaaccagcaccgagcccagcgaaggcagcgccccaggcaccagcaccgagcctagtgagggcggctctggcggcggcagcgcccaggagattaaacggatcaacaagatcagaagaagacttgtgaaagacagcaacaccaagaaggccggcaagacaggccccatgaaaaccctgctggttagagtgatgacacccgatctgagagagcggctggaaaacctgagaaagaagcctgaaaatatcccccagcccatcagcaatacatctagagccaacctgaataagctgctgaccgattacaccgaaatgaagaaggcgatcctgcatgtgtactgggaagagttccagaaggaccctgtgggcctgatgagccgggtggcccagcctgccagcaagaagatcgatcagaacaagctgaaacctgagatggacgagaagggcaacctgaccaccgccggctttgcctgctctcagtgtggccagcccctgttcgtgtacaagctggagcaggtgtctgagaagggcaaggcttacaccaactacttcggacggtgcaatgtggccgagcacgaaaagctgatcctgctggcccagctgaagcccgagaaggatagcgacgaagccgtgacatatagcctgggaaagtttgggcagagggccctggatttctacagcattcatgtgaccaaggagtccacccaccccgtgaagcccctggcccagatcgccggaaacagatacgcctccggacctgtgggaaaggccctgagcgacgcatgtatgggcacaatcgcctccttcctgtctaagtaccaggacatcatcatcgaacaccagaaggtggtgaagggcaaccagaagagactggagagcctgcgggagctggccggcaaggaaaacctggaataccctagcgtgaccctgccacctcagcctcacaccaaggagggcgttgatgcctacaacgaagtgatcgcccgggtgcgaatgtgggtgaacctgaacctgtggcagaagctgaagctaagcagagatgatgccaagcctctgctgagactgaagggattcccttcctttcctctggtcgagagacaggccaacgaagtggactggtgggacatggtgtgtaacgtgaagaagctgatcaacgagaaaaaggaggatggcaaggtgttttggcagaatctggctggctacaagagacaggaagccctgagaccatacctgagcagcgaggaagatcggaagaagggaaagaaattcgctcggtaccagctgggcgacctgctgctgcacctggaaaagaagcacggcgaggactggggaaaggtgtacgacgaggcctgggagcggattgacaagaaagtggaaggcctgagcaagcacatcaagctggaagaggaacggagaagcgaggacgcccagagcaaggccgccctgaccgactggctgcgggctaaggccagcttcgtgatcgagggcctgaaggaggccgacaaggacgagttctgcagatgcgagctgaagctgcagaagtggtacggggacctgcggggaaagcccttcgccatcgaagccgagaacagcatcctggacatcagcggcttcagcaagcagtacaactgtgccttcatctggcagaaggacggcgtgaagaagctgaacctgtacctgatcatcaactacttcaagggcggcaagctgcggttcaagaagatcaaacctgaagccttcgaagccaacagattctacaccgtgatcaacaaaaagagcggcgagatcgtgcccatggaggtgaacttcaacttcgacgaccccaacctgatcatcctgcctctggcctttggcaagagacagggcagagaattcatctggaacgacctgctgtccctggaaaccggcagcctgaagctggccaacggaagagtgatcgagaagacactgtacaacagaagaacccggcaggatgagcctgccctgttcgtggccctgaccttcgagcggcgggaggtcctggactcctccaatatcaaaccaatgaacctgatcggcgtggcaagaggcgaaaacatccccgccgtgatcgccctgaccgaccccgagggctgcccactgagccggtttaaggatagcctgggaaacccaacccacatcctgagaatcggcgagagctataaggagaagcagcggaccatccaggccaagaaggaggtggagcagcggagagccggcggctacagccggaagtacgccagcaaagccaagaatctggcagacgatatggtgagaaacaccgctagagatctgctgtactacgccgtgacccaggatgccatgctgatcttcgccaacctgagccggggcttcggccggcagggcaagcggaccttcatggccgagagacagtacacacggatggaggactggctgaccgccaagctggcctacgagggcctgagcaagacctacctgtccaagacactggcccagtacacctccaagacatgcagcaactgtgggtttaccatcaccagcgccgactacgacagggtgctggagaagctgaagaagacagcaacaggctggatgaccacaattaacggcaaggagctgaaggtggagggccagattacctactacaacagatacaagagacagaacgtagtcaaggacctgtccgtcgagctggatagactgagcgaagaatctgtgaacaacgacatctcctcctggacaaagggcagaagcggagaagctctgagcctcctgaagaaaagattctcccatagacccgtgcaggagaagttcgtgtgcctgaactgcggcttcgagacacacgcagccgagcaagccgccctgaacatcgccagatcctggctgttcctgcggagccaggagtacaagaaataccagacaaacaagacaaccggcaacaccgataagagagccttcgtcgagacctggcagtccttttaccggaagaagcttaaggaggtgtggaaacctgccgtgcggtctggcggatctggcggaggctccacaagcgcccagatgagggtgaccttcgaggacatcgccgtgagcttcagccccgaggagtgggagtacctggaccagggccagaaggagctgtacagggaggtgatgaaggagaactacgagatcctgatcagcctgggctgccccaacctgacccccgagatcatcagcaggatcgagaggggcgaggagccctacatcaggggcgagcccggcagcgaggagagggagaccggcaagagcagctgcaccagccccaagaaaaagagaaaagtctaagctgccttctgcggggcttgccttctggccatgcccttcttctctcccttgcacctgtacctcttggtctttgaataaagcctgagtaggaaggctagcaaaaaaaaaaaaaaaaaaaaaaaaaaaaaaaaaaaaaaaaaaaaaaaaaaaaaaaaaaaaaaaaaaaaaaaaaaaaaaaa

SEQ ID NO: 7248 - RNA, 5797 nt, synthetic construct
  source 1..5797: mol_type = other RNA
aggaaataagagagaaaagaagagtaagaagaaatataagagccaccatggcccctaagaagaagcgtaaagtgagccggatggaacgcctcgtctacgaggtgcggcagaagtgcagaaacatcgaggacatctgcatctcctgcggatctctgaacgtgaccctggagcacccactgttcatcggcggcatgtgccagaactgtaaaaactgttttctggagtgtgcctatcaatacgacgatgacggctaccagagctactgcaccatctgttgcggcggaagagaggtgctgatgtgtggaaataacaactgctgccggtgcttctgcgtggaatgcgtggacctgctggtgggccccggcgccgcccaggccgctattaaggaagatccttggaactgctacatgtgcggccacaagggcacatacggcctgctgagacggagagaggactggcctagcagactgcagatgttcttcgccaataaccacgaccaggagttcgacccccctaaggtgtaccctcccgtccccgccgagaagagaaagcccatccgggtcctgagcctgttcgatggcatcgccaccggtctgctggtgctgaaggacctgggcatccaggtggataggtacattgcctccgaggtgtgcgaggactccatcaccgtgggaatggtgcgtcatcagggcaagatcatgtacgtgggcgacgtgcggagcgtgacacagaagcatatccaggagtggggccctttcgacctggtgatcggcggcagcccttgcaatgacctgagcatcgtgaacccagcccggaagggcctgtacgagggaaccggcagactgttcttcgagttttacagactgctgcacgacgcccggcctaaggaaggcgacgaccggcccttcttttggctgttcgagaatgtggtggccatgggagtcagcgacaagcgggatattagccggttcctggagagcaaccccgtgatgatcgatgccaaggaagtgagcgccgcccaccgggccagatacttctggggcaatctgcctggcatgaacagacccctggccagcaccgtgaacgacaagctggagctgcaggagtgcctggagcacggccggatcgccaagttcagcaaggtgagaaccatcaccacccgaagcaacagcatcaaacaaggcaaggaccagcactttcctgtgttcatgaacgagaaggaggacatcctgtggtgtaccgagatggagagagtgttcgggttcccagtccactacacagatgtcagcaacatgtctagactggccagacagagactgctgggaagaagctggtccgtccctgtgatcagacacctgttcgcccctctgaaggagtacttcgcctgcgtgagcagcggcaacagcaacgccaacagccggggccccagcttctctagcggcctggtgccactgtccctgagagggagccacatgggccccatggagatctacaaaaccgtgagcgcctggaagcggcagcctgtgcgcgtgctgagcctgtttcggaatatcgataaagtcctgaaaagcctgggattcctggagagcggctctggctccggcggtggcaccctgaagtacgtggaggatgtgacaaacgtggtcagacgggatgtggagaagtggggccccttcgatctggtgtacggcagcacccaacccctgggcagctcttgtgaccggtgccctggctggtacatgtttcagttccaccggatcctgcagtacgccctgccgagacaggagtcccagcggccattcttttggattttcatggacaacttgctgctgaccgaggatgaccaggaaactaccactcggttcctgcagaccgaagccgtgaccctgcaggacgtgagaggccgggactaccagaacgccatgcgggtgtggtccaacatccctggactgaaaagcaagcacgcacctctgacccctaaagaagaggagtacctgcaggcccaggtgcggagcagaagcaagctggacgcccctaaggtggatctgctggtgaagaattgcctcctgcccctgagagagtacttcaagtatttcagccagaatagtctgcccctgggcggcccaagcagcggcgcccctcctcccagcggcggcagcccagccggctccccaacctctaccgaggagggcacctctgagtccgccacccccgagagcggccctggcacctccaccgagcccagcgagggcagcgcacccggcagccctgccggcagccccacctccacagaggagggaaccagcaccgagcccagcgaaggcagcgccccaggcaccagcaccgagcctagtgagggcggctctggcggcggcagcgcccaggagattaaacggatcaacaagatcagaagaagacttgtgaaagacagcaacaccaagaaggccggcaagacaggccccatgaaaaccctgctggttagagtgatgacacccgatctgagagagcggctggaaaacctgagaaagaagcctgaaaatatcccccagcccatcagcaatacatctagagccaacctgaataagctgctgaccgattacaccgaaatgaagaaggcgatcctgcatgtgtactgggaagagttccagaaggaccctgtgggcctgatgagccgggtggcccagcctgccagcaagaagatcgatcagaacaagctgaaacctgagatggacgagaagggcaacctgaccaccgccggctttgcctgctctcagtgtggccagcccctgttcgtgtacaagctggagcaggtgtctgagaagggcaaggcttacaccaactacttcggacggtgcaatgtggccgagcacgaaaagctgatcctgctggcccagctgaagcccgagaaggatagcgacgaagccgtgacatatagcctgggaaagtttgggcagagggccctggatttctacagcattcatgtgaccaaggagtccacccaccccgtgaagcccctggcccagatcgccggaaacagatacgcctccggacctgtgggaaaggccctgagcgacgcatgtatgggcacaatcgcctccttcctgtctaagtaccaggacatcatcatcgaacaccagaaggtggtgaagggcaaccagaagagactggagagcctgcgggagctggccggcaaggaaaacctggaataccctagcgtgaccctgccacctcagcctcacaccaaggagggcgttgatgcctacaacgaagtgatcgcccgggtgcgaatgtgggtgaacctgaacctgtggcagaagctgaagctaagcagagatgatgccaagcctctgctgagactgaagggattcccttcctttcctctggtcgagagacaggccaacgaagtggactggtgggacatggtgtgtaacgtgaagaagctgatcaacgagaaaaaggaggatggcaaggtgttttggcagaatctggctggctacaagagacaggaagccctgagaccatacctgagcagcgaggaagatcggaagaagggaaagaaattcgctcggtaccagctgggcgacctgctgctgcacctggaaaagaagcacggcgaggactggggaaaggtgtacgacgaggcctgggagcggattgacaagaaagtggaaggcctgagcaagcacatcaagctggaagaggaacggagaagcgaggacgcccagagcaaggccgccctgaccgactggctgcgggctaaggccagcttcgtgatcgagggcctgaaggaggccgacaaggacgagttctgcagatgcgagctgaagctgcagaagtggtacggggacctgcggggaaagcccttcgccatcgaagccgagaacagcatcctggacatcagcggcttcagcaagcagtacaactgtgccttcatctggcagaaggacggcgtgaagaagctgaacctgtacctgatcatcaactacttcaagggcggcaagctgcggttcaagaagatcaaacctgaagccttcgaagccaacagattctacaccgtgatcaacaaaaagagcggcgagatcgtgcccatggaggtgaacttcaacttcgacgaccccaacctgatcatcctgcctctggcctttggcaagagacagggcagagaattcatctggaacgacctgctgtccctggaaaccggcagcctgaagctggccaacggaagagtgatcgagaagacactgtacaacagaagaacccggcaggatgagcctgccctgttcgtggccctgaccttcgagcggcgggaggtcctggactcctccaatatcaaaccaatgaacctgatcggcgtggcaagaggcgaaaacatccccgccgtgatcgccctgaccgaccccgagggctgcccactgagccggtttaaggatagcctgggaaacccaacccacatcctgagaatcggcgagagctataaggagaagcagcggaccatccaggccaagaaggaggtggagcagcggagagccggcggctacagccggaagtacgccagcaaagccaagaatctggcagacgatatggtgagaaacaccgctagagatctgctgtactacgccgtgacccaggatgccatgctgatcttcgccaacctgagccggggcttcggccggcagggcaagcggaccttcatggccgagagacagtacacacggatggaggactggctgaccgccaagctggcctacgagggcctgagcaagacctacctgtccaagacactggcccagtacacctccaagacatgcagcaactgtgggtttaccatcaccagcgccgactacgacagggtgctggagaagctgaagaagacagcaacaggctggatgaccacaattaacggcaaggagctgaaggtggagggccagattacctactacaacagatacaagagacagaacgtagtcaaggacctgtccgtcgagctggatagactgagcgaagaatctgtgaacaacgacatctcctcctggacaaagggcagaagcggagaagctctgagcctcctgaagaaaagattctcccatagacccgtgcaggagaagttcgtgtgcctgaactgcggcttcgagacacacgcagccgagcaagccgccctgaacatcgccagatcctggctgttcctgcggagccaggagtacaagaaataccagacaaacaagacaaccggcaacaccgataagagagccttcgtcgagacctggcagtccttttaccggaagaagcttaaggaggtgtggaaacctgccgtgcggtctggcggatctggcggaggctccacaagcatggacagcgtggccttcgaggacgtggccgtgaccttcacccaggaggagtgggccctgctggaccccagccagaagaccctgtacagggacgtgatgcaggagaccttcaggaacctggccagcgtgggcaagaagtggaaggcccagaacatgtacgtggagtacgagaacctgaagaggaacctgaggaccttcgtgggcgagaggctgttcgagagcaaggagggccaccagcacggcaccagccccaagaaaaagagaaaagtctaagctgccttctgcggggcttgccttctggccatgcccttcttctctcccttgcacctgtacctcttggtctttgaataaagcctgagtaggaaggctagcaaaaaaaaaaaaaaaaaaaaaaaaaaaaaaaaaaaaaaaaaaaaaaaaaaaaaaaaaaaaaaaaaaaaaaaaaaaaaaaa

SEQ ID NO: 7249 - RNA, 5797 nt, synthetic construct
  source 1..5797: mol_type = other RNA
aggaaataagagagaaaagaagagtaagaagaaatataagagccaccatggcccctaagaagaagcgtaaagtgagccggatggaacgcctcgtctacgaggtgcggcagaagtgcagaaacatcgaggacatctgcatctcctgcggatctctgaacgtgaccctggagcacccactgttcatcggcggcatgtgccagaactgtaaaaactgttttctggagtgtgcctatcaatacgacgatgacggctaccagagctactgcaccatctgttgcggcggaagagaggtgctgatgtgtggaaataacaactgctgccggtgcttctgcgtggaatgcgtggacctgctggtgggccccggcgccgcccaggccgctattaaggaagatccttggaactgctacatgtgcggccacaagggcacatacggcctgctgagacggagagaggactggcctagcagactgcagatgttcttcgccaataaccacgaccaggagttcgacccccctaaggtgtaccctcccgtccccgccgagaagagaaagcccatccgggtcctgagcctgttcgatggcatcgccaccggtctgctggtgctgaaggacctgggcatccaggtggataggtacattgcctccgaggtgtgcgaggactccatcaccgtgggaatggtgcgtcatcagggcaagatcatgtacgtgggcgacgtgcggagcgtgacacagaagcatatccaggagtggggccctttcgacctggtgatcggcggcagcccttgcaatgacctgagcatcgtgaacccagcccggaagggcctgtacgagggaaccggcagactgttcttcgagttttacagactgctgcacgacgcccggcctaaggaaggcgacgaccggcccttcttttggctgttcgagaatgtggtggccatgggagtcagcgacaagcgggatattagccggttcctggagagcaaccccgtgatgatcgatgccaaggaagtgagcgccgcccaccgggccagatacttctggggcaatctgcctggcatgaacagacccctggccagcaccgtgaacgacaagctggagctgcaggagtgcctggagcacggccggatcgccaagttcagcaaggtgagaaccatcaccacccgaagcaacagcatcaaacaaggcaaggaccagcactttcctgtgttcatgaacgagaaggaggacatcctgtggtgtaccgagatggagagagtgttcgggttcccagtccactacacagatgtcagcaacatgtctagactggccagacagagactgctgggaagaagctggtccgtccctgtgatcagacacctgttcgcccctctgaaggagtacttcgcctgcgtgagcagcggcaacagcaacgccaacagccggggccccagcttctctagcggcctggtgccactgtccctgagagggagccacatgggccccatggagatctacaaaaccgtgagcgcctggaagcggcagcctgtgcgcgtgctgagcctgtttcggaatatcgataaagtcctgaaaagcctgggattcctggagagcggctctggctccggcggtggcaccctgaagtacgtggaggatgtgacaaacgtggtcagacgggatgtggagaagtggggccccttcgatctggtgtacggcagcacccaacccctgggcagctcttgtgaccggtgccctggctggtacatgtttcagttccaccggatcctgcagtacgccctgccgagacaggagtcccagcggccattcttttggattttcatggacaacttgctgctgaccgaggatgaccaggaaactaccactcggttcctgcagaccgaagccgtgaccctgcaggacgtgagaggccgggactaccagaacgccatgcgggtgtggtccaacatccctggactgaaaagcaagcacgcacctctgacccctaaagaagaggagtacctgcaggcccaggtgcggagcagaagcaagctggacgcccctaaggtggatctgctggtgaagaattgcctcctgcccctgagagagtacttcaagtatttcagccagaatagtctgcccctgggcggcccaagcagcggcgcccctcctcccagcggcggcagcccagccggctccccaacctctaccgaggagggcacctctgagtccgccacccccgagagcggccctggcacctccaccgagcccagcgagggcagcgcacccggcagccctgccggcagccccacctccacagaggagggaaccagcaccgagcccagcgaaggcagcgccccaggcaccagcaccgagcctagtgagggcggctctggcggcggcagcgcccaggagattaaacggatcaacaagatcagaagaagacttgtgaaagacagcaacaccaagaaggccggcaagacaggccccatgaaaaccctgctggttagagtgatgacacccgatctgagagagcggctggaaaacctgagaaagaagcctgaaaatatcccccagcccatcagcaatacatctagagccaacctgaataagctgctgaccgattacaccgaaatgaagaaggcgatcctgcatgtgtactgggaagagttccagaaggaccctgtgggcctgatgagccgggtggcccagcctgccagcaagaagatcgatcagaacaagctgaaacctgagatggacgagaagggcaacctgaccaccgccggctttgcctgctctcagtgtggccagcccctgttcgtgtacaagctggagcaggtgtctgagaagggcaaggcttacaccaactacttcggacggtgcaatgtggccgagcacgaaaagctgatcctgctggcccagctgaagcccgagaaggatagcgacgaagccgtgacatatagcctgggaaagtttgggcagagggccctggatttctacagcattcatgtgaccaaggagtccacccaccccgtgaagcccctggcccagatcgccggaaacagatacgcctccggacctgtgggaaaggccctgagcgacgcatgtatgggcacaatcgcctccttcctgtctaagtaccaggacatcatcatcgaacaccagaaggtggtgaagggcaaccagaagagactggagagcctgcgggagctggccggcaaggaaaacctggaataccctagcgtgaccctgccacctcagcctcacaccaaggagggcgttgatgcctacaacgaagtgatcgcccgggtgcgaatgtgggtgaacctgaacctgtggcagaagctgaagctaagcagagatgatgccaagcctctgctgagactgaagggattcccttcctttcctctggtcgagagacaggccaacgaagtggactggtgggacatggtgtgtaacgtgaagaagctgatcaacgagaaaaaggaggatggcaaggtgttttggcagaatctggctggctacaagagacaggaagccctgagaccatacctgagcagcgaggaagatcggaagaagggaaagaaattcgctcggtaccagctgggcgacctgctgctgcacctggaaaagaagcacggcgaggactggggaaaggtgtacgacgaggcctgggagcggattgacaagaaagtggaaggcctgagcaagcacatcaagctggaagaggaacggagaagcgaggacgcccagagcaaggccgccctgaccgactggctgcgggctaaggccagcttcgtgatcgagggcctgaaggaggccgacaaggacgagttctgcagatgcgagctgaagctgcagaagtggtacggggacctgcggggaaagcccttcgccatcgaagccgagaacagcatcctggacatcagcggcttcagcaagcagtacaactgtgccttcatctggcagaaggacggcgtgaagaagctgaacctgtacctgatcatcaactacttcaagggcggcaagctgcggttcaagaagatcaaacctgaagccttcgaagccaacagattctacaccgtgatcaacaaaaagagcggcgagatcgtgcccatggaggtgaacttcaacttcgacgaccccaacctgatcatcctgcctctggcctttggcaagagacagggcagagaattcatctggaacgacctgctgtccctggaaaccggcagcctgaagctggccaacggaagagtgatcgagaagacactgtacaacagaagaacccggcaggatgagcctgccctgttcgtggccctgaccttcgagcggcgggaggtcctggactcctccaatatcaaaccaatgaacctgatcggcgtggcaagaggcgaaaacatccccgccgtgatcgccctgaccgaccccgagggctgcccactgagccggtttaaggatagcctgggaaacccaacccacatcctgagaatcggcgagagctataaggagaagcagcggaccatccaggccaagaaggaggtggagcagcggagagccggcggctacagccggaagtacgccagcaaagccaagaatctggcagacgatatggtgagaaacaccgctagagatctgctgtactacgccgtgacccaggatgccatgctgatcttcgccaacctgagccggggcttcggccggcagggcaagcggaccttcatggccgagagacagtacacacggatggaggactggctgaccgccaagctggcctacgagggcctgagcaagacctacctgtccaagacactggcccagtacacctccaagacatgcagcaactgtgggtttaccatcaccagcgccgactacgacagggtgctggagaagctgaagaagacagcaacaggctggatgaccacaattaacggcaaggagctgaaggtggagggccagattacctactacaacagatacaagagacagaacgtagtcaaggacctgtccgtcgagctggatagactgagcgaagaatctgtgaacaacgacatctcctcctggacaaagggcagaagcggagaagctctgagcctcctgaagaaaagattctcccatagacccgtgcaggagaagttcgtgtgcctgaactgcggcttcgagacacacgcagccgagcaagccgccctgaacatcgccagatcctggctgttcctgcggagccaggagtacaagaaataccagacaaacaagacaaccggcaacaccgataagagagccttcgtcgagacctggcagtccttttaccggaagaagcttaaggaggtgtggaaacctgccgtgcggtctggcggatctggcggaggctccacaagcttccagatgcccgtgaccttcgaggaggtggccgtgtacttcacccagggccagggcgccctgctggaccccgcccagagggccctgtacagggacgtgatgcaggagaactacaagatggtgaccagcctgggcttccccctgcccaagcccgagctgatcagcaggctggagcagggcgaggagccctgggtgcccgacctgcaggcctgcgaggagagggagagcctgagcggcaaccacaccagccccaagaaaaagagaaaagtctaagctgccttctgcggggcttgccttctggccatgcccttcttctctcccttgcacctgtacctcttggtctttgaataaagcctgagtaggaaggctagcaaaaaaaaaaaaaaaaaaaaaaaaaaaaaaaaaaaaaaaaaaaaaaaaaaaaaaaaaaaaaaaaaaaaaaaaaaaaaaaa

SEQ ID NO: 7250 - RNA, 5797 nt, synthetic construct
  source 1..5797: mol_type = other RNA
aggaaataagagagaaaagaagagtaagaagaaatataagagccaccatggcccctaagaagaagcgtaaagtgagccggatggaacgcctcgtctacgaggtgcggcagaagtgcagaaacatcgaggacatctgcatctcctgcggatctctgaacgtgaccctggagcacccactgttcatcggcggcatgtgccagaactgtaaaaactgttttctggagtgtgcctatcaatacgacgatgacggctaccagagctactgcaccatctgttgcggcggaagagaggtgctgatgtgtggaaataacaactgctgccggtgcttctgcgtggaatgcgtggacctgctggtgggccccggcgccgcccaggccgctattaaggaagatccttggaactgctacatgtgcggccacaagggcacatacggcctgctgagacggagagaggactggcctagcagactgcagatgttcttcgccaataaccacgaccaggagttcgacccccctaaggtgtaccctcccgtccccgccgagaagagaaagcccatccgggtcctgagcctgttcgatggcatcgccaccggtctgctggtgctgaaggacctgggcatccaggtggataggtacattgcctccgaggtgtgcgaggactccatcaccgtgggaatggtgcgtcatcagggcaagatcatgtacgtgggcgacgtgcggagcgtgacacagaagcatatccaggagtggggccctttcgacctggtgatcggcggcagcccttgcaatgacctgagcatcgtgaacccagcccggaagggcctgtacgagggaaccggcagactgttcttcgagttttacagactgctgcacgacgcccggcctaaggaaggcgacgaccggcccttcttttggctgttcgagaatgtggtggccatgggagtcagcgacaagcgggatattagccggttcctggagagcaaccccgtgatgatcgatgccaaggaagtgagcgccgcccaccgggccagatacttctggggcaatctgcctggcatgaacagacccctggccagcaccgtgaacgacaagctggagctgcaggagtgcctggagcacggccggatcgccaagttcagcaaggtgagaaccatcaccacccgaagcaacagcatcaaacaaggcaaggaccagcactttcctgtgttcatgaacgagaaggaggacatcctgtggtgtaccgagatggagagagtgttcgggttcccagtccactacacagatgtcagcaacatgtctagactggccagacagagactgctgggaagaagctggtccgtccctgtgatcagacacctgttcgcccctctgaaggagtacttcgcctgcgtgagcagcggcaacagcaacgccaacagccggggccccagcttctctagcggcctggtgccactgtccctgagagggagccacatgggccccatggagatctacaaaaccgtgagcgcctggaagcggcagcctgtgcgcgtgctgagcctgtttcggaatatcgataaagtcctgaaaagcctgggattcctggagagcggctctggctccggcggtggcaccctgaagtacgtggaggatgtgacaaacgtggtcagacgggatgtggagaagtggggccccttcgatctggtgtacggcagcacccaacccctgggcagctcttgtgaccggtgccctggctggtacatgtttcagttccaccggatcctgcagtacgccctgccgagacaggagtcccagcggccattcttttggattttcatggacaacttgctgctgaccgaggatgaccaggaaactaccactcggttcctgcagaccgaagccgtgaccctgcaggacgtgagaggccgggactaccagaacgccatgcgggtgtggtccaacatccctggactgaaaagcaagcacgcacctctgacccctaaagaagaggagtacctgcaggcccaggtgcggagcagaagcaagctggacgcccctaaggtggatctgctggtgaagaattgcctcctgcccctgagagagtacttcaagtatttcagccagaatagtctgcccctgggcggcccaagcagcggcgcccctcctcccagcggcggcagcccagccggctccccaacctctaccgaggagggcacctctgagtccgccacccccgagagcggccctggcacctccaccgagcccagcgagggcagcgcacccggcagccctgccggcagccccacctccacagaggagggaaccagcaccgagcccagcgaaggcagcgccccaggcaccagcaccgagcctagtgagggcggctctggcggcggcagcgcccaggagattaaacggatcaacaagatcagaagaagacttgtgaaagacagcaacaccaagaaggccggcaagacaggccccatgaaaaccctgctggttagagtgatgacacccgatctgagagagcggctggaaaacctgagaaagaagcctgaaaatatcccccagcccatcagcaatacatctagagccaacctgaataagctgctgaccgattacaccgaaatgaagaaggcgatcctgcatgtgtactgggaagagttccagaaggaccctgtgggcctgatgagccgggtggcccagcctgccagcaagaagatcgatcagaacaagctgaaacctgagatggacgagaagggcaacctgaccaccgccggctttgcctgctctcagtgtggccagcccctgttcgtgtacaagctggagcaggtgtctgagaagggcaaggcttacaccaactacttcggacggtgcaatgtggccgagcacgaaaagctgatcctgctggcccagctgaagcccgagaaggatagcgacgaagccgtgacatatagcctgggaaagtttgggcagagggccctggatttctacagcattcatgtgaccaaggagtccacccaccccgtgaagcccctggcccagatcgccggaaacagatacgcctccggacctgtgggaaaggccctgagcgacgcatgtatgggcacaatcgcctccttcctgtctaagtaccaggacatcatcatcgaacaccagaaggtggtgaagggcaaccagaagagactggagagcctgcgggagctggccggcaaggaaaacctggaataccctagcgtgaccctgccacctcagcctcacaccaaggagggcgttgatgcctacaacgaagtgatcgcccgggtgcgaatgtgggtgaacctgaacctgtggcagaagctgaagctaagcagagatgatgccaagcctctgctgagactgaagggattcccttcctttcctctggtcgagagacaggccaacgaagtggactggtgggacatggtgtgtaacgtgaagaagctgatcaacgagaaaaaggaggatggcaaggtgttttggcagaatctggctggctacaagagacaggaagccctgagaccatacctgagcagcgaggaagatcggaagaagggaaagaaattcgctcggtaccagctgggcgacctgctgctgcacctggaaaagaagcacggcgaggactggggaaaggtgtacgacgaggcctgggagcggattgacaagaaagtggaaggcctgagcaagcacatcaagctggaagaggaacggagaagcgaggacgcccagagcaaggccgccctgaccgactggctgcgggctaaggccagcttcgtgatcgagggcctgaaggaggccgacaaggacgagttctgcagatgcgagctgaagctgcagaagtggtacggggacctgcggggaaagcccttcgccatcgaagccgagaacagcatcctggacatcagcggcttcagcaagcagtacaactgtgccttcatctggcagaaggacggcgtgaagaagctgaacctgtacctgatcatcaactacttcaagggcggcaagctgcggttcaagaagatcaaacctgaagccttcgaagccaacagattctacaccgtgatcaacaaaaagagcggcgagatcgtgcccatggaggtgaacttcaacttcgacgaccccaacctgatcatcctgcctctggcctttggcaagagacagggcagagaattcatctggaacgacctgctgtccctggaaaccggcagcctgaagctggccaacggaagagtgatcgagaagacactgtacaacagaagaacccggcaggatgagcctgccctgttcgtggccctgaccttcgagcggcgggaggtcctggactcctccaatatcaaaccaatgaacctgatcggcgtggcaagaggcgaaaacatccccgccgtgatcgccctgaccgaccccgagggctgcccactgagccggtttaaggatagcctgggaaacccaacccacatcctgagaatcggcgagagctataaggagaagcagcggaccatccaggccaagaaggaggtggagcagcggagagccggcggctacagccggaagtacgccagcaaagccaagaatctggcagacgatatggtgagaaacaccgctagagatctgctgtactacgccgtgacccaggatgccatgctgatcttcgccaacctgagccggggcttcggccggcagggcaagcggaccttcatggccgagagacagtacacacggatggaggactggctgaccgccaagctggcctacgagggcctgagcaagacctacctgtccaagacactggcccagtacacctccaagacatgcagcaactgtgggtttaccatcaccagcgccgactacgacagggtgctggagaagctgaagaagacagcaacaggctggatgaccacaattaacggcaaggagctgaaggtggagggccagattacctactacaacagatacaagagacagaacgtagtcaaggacctgtccgtcgagctggatagactgagcgaagaatctgtgaacaacgacatctcctcctggacaaagggcagaagcggagaagctctgagcctcctgaagaaaagattctcccatagacccgtgcaggagaagttcgtgtgcctgaactgcggcttcgagacacacgcagccgagcaagccgccctgaacatcgccagatcctggctgttcctgcggagccaggagtacaagaaataccagacaaacaagacaaccggcaacaccgataagagagccttcgtcgagacctggcagtccttttaccggaagaagcttaaggaggtgtggaaacctgccgtgcggtctggcggatctggcggaggctccacaagcatggccaccgccctgaccgaccccgcccaggtgagcgtgaccttcgacgacgtggccgtgaccttcacccaggaggagtggggccagctggacctggcccagaggaccctgtaccaggaggtgatgctggagaactgcggcctgctggtgagcctgggctgccccgtgcccaggcccgagctgatctaccacctggagcacggccaggagccctggaccaggaaggaggacctgagccaggacaccagccccaagaaaaagagaaaagtctaagctgccttctgcggggcttgccttctggccatgcccttcttctctcccttgcacctgtacctcttggtctttgaataaagcctgagtaggaaggctagcaaaaaaaaaaaaaaaaaaaaaaaaaaaaaaaaaaaaaaaaaaaaaaaaaaaaaaaaaaaaaaaaaaaaaaaaaaaaaaaa

SEQ ID NO: 7251 - RNA, 5797 nt, synthetic construct
  source 1..5797: mol_type = other RNA
aggaaataagagagaaaagaagagtaagaagaaatataagagccaccatggcccctaagaagaagcgtaaagtgagccggatggaacgcctcgtctacgaggtgcggcagaagtgcagaaacatcgaggacatctgcatctcctgcggatctctgaacgtgaccctggagcacccactgttcatcggcggcatgtgccagaactgtaaaaactgttttctggagtgtgcctatcaatacgacgatgacggctaccagagctactgcaccatctgttgcggcggaagagaggtgctgatgtgtggaaataacaactgctgccggtgcttctgcgtggaatgcgtggacctgctggtgggccccggcgccgcccaggccgctattaaggaagatccttggaactgctacatgtgcggccacaagggcacatacggcctgctgagacggagagaggactggcctagcagactgcagatgttcttcgccaataaccacgaccaggagttcgacccccctaaggtgtaccctcccgtccccgccgagaagagaaagcccatccgggtcctgagcctgttcgatggcatcgccaccggtctgctggtgctgaaggacctgggcatccaggtggataggtacattgcctccgaggtgtgcgaggactccatcaccgtgggaatggtgcgtcatcagggcaagatcatgtacgtgggcgacgtgcggagcgtgacacagaagcatatccaggagtggggccctttcgacctggtgatcggcggcagcccttgcaatgacctgagcatcgtgaacccagcccggaagggcctgtacgagggaaccggcagactgttcttcgagttttacagactgctgcacgacgcccggcctaaggaaggcgacgaccggcccttcttttggctgttcgagaatgtggtggccatgggagtcagcgacaagcgggatattagccggttcctggagagcaaccccgtgatgatcgatgccaaggaagtgagcgccgcccaccgggccagatacttctggggcaatctgcctggcatgaacagacccctggccagcaccgtgaacgacaagctggagctgcaggagtgcctggagcacggccggatcgccaagttcagcaaggtgagaaccatcaccacccgaagcaacagcatcaaacaaggcaaggaccagcactttcctgtgttcatgaacgagaaggaggacatcctgtggtgtaccgagatggagagagtgttcgggttcccagtccactacacagatgtcagcaacatgtctagactggccagacagagactgctgggaagaagctggtccgtccctgtgatcagacacctgttcgcccctctgaaggagtacttcgcctgcgtgagcagcggcaacagcaacgccaacagccggggccccagcttctctagcggcctggtgccactgtccctgagagggagccacatgggccccatggagatctacaaaaccgtgagcgcctggaagcggcagcctgtgcgcgtgctgagcctgtttcggaatatcgataaagtcctgaaaagcctgggattcctggagagcggctctggctccggcggtggcaccctgaagtacgtggaggatgtgacaaacgtggtcagacgggatgtggagaagtggggccccttcgatctggtgtacggcagcacccaacccctgggcagctcttgtgaccggtgccctggctggtacatgtttcagttccaccggatcctgcagtacgccctgccgagacaggagtcccagcggccattcttttggattttcatggacaacttgctgctgaccgaggatgaccaggaaactaccactcggttcctgcagaccgaagccgtgaccctgcaggacgtgagaggccgggactaccagaacgccatgcgggtgtggtccaacatccctggactgaaaagcaagcacgcacctctgacccctaaagaagaggagtacctgcaggcccaggtgcggagcagaagcaagctggacgcccctaaggtggatctgctggtgaagaattgcctcctgcccctgagagagtacttcaagtatttcagccagaatagtctgcccctgggcggcccaagcagcggcgcccctcctcccagcggcggcagcccagccggctccccaacctctaccgaggagggcacctctgagtccgccacccccgagagcggccctggcacctccaccgagcccagcgagggcagcgcacccggcagccctgccggcagccccacctccacagaggagggaaccagcaccgagcccagcgaaggcagcgccccaggcaccagcaccgagcctagtgagggcggctctggcggcggcagcgcccaggagattaaacggatcaacaagatcagaagaagacttgtgaaagacagcaacaccaagaaggccggcaagacaggccccatgaaaaccctgctggttagagtgatgacacccgatctgagagagcggctggaaaacctgagaaagaagcctgaaaatatcccccagcccatcagcaatacatctagagccaacctgaataagctgctgaccgattacaccgaaatgaagaaggcgatcctgcatgtgtactgggaagagttccagaaggaccctgtgggcctgatgagccgggtggcccagcctgccagcaagaagatcgatcagaacaagctgaaacctgagatggacgagaagggcaacctgaccaccgccggctttgcctgctctcagtgtggccagcccctgttcgtgtacaagctggagcaggtgtctgagaagggcaaggcttacaccaactacttcggacggtgcaatgtggccgagcacgaaaagctgatcctgctggcccagctgaagcccgagaaggatagcgacgaagccgtgacatatagcctgggaaagtttgggcagagggccctggatttctacagcattcatgtgaccaaggagtccacccaccccgtgaagcccctggcccagatcgccggaaacagatacgcctccggacctgtgggaaaggccctgagcgacgcatgtatgggcacaatcgcctccttcctgtctaagtaccaggacatcatcatcgaacaccagaaggtggtgaagggcaaccagaagagactggagagcctgcgggagctggccggcaaggaaaacctggaataccctagcgtgaccctgccacctcagcctcacaccaaggagggcgttgatgcctacaacgaagtgatcgcccgggtgcgaatgtgggtgaacctgaacctgtggcagaagctgaagctaagcagagatgatgccaagcctctgctgagactgaagggattcccttcctttcctctggtcgagagacaggccaacgaagtggactggtgggacatggtgtgtaacgtgaagaagctgatcaacgagaaaaaggaggatggcaaggtgttttggcagaatctggctggctacaagagacaggaagccctgagaccatacctgagcagcgaggaagatcggaagaagggaaagaaattcgctcggtaccagctgggcgacctgctgctgcacctggaaaagaagcacggcgaggactggggaaaggtgtacgacgaggcctgggagcggattgacaagaaagtggaaggcctgagcaagcacatcaagctggaagaggaacggagaagcgaggacgcccagagcaaggccgccctgaccgactggctgcgggctaaggccagcttcgtgatcgagggcctgaaggaggccgacaaggacgagttctgcagatgcgagctgaagctgcagaagtggtacggggacctgcggggaaagcccttcgccatcgaagccgagaacagcatcctggacatcagcggcttcagcaagcagtacaactgtgccttcatctggcagaaggacggcgtgaagaagctgaacctgtacctgatcatcaactacttcaagggcggcaagctgcggttcaagaagatcaaacctgaagccttcgaagccaacagattctacaccgtgatcaacaaaaagagcggcgagatcgtgcccatggaggtgaacttcaacttcgacgaccccaacctgatcatcctgcctctggcctttggcaagagacagggcagagaattcatctggaacgacctgctgtccctggaaaccggcagcctgaagctggccaacggaagagtgatcgagaagacactgtacaacagaagaacccggcaggatgagcctgccctgttcgtggccctgaccttcgagcggcgggaggtcctggactcctccaatatcaaaccaatgaacctgatcggcgtggcaagaggcgaaaacatccccgccgtgatcgccctgaccgaccccgagggctgcccactgagccggtttaaggatagcctgggaaacccaacccacatcctgagaatcggcgagagctataaggagaagcagcggaccatccaggccaagaaggaggtggagcagcggagagccggcggctacagccggaagtacgccagcaaagccaagaatctggcagacgatatggtgagaaacaccgctagagatctgctgtactacgccgtgacccaggatgccatgctgatcttcgccaacctgagccggggcttcggccggcagggcaagcggaccttcatggccgagagacagtacacacggatggaggactggctgaccgccaagctggcctacgagggcctgagcaagacctacctgtccaagacactggcccagtacacctccaagacatgcagcaactgtgggtttaccatcaccagcgccgactacgacagggtgctggagaagctgaagaagacagcaacaggctggatgaccacaattaacggcaaggagctgaaggtggagggccagattacctactacaacagatacaagagacagaacgtagtcaaggacctgtccgtcgagctggatagactgagcgaagaatctgtgaacaacgacatctcctcctggacaaagggcagaagcggagaagctctgagcctcctgaagaaaagattctcccatagacccgtgcaggagaagttcgtgtgcctgaactgcggcttcgagacacacgcagccgagcaagccgccctgaacatcgccagatcctggctgttcctgcggagccaggagtacaagaaataccagacaaacaagacaaccggcaacaccgataagagagccttcgtcgagacctggcagtccttttaccggaagaagcttaaggaggtgtggaaacctgccgtgcggtctggcggatctggcggaggctccacaagcaggcccgagagcgtgaccttcgaggacgtggccgtgtacttcagcgagaacgagtggatcggcctggcccccgcccagagggtgctgtacagggacgtgatgctggagaactacggcgtggtggccagcctggccttccccttccccaagcccgccctgatcagccagctggagaggggcgaggccccctggtgcaaggccccccagggcgccctggacggcgagtgccccaggggcgtgagcaccagccccaagaaaaagagaaaagtctaagctgccttctgcggggcttgccttctggccatgcccttcttctctcccttgcacctgtacctcttggtctttgaataaagcctgagtaggaaggctagcaaaaaaaaaaaaaaaaaaaaaaaaaaaaaaaaaaaaaaaaaaaaaaaaaaaaaaaaaaaaaaaaaaaaaaaaaaaaaaaa

SEQ ID NO: 7252 - RNA, 5797 nt, synthetic construct
  source 1..5797: mol_type = other RNA
aggaaataagagagaaaagaagagtaagaagaaatataagagccaccatggcccctaagaagaagcgtaaagtgagccggatggaacgcctcgtctacgaggtgcggcagaagtgcagaaacatcgaggacatctgcatctcctgcggatctctgaacgtgaccctggagcacccactgttcatcggcggcatgtgccagaactgtaaaaactgttttctggagtgtgcctatcaatacgacgatgacggctaccagagctactgcaccatctgttgcggcggaagagaggtgctgatgtgtggaaataacaactgctgccggtgcttctgcgtggaatgcgtggacctgctggtgggccccggcgccgcccaggccgctattaaggaagatccttggaactgctacatgtgcggccacaagggcacatacggcctgctgagacggagagaggactggcctagcagactgcagatgttcttcgccaataaccacgaccaggagttcgacccccctaaggtgtaccctcccgtccccgccgagaagagaaagcccatccgggtcctgagcctgttcgatggcatcgccaccggtctgctggtgctgaaggacctgggcatccaggtggataggtacattgcctccgaggtgtgcgaggactccatcaccgtgggaatggtgcgtcatcagggcaagatcatgtacgtgggcgacgtgcggagcgtgacacagaagcatatccaggagtggggccctttcgacctggtgatcggcggcagcccttgcaatgacctgagcatcgtgaacccagcccggaagggcctgtacgagggaaccggcagactgttcttcgagttttacagactgctgcacgacgcccggcctaaggaaggcgacgaccggcccttcttttggctgttcgagaatgtggtggccatgggagtcagcgacaagcgggatattagccggttcctggagagcaaccccgtgatgatcgatgccaaggaagtgagcgccgcccaccgggccagatacttctggggcaatctgcctggcatgaacagacccctggccagcaccgtgaacgacaagctggagctgcaggagtgcctggagcacggccggatcgccaagttcagcaaggtgagaaccatcaccacccgaagcaacagcatcaaacaaggcaaggaccagcactttcctgtgttcatgaacgagaaggaggacatcctgtggtgtaccgagatggagagagtgttcgggttcccagtccactacacagatgtcagcaacatgtctagactggccagacagagactgctgggaagaagctggtccgtccctgtgatcagacacctgttcgcccctctgaaggagtacttcgcctgcgtgagcagcggcaacagcaacgccaacagccggggccccagcttctctagcggcctggtgccactgtccctgagagggagccacatgggccccatggagatctacaaaaccgtgagcgcctggaagcggcagcctgtgcgcgtgctgagcctgtttcggaatatcgataaagtcctgaaaagcctgggattcctggagagcggctctggctccggcggtggcaccctgaagtacgtggaggatgtgacaaacgtggtcagacgggatgtggagaagtggggccccttcgatctggtgtacggcagcacccaacccctgggcagctcttgtgaccggtgccctggctggtacatgtttcagttccaccggatcctgcagtacgccctgccgagacaggagtcccagcggccattcttttggattttcatggacaacttgctgctgaccgaggatgaccaggaaactaccactcggttcctgcagaccgaagccgtgaccctgcaggacgtgagaggccgggactaccagaacgccatgcgggtgtggtccaacatccctggactgaaaagcaagcacgcacctctgacccctaaagaagaggagtacctgcaggcccaggtgcggagcagaagcaagctggacgcccctaaggtggatctgctggtgaagaattgcctcctgcccctgagagagtacttcaagtatttcagccagaatagtctgcccctgggcggcccaagcagcggcgcccctcctcccagcggcggcagcccagccggctccccaacctctaccgaggagggcacctctgagtccgccacccccgagagcggccctggcacctccaccgagcccagcgagggcagcgcacccggcagccctgccggcagccccacctccacagaggagggaaccagcaccgagcccagcgaaggcagcgccccaggcaccagcaccgagcctagtgagggcggctctggcggcggcagcgcccaggagattaaacggatcaacaagatcagaagaagacttgtgaaagacagcaacaccaagaaggccggcaagacaggccccatgaaaaccctgctggttagagtgatgacacccgatctgagagagcggctggaaaacctgagaaagaagcctgaaaatatcccccagcccatcagcaatacatctagagccaacctgaataagctgctgaccgattacaccgaaatgaagaaggcgatcctgcatgtgtactgggaagagttccagaaggaccctgtgggcctgatgagccgggtggcccagcctgccagcaagaagatcgatcagaacaagctgaaacctgagatggacgagaagggcaacctgaccaccgccggctttgcctgctctcagtgtggccagcccctgttcgtgtacaagctggagcaggtgtctgagaagggcaaggcttacaccaactacttcggacggtgcaatgtggccgagcacgaaaagctgatcctgctggcccagctgaagcccgagaaggatagcgacgaagccgtgacatatagcctgggaaagtttgggcagagggccctggatttctacagcattcatgtgaccaaggagtccacccaccccgtgaagcccctggcccagatcgccggaaacagatacgcctccggacctgtgggaaaggccctgagcgacgcatgtatgggcacaatcgcctccttcctgtctaagtaccaggacatcatcatcgaacaccagaaggtggtgaagggcaaccagaagagactggagagcctgcgggagctggccggcaaggaaaacctggaataccctagcgtgaccctgccacctcagcctcacaccaaggagggcgttgatgcctacaacgaagtgatcgcccgggtgcgaatgtgggtgaacctgaacctgtggcagaagctgaagctaagcagagatgatgccaagcctctgctgagactgaagggattcccttcctttcctctggtcgagagacaggccaacgaagtggactggtgggacatggtgtgtaacgtgaagaagctgatcaacgagaaaaaggaggatggcaaggtgttttggcagaatctggctggctacaagagacaggaagccctgagaccatacctgagcagcgaggaagatcggaagaagggaaagaaattcgctcggtaccagctgggcgacctgctgctgcacctggaaaagaagcacggcgaggactggggaaaggtgtacgacgaggcctgggagcggattgacaagaaagtggaaggcctgagcaagcacatcaagctggaagaggaacggagaagcgaggacgcccagagcaaggccgccctgaccgactggctgcgggctaaggccagcttcgtgatcgagggcctgaaggaggccgacaaggacgagttctgcagatgcgagctgaagctgcagaagtggtacggggacctgcggggaaagcccttcgccatcgaagccgagaacagcatcctggacatcagcggcttcagcaagcagtacaactgtgccttcatctggcagaaggacggcgtgaagaagctgaacctgtacctgatcatcaactacttcaagggcggcaagctgcggttcaagaagatcaaacctgaagccttcgaagccaacagattctacaccgtgatcaacaaaaagagcggcgagatcgtgcccatggaggtgaacttcaacttcgacgaccccaacctgatcatcctgcctctggcctttggcaagagacagggcagagaattcatctggaacgacctgctgtccctggaaaccggcagcctgaagctggccaacggaagagtgatcgagaagacactgtacaacagaagaacccggcaggatgagcctgccctgttcgtggccctgaccttcgagcggcgggaggtcctggactcctccaatatcaaaccaatgaacctgatcggcgtggcaagaggcgaaaacatccccgccgtgatcgccctgaccgaccccgagggctgcccactgagccggtttaaggatagcctgggaaacccaacccacatcctgagaatcggcgagagctataaggagaagcagcggaccatccaggccaagaaggaggtggagcagcggagagccggcggctacagccggaagtacgccagcaaagccaagaatctggcagacgatatggtgagaaacaccgctagagatctgctgtactacgccgtgacccaggatgccatgctgatcttcgccaacctgagccggggcttcggccggcagggcaagcggaccttcatggccgagagacagtacacacggatggaggactggctgaccgccaagctggcctacgagggcctgagcaagacctacctgtccaagacactggcccagtacacctccaagacatgcagcaactgtgggtttaccatcaccagcgccgactacgacagggtgctggagaagctgaagaagacagcaacaggctggatgaccacaattaacggcaaggagctgaaggtggagggccagattacctactacaacagatacaagagacagaacgtagtcaaggacctgtccgtcgagctggatagactgagcgaagaatctgtgaacaacgacatctcctcctggacaaagggcagaagcggagaagctctgagcctcctgaagaaaagattctcccatagacccgtgcaggagaagttcgtgtgcctgaactgcggcttcgagacacacgcagccgagcaagccgccctgaacatcgccagatcctggctgttcctgcggagccaggagtacaagaaataccagacaaacaagacaaccggcaacaccgataagagagccttcgtcgagacctggcagtccttttaccggaagaagcttaaggaggtgtggaaacctgccgtgcggtctggcggatctggcggaggctccacaagcacccccgagcccgtgaggttcgccgacgtggccgtgtacttcagcctggaggagtggggctgcctgcagcccgcccagagggccctgtacagggacgtgatgagggagacctacggccacctgggcgccctgggcttcaggggcaccaagcccgccctgatcagctgggtggagaaggaggccgagctgtggggccccgacgccagggaccccgaggtgggcgagtgcctgaccgaggccgacaccagccccaagaaaaagagaaaagtctaagctgccttctgcggggcttgccttctggccatgcccttcttctctcccttgcacctgtacctcttggtctttgaataaagcctgagtaggaaggctagcaaaaaaaaaaaaaaaaaaaaaaaaaaaaaaaaaaaaaaaaaaaaaaaaaaaaaaaaaaaaaaaaaaaaaaaaaaaaaaaa

SEQ ID NO: 7253 - RNA, 5797 nt, synthetic construct
  source 1..5797: mol_type = other RNA
aggaaataagagagaaaagaagagtaagaagaaatataagagccaccatggcccctaagaagaagcgtaaagtgagccggatggaacgcctcgtctacgaggtgcggcagaagtgcagaaacatcgaggacatctgcatctcctgcggatctctgaacgtgaccctggagcacccactgttcatcggcggcatgtgccagaactgtaaaaactgttttctggagtgtgcctatcaatacgacgatgacggctaccagagctactgcaccatctgttgcggcggaagagaggtgctgatgtgtggaaataacaactgctgccggtgcttctgcgtggaatgcgtggacctgctggtgggccccggcgccgcccaggccgctattaaggaagatccttggaactgctacatgtgcggccacaagggcacatacggcctgctgagacggagagaggactggcctagcagactgcagatgttcttcgccaataaccacgaccaggagttcgacccccctaaggtgtaccctcccgtccccgccgagaagagaaagcccatccgggtcctgagcctgttcgatggcatcgccaccggtctgctggtgctgaaggacctgggcatccaggtggataggtacattgcctccgaggtgtgcgaggactccatcaccgtgggaatggtgcgtcatcagggcaagatcatgtacgtgggcgacgtgcggagcgtgacacagaagcatatccaggagtggggccctttcgacctggtgatcggcggcagcccttgcaatgacctgagcatcgtgaacccagcccggaagggcctgtacgagggaaccggcagactgttcttcgagttttacagactgctgcacgacgcccggcctaaggaaggcgacgaccggcccttcttttggctgttcgagaatgtggtggccatgggagtcagcgacaagcgggatattagccggttcctggagagcaaccccgtgatgatcgatgccaaggaagtgagcgccgcccaccgggccagatacttctggggcaatctgcctggcatgaacagacccctggccagcaccgtgaacgacaagctggagctgcaggagtgcctggagcacggccggatcgccaagttcagcaaggtgagaaccatcaccacccgaagcaacagcatcaaacaaggcaaggaccagcactttcctgtgttcatgaacgagaaggaggacatcctgtggtgtaccgagatggagagagtgttcgggttcccagtccactacacagatgtcagcaacatgtctagactggccagacagagactgctgggaagaagctggtccgtccctgtgatcagacacctgttcgcccctctgaaggagtacttcgcctgcgtgagcagcggcaacagcaacgccaacagccggggccccagcttctctagcggcctggtgccactgtccctgagagggagccacatgggccccatggagatctacaaaaccgtgagcgcctggaagcggcagcctgtgcgcgtgctgagcctgtttcggaatatcgataaagtcctgaaaagcctgggattcctggagagcggctctggctccggcggtggcaccctgaagtacgtggaggatgtgacaaacgtggtcagacgggatgtggagaagtggggccccttcgatctggtgtacggcagcacccaacccctgggcagctcttgtgaccggtgccctggctggtacatgtttcagttccaccggatcctgcagtacgccctgccgagacaggagtcccagcggccattcttttggattttcatggacaacttgctgctgaccgaggatgaccaggaaactaccactcggttcctgcagaccgaagccgtgaccctgcaggacgtgagaggccgggactaccagaacgccatgcgggtgtggtccaacatccctggactgaaaagcaagcacgcacctctgacccctaaagaagaggagtacctgcaggcccaggtgcggagcagaagcaagctggacgcccctaaggtggatctgctggtgaagaattgcctcctgcccctgagagagtacttcaagtatttcagccagaatagtctgcccctgggcggcccaagcagcggcgcccctcctcccagcggcggcagcccagccggctccccaacctctaccgaggagggcacctctgagtccgccacccccgagagcggccctggcacctccaccgagcccagcgagggcagcgcacccggcagccctgccggcagccccacctccacagaggagggaaccagcaccgagcccagcgaaggcagcgccccaggcaccagcaccgagcctagtgagggcggctctggcggcggcagcgcccaggagattaaacggatcaacaagatcagaagaagacttgtgaaagacagcaacaccaagaaggccggcaagacaggccccatgaaaaccctgctggttagagtgatgacacccgatctgagagagcggctggaaaacctgagaaagaagcctgaaaatatcccccagcccatcagcaatacatctagagccaacctgaataagctgctgaccgattacaccgaaatgaagaaggcgatcctgcatgtgtactgggaagagttccagaaggaccctgtgggcctgatgagccgggtggcccagcctgccagcaagaagatcgatcagaacaagctgaaacctgagatggacgagaagggcaacctgaccaccgccggctttgcctgctctcagtgtggccagcccctgttcgtgtacaagctggagcaggtgtctgagaagggcaaggcttacaccaactacttcggacggtgcaatgtggccgagcacgaaaagctgatcctgctggcccagctgaagcccgagaaggatagcgacgaagccgtgacatatagcctgggaaagtttgggcagagggccctggatttctacagcattcatgtgaccaaggagtccacccaccccgtgaagcccctggcccagatcgccggaaacagatacgcctccggacctgtgggaaaggccctgagcgacgcatgtatgggcacaatcgcctccttcctgtctaagtaccaggacatcatcatcgaacaccagaaggtggtgaagggcaaccagaagagactggagagcctgcgggagctggccggcaaggaaaacctggaataccctagcgtgaccctgccacctcagcctcacaccaaggagggcgttgatgcctacaacgaagtgatcgcccgggtgcgaatgtgggtgaacctgaacctgtggcagaagctgaagctaagcagagatgatgccaagcctctgctgagactgaagggattcccttcctttcctctggtcgagagacaggccaacgaagtggactggtgggacatggtgtgtaacgtgaagaagctgatcaacgagaaaaaggaggatggcaaggtgttttggcagaatctggctggctacaagagacaggaagccctgagaccatacctgagcagcgaggaagatcggaagaagggaaagaaattcgctcggtaccagctgggcgacctgctgctgcacctggaaaagaagcacggcgaggactggggaaaggtgtacgacgaggcctgggagcggattgacaagaaagtggaaggcctgagcaagcacatcaagctggaagaggaacggagaagcgaggacgcccagagcaaggccgccctgaccgactggctgcgggctaaggccagcttcgtgatcgagggcctgaaggaggccgacaaggacgagttctgcagatgcgagctgaagctgcagaagtggtacggggacctgcggggaaagcccttcgccatcgaagccgagaacagcatcctggacatcagcggcttcagcaagcagtacaactgtgccttcatctggcagaaggacggcgtgaagaagctgaacctgtacctgatcatcaactacttcaagggcggcaagctgcggttcaagaagatcaaacctgaagccttcgaagccaacagattctacaccgtgatcaacaaaaagagcggcgagatcgtgcccatggaggtgaacttcaacttcgacgaccccaacctgatcatcctgcctctggcctttggcaagagacagggcagagaattcatctggaacgacctgctgtccctggaaaccggcagcctgaagctggccaacggaagagtgatcgagaagacactgtacaacagaagaacccggcaggatgagcctgccctgttcgtggccctgaccttcgagcggcgggaggtcctggactcctccaatatcaaaccaatgaacctgatcggcgtggcaagaggcgaaaacatccccgccgtgatcgccctgaccgaccccgagggctgcccactgagccggtttaaggatagcctgggaaacccaacccacatcctgagaatcggcgagagctataaggagaagcagcggaccatccaggccaagaaggaggtggagcagcggagagccggcggctacagccggaagtacgccagcaaagccaagaatctggcagacgatatggtgagaaacaccgctagagatctgctgtactacgccgtgacccaggatgccatgctgatcttcgccaacctgagccggggcttcggccggcagggcaagcggaccttcatggccgagagacagtacacacggatggaggactggctgaccgccaagctggcctacgagggcctgagcaagacctacctgtccaagacactggcccagtacacctccaagacatgcagcaactgtgggtttaccatcaccagcgccgactacgacagggtgctggagaagctgaagaagacagcaacaggctggatgaccacaattaacggcaaggagctgaaggtggagggccagattacctactacaacagatacaagagacagaacgtagtcaaggacctgtccgtcgagctggatagactgagcgaagaatctgtgaacaacgacatctcctcctggacaaagggcagaagcggagaagctctgagcctcctgaagaaaagattctcccatagacccgtgcaggagaagttcgtgtgcctgaactgcggcttcgagacacacgcagccgagcaagccgccctgaacatcgccagatcctggctgttcctgcggagccaggagtacaagaaataccagacaaacaagacaaccggcaacaccgataagagagccttcgtcgagacctggcagtccttttaccggaagaagcttaaggaggtgtggaaacctgccgtgcggtctggcggatctggcggaggctccacaagcaccatgaccaccgtgagcagcaccgccaggccccaggagagcgtggccttcgacgacgtggccgtgtacttcaccaagaaggagtgggccatcatggtgcccgaccagagggccctgtacagggacgtgatgctggagaactacgaggccgtggccttcgtggtgccccccaccagcaagcccgccctggtgagccacctggagcagggcaaggagccctgcttcacccagccccagggcgtgaccagccccaagaaaaagagaaaagtctaagctgccttctgcggggcttgccttctggccatgcccttcttctctcccttgcacctgtacctcttggtctttgaataaagcctgagtaggaaggctagcaaaaaaaaaaaaaaaaaaaaaaaaaaaaaaaaaaaaaaaaaaaaaaaaaaaaaaaaaaaaaaaaaaaaaaaaaaaaaaaa

SEQ ID NO: 7254 - RNA, 5797 nt, synthetic construct
  source 1..5797: mol_type = other RNA
aggaaataagagagaaaagaagagtaagaagaaatataagagccaccatggcccctaagaagaagcgtaaagtgagccggatggaacgcctcgtctacgaggtgcggcagaagtgcagaaacatcgaggacatctgcatctcctgcggatctctgaacgtgaccctggagcacccactgttcatcggcggcatgtgccagaactgtaaaaactgttttctggagtgtgcctatcaatacgacgatgacggctaccagagctactgcaccatctgttgcggcggaagagaggtgctgatgtgtggaaataacaactgctgccggtgcttctgcgtggaatgcgtggacctgctggtgggccccggcgccgcccaggccgctattaaggaagatccttggaactgctacatgtgcggccacaagggcacatacggcctgctgagacggagagaggactggcctagcagactgcagatgttcttcgccaataaccacgaccaggagttcgacccccctaaggtgtaccctcccgtccccgccgagaagagaaagcccatccgggtcctgagcctgttcgatggcatcgccaccggtctgctggtgctgaaggacctgggcatccaggtggataggtacattgcctccgaggtgtgcgaggactccatcaccgtgggaatggtgcgtcatcagggcaagatcatgtacgtgggcgacgtgcggagcgtgacacagaagcatatccaggagtggggccctttcgacctggtgatcggcggcagcccttgcaatgacctgagcatcgtgaacccagcccggaagggcctgtacgagggaaccggcagactgttcttcgagttttacagactgctgcacgacgcccggcctaaggaaggcgacgaccggcccttcttttggctgttcgagaatgtggtggccatgggagtcagcgacaagcgggatattagccggttcctggagagcaaccccgtgatgatcgatgccaaggaagtgagcgccgcccaccgggccagatacttctggggcaatctgcctggcatgaacagacccctggccagcaccgtgaacgacaagctggagctgcaggagtgcctggagcacggccggatcgccaagttcagcaaggtgagaaccatcaccacccgaagcaacagcatcaaacaaggcaaggaccagcactttcctgtgttcatgaacgagaaggaggacatcctgtggtgtaccgagatggagagagtgttcgggttcccagtccactacacagatgtcagcaacatgtctagactggccagacagagactgctgggaagaagctggtccgtccctgtgatcagacacctgttcgcccctctgaaggagtacttcgcctgcgtgagcagcggcaacagcaacgccaacagccggggccccagcttctctagcggcctggtgccactgtccctgagagggagccacatgggccccatggagatctacaaaaccgtgagcgcctggaagcggcagcctgtgcgcgtgctgagcctgtttcggaatatcgataaagtcctgaaaagcctgggattcctggagagcggctctggctccggcggtggcaccctgaagtacgtggaggatgtgacaaacgtggtcagacgggatgtggagaagtggggccccttcgatctggtgtacggcagcacccaacccctgggcagctcttgtgaccggtgccctggctggtacatgtttcagttccaccggatcctgcagtacgccctgccgagacaggagtcccagcggccattcttttggattttcatggacaacttgctgctgaccgaggatgaccaggaaactaccactcggttcctgcagaccgaagccgtgaccctgcaggacgtgagaggccgggactaccagaacgccatgcgggtgtggtccaacatccctggactgaaaagcaagcacgcacctctgacccctaaagaagaggagtacctgcaggcccaggtgcggagcagaagcaagctggacgcccctaaggtggatctgctggtgaagaattgcctcctgcccctgagagagtacttcaagtatttcagccagaatagtctgcccctgggcggcccaagcagcggcgcccctcctcccagcggcggcagcccagccggctccccaacctctaccgaggagggcacctctgagtccgccacccccgagagcggccctggcacctccaccgagcccagcgagggcagcgcacccggcagccctgccggcagccccacctccacagaggagggaaccagcaccgagcccagcgaaggcagcgccccaggcaccagcaccgagcctagtgagggcggctctggcggcggcagcgcccaggagattaaacggatcaacaagatcagaagaagacttgtgaaagacagcaacaccaagaaggccggcaagacaggccccatgaaaaccctgctggttagagtgatgacacccgatctgagagagcggctggaaaacctgagaaagaagcctgaaaatatcccccagcccatcagcaatacatctagagccaacctgaataagctgctgaccgattacaccgaaatgaagaaggcgatcctgcatgtgtactgggaagagttccagaaggaccctgtgggcctgatgagccgggtggcccagcctgccagcaagaagatcgatcagaacaagctgaaacctgagatggacgagaagggcaacctgaccaccgccggctttgcctgctctcagtgtggccagcccctgttcgtgtacaagctggagcaggtgtctgagaagggcaaggcttacaccaactacttcggacggtgcaatgtggccgagcacgaaaagctgatcctgctggcccagctgaagcccgagaaggatagcgacgaagccgtgacatatagcctgggaaagtttgggcagagggccctggatttctacagcattcatgtgaccaaggagtccacccaccccgtgaagcccctggcccagatcgccggaaacagatacgcctccggacctgtgggaaaggccctgagcgacgcatgtatgggcacaatcgcctccttcctgtctaagtaccaggacatcatcatcgaacaccagaaggtggtgaagggcaaccagaagagactggagagcctgcgggagctggccggcaaggaaaacctggaataccctagcgtgaccctgccacctcagcctcacaccaaggagggcgttgatgcctacaacgaagtgatcgcccgggtgcgaatgtgggtgaacctgaacctgtggcagaagctgaagctaagcagagatgatgccaagcctctgctgagactgaagggattcccttcctttcctctggtcgagagacaggccaacgaagtggactggtgggacatggtgtgtaacgtgaagaagctgatcaacgagaaaaaggaggatggcaaggtgttttggcagaatctggctggctacaagagacaggaagccctgagaccatacctgagcagcgaggaagatcggaagaagggaaagaaattcgctcggtaccagctgggcgacctgctgctgcacctggaaaagaagcacggcgaggactggggaaaggtgtacgacgaggcctgggagcggattgacaagaaagtggaaggcctgagcaagcacatcaagctggaagaggaacggagaagcgaggacgcccagagcaaggccgccctgaccgactggctgcgggctaaggccagcttcgtgatcgagggcctgaaggaggccgacaaggacgagttctgcagatgcgagctgaagctgcagaagtggtacggggacctgcggggaaagcccttcgccatcgaagccgagaacagcatcctggacatcagcggcttcagcaagcagtacaactgtgccttcatctggcagaaggacggcgtgaagaagctgaacctgtacctgatcatcaactacttcaagggcggcaagctgcggttcaagaagatcaaacctgaagccttcgaagccaacagattctacaccgtgatcaacaaaaagagcggcgagatcgtgcccatggaggtgaacttcaacttcgacgaccccaacctgatcatcctgcctctggcctttggcaagagacagggcagagaattcatctggaacgacctgctgtccctggaaaccggcagcctgaagctggccaacggaagagtgatcgagaagacactgtacaacagaagaacccggcaggatgagcctgccctgttcgtggccctgaccttcgagcggcgggaggtcctggactcctccaatatcaaaccaatgaacctgatcggcgtggcaagaggcgaaaacatccccgccgtgatcgccctgaccgaccccgagggctgcccactgagccggtttaaggatagcctgggaaacccaacccacatcctgagaatcggcgagagctataaggagaagcagcggaccatccaggccaagaaggaggtggagcagcggagagccggcggctacagccggaagtacgccagcaaagccaagaatctggcagacgatatggtgagaaacaccgctagagatctgctgtactacgccgtgacccaggatgccatgctgatcttcgccaacctgagccggggcttcggccggcagggcaagcggaccttcatggccgagagacagtacacacggatggaggactggctgaccgccaagctggcctacgagggcctgagcaagacctacctgtccaagacactggcccagtacacctccaagacatgcagcaactgtgggtttaccatcaccagcgccgactacgacagggtgctggagaagctgaagaagacagcaacaggctggatgaccacaattaacggcaaggagctgaaggtggagggccagattacctactacaacagatacaagagacagaacgtagtcaaggacctgtccgtcgagctggatagactgagcgaagaatctgtgaacaacgacatctcctcctggacaaagggcagaagcggagaagctctgagcctcctgaagaaaagattctcccatagacccgtgcaggagaagttcgtgtgcctgaactgcggcttcgagacacacgcagccgagcaagccgccctgaacatcgccagatcctggctgttcctgcggagccaggagtacaagaaataccagacaaacaagacaaccggcaacaccgataagagagccttcgtcgagacctggcagtccttttaccggaagaagcttaaggaggtgtggaaacctgccgtgcggtctggcggatctggcggaggctccacaagcttccagggccccgtgaccttcagggacgtggccatcgacttcagccaggaggagtggaagtggctgcagcccgcccagagggacctgtacaggtgcgtgatgctggagaactacggccacctggtgagcctgggcctgagcatcagcaagcccgacgtggtgagcctgctggagcagggcaaggagccctggctggagcagggcgacgtgaggaggaacctgttcagcgtgagccagagcaacaccagccccaagaaaaagagaaaagtctaagctgccttctgcggggcttgccttctggccatgcccttcttctctcccttgcacctgtacctcttggtctttgaataaagcctgagtaggaaggctagcaaaaaaaaaaaaaaaaaaaaaaaaaaaaaaaaaaaaaaaaaaaaaaaaaaaaaaaaaaaaaaaaaaaaaaaaaaaaaaaa

SEQ ID NO: 7255 - RNA, 5797 nt, synthetic construct
  source 1..5797: mol_type = other RNA
aggaaataagagagaaaagaagagtaagaagaaatataagagccaccatggcccctaagaagaagcgtaaagtgagccggatggaacgcctcgtctacgaggtgcggcagaagtgcagaaacatcgaggacatctgcatctcctgcggatctctgaacgtgaccctggagcacccactgttcatcggcggcatgtgccagaactgtaaaaactgttttctggagtgtgcctatcaatacgacgatgacggctaccagagctactgcaccatctgttgcggcggaagagaggtgctgatgtgtggaaataacaactgctgccggtgcttctgcgtggaatgcgtggacctgctggtgggccccggcgccgcccaggccgctattaaggaagatccttggaactgctacatgtgcggccacaagggcacatacggcctgctgagacggagagaggactggcctagcagactgcagatgttcttcgccaataaccacgaccaggagttcgacccccctaaggtgtaccctcccgtccccgccgagaagagaaagcccatccgggtcctgagcctgttcgatggcatcgccaccggtctgctggtgctgaaggacctgggcatccaggtggataggtacattgcctccgaggtgtgcgaggactccatcaccgtgggaatggtgcgtcatcagggcaagatcatgtacgtgggcgacgtgcggagcgtgacacagaagcatatccaggagtggggccctttcgacctggtgatcggcggcagcccttgcaatgacctgagcatcgtgaacccagcccggaagggcctgtacgagggaaccggcagactgttcttcgagttttacagactgctgcacgacgcccggcctaaggaaggcgacgaccggcccttcttttggctgttcgagaatgtggtggccatgggagtcagcgacaagcgggatattagccggttcctggagagcaaccccgtgatgatcgatgccaaggaagtgagcgccgcccaccgggccagatacttctggggcaatctgcctggcatgaacagacccctggccagcaccgtgaacgacaagctggagctgcaggagtgcctggagcacggccggatcgccaagttcagcaaggtgagaaccatcaccacccgaagcaacagcatcaaacaaggcaaggaccagcactttcctgtgttcatgaacgagaaggaggacatcctgtggtgtaccgagatggagagagtgttcgggttcccagtccactacacagatgtcagcaacatgtctagactggccagacagagactgctgggaagaagctggtccgtccctgtgatcagacacctgttcgcccctctgaaggagtacttcgcctgcgtgagcagcggcaacagcaacgccaacagccggggccccagcttctctagcggcctggtgccactgtccctgagagggagccacatgggccccatggagatctacaaaaccgtgagcgcctggaagcggcagcctgtgcgcgtgctgagcctgtttcggaatatcgataaagtcctgaaaagcctgggattcctggagagcggctctggctccggcggtggcaccctgaagtacgtggaggatgtgacaaacgtggtcagacgggatgtggagaagtggggccccttcgatctggtgtacggcagcacccaacccctgggcagctcttgtgaccggtgccctggctggtacatgtttcagttccaccggatcctgcagtacgccctgccgagacaggagtcccagcggccattcttttggattttcatggacaacttgctgctgaccgaggatgaccaggaaactaccactcggttcctgcagaccgaagccgtgaccctgcaggacgtgagaggccgggactaccagaacgccatgcgggtgtggtccaacatccctggactgaaaagcaagcacgcacctctgacccctaaagaagaggagtacctgcaggcccaggtgcggagcagaagcaagctggacgcccctaaggtggatctgctggtgaagaattgcctcctgcccctgagagagtacttcaagtatttcagccagaatagtctgcccctgggcggcccaagcagcggcgcccctcctcccagcggcggcagcccagccggctccccaacctctaccgaggagggcacctctgagtccgccacccccgagagcggccctggcacctccaccgagcccagcgagggcagcgcacccggcagccctgccggcagccccacctccacagaggagggaaccagcaccgagcccagcgaaggcagcgccccaggcaccagcaccgagcctagtgagggcggctctggcggcggcagcgcccaggagattaaacggatcaacaagatcagaagaagacttgtgaaagacagcaacaccaagaaggccggcaagacaggccccatgaaaaccctgctggttagagtgatgacacccgatctgagagagcggctggaaaacctgagaaagaagcctgaaaatatcccccagcccatcagcaatacatctagagccaacctgaataagctgctgaccgattacaccgaaatgaagaaggcgatcctgcatgtgtactgggaagagttccagaaggaccctgtgggcctgatgagccgggtggcccagcctgccagcaagaagatcgatcagaacaagctgaaacctgagatggacgagaagggcaacctgaccaccgccggctttgcctgctctcagtgtggccagcccctgttcgtgtacaagctggagcaggtgtctgagaagggcaaggcttacaccaactacttcggacggtgcaatgtggccgagcacgaaaagctgatcctgctggcccagctgaagcccgagaaggatagcgacgaagccgtgacatatagcctgggaaagtttgggcagagggccctggatttctacagcattcatgtgaccaaggagtccacccaccccgtgaagcccctggcccagatcgccggaaacagatacgcctccggacctgtgggaaaggccctgagcgacgcatgtatgggcacaatcgcctccttcctgtctaagtaccaggacatcatcatcgaacaccagaaggtggtgaagggcaaccagaagagactggagagcctgcgggagctggccggcaaggaaaacctggaataccctagcgtgaccctgccacctcagcctcacaccaaggagggcgttgatgcctacaacgaagtgatcgcccgggtgcgaatgtgggtgaacctgaacctgtggcagaagctgaagctaagcagagatgatgccaagcctctgctgagactgaagggattcccttcctttcctctggtcgagagacaggccaacgaagtggactggtgggacatggtgtgtaacgtgaagaagctgatcaacgagaaaaaggaggatggcaaggtgttttggcagaatctggctggctacaagagacaggaagccctgagaccatacctgagcagcgaggaagatcggaagaagggaaagaaattcgctcggtaccagctgggcgacctgctgctgcacctggaaaagaagcacggcgaggactggggaaaggtgtacgacgaggcctgggagcggattgacaagaaagtggaaggcctgagcaagcacatcaagctggaagaggaacggagaagcgaggacgcccagagcaaggccgccctgaccgactggctgcgggctaaggccagcttcgtgatcgagggcctgaaggaggccgacaaggacgagttctgcagatgcgagctgaagctgcagaagtggtacggggacctgcggggaaagcccttcgccatcgaagccgagaacagcatcctggacatcagcggcttcagcaagcagtacaactgtgccttcatctggcagaaggacggcgtgaagaagctgaacctgtacctgatcatcaactacttcaagggcggcaagctgcggttcaagaagatcaaacctgaagccttcgaagccaacagattctacaccgtgatcaacaaaaagagcggcgagatcgtgcccatggaggtgaacttcaacttcgacgaccccaacctgatcatcctgcctctggcctttggcaagagacagggcagagaattcatctggaacgacctgctgtccctggaaaccggcagcctgaagctggccaacggaagagtgatcgagaagacactgtacaacagaagaacccggcaggatgagcctgccctgttcgtggccctgaccttcgagcggcgggaggtcctggactcctccaatatcaaaccaatgaacctgatcggcgtggcaagaggcgaaaacatccccgccgtgatcgccctgaccgaccccgagggctgcccactgagccggtttaaggatagcctgggaaacccaacccacatcctgagaatcggcgagagctataaggagaagcagcggaccatccaggccaagaaggaggtggagcagcggagagccggcggctacagccggaagtacgccagcaaagccaagaatctggcagacgatatggtgagaaacaccgctagagatctgctgtactacgccgtgacccaggatgccatgctgatcttcgccaacctgagccggggcttcggccggcagggcaagcggaccttcatggccgagagacagtacacacggatggaggactggctgaccgccaagctggcctacgagggcctgagcaagacctacctgtccaagacactggcccagtacacctccaagacatgcagcaactgtgggtttaccatcaccagcgccgactacgacagggtgctggagaagctgaagaagacagcaacaggctggatgaccacaattaacggcaaggagctgaaggtggagggccagattacctactacaacagatacaagagacagaacgtagtcaaggacctgtccgtcgagctggatagactgagcgaagaatctgtgaacaacgacatctcctcctggacaaagggcagaagcggagaagctctgagcctcctgaagaaaagattctcccatagacccgtgcaggagaagttcgtgtgcctgaactgcggcttcgagacacacgcagccgagcaagccgccctgaacatcgccagatcctggctgttcctgcggagccaggagtacaagaaataccagacaaacaagacaaccggcaacaccgataagagagccttcgtcgagacctggcagtccttttaccggaagaagcttaaggaggtgtggaaacctgccgtgcggtctggcggatctggcggaggctccacaagcgcccagatgctggtgaccttcaaggacgtggccgtgaccttcacccaggaggagtggaggcagctggacctgacccagaggaccctgtacagggaggtgatgctggagacctgcggcctgctggtgagcctgggccacagggtgcccaagcccgagctggtgcacctgctggagcacggccaggagctgtggaccgtgaagaggggcctgagcgaccccacctgcgccggcgacaggacccagaccagccccaagaaaaagagaaaagtctaagctgccttctgcggggcttgccttctggccatgcccttcttctctcccttgcacctgtacctcttggtctttgaataaagcctgagtaggaaggctagcaaaaaaaaaaaaaaaaaaaaaaaaaaaaaaaaaaaaaaaaaaaaaaaaaaaaaaaaaaaaaaaaaaaaaaaaaaaaaaaa

SEQ ID NO: 7256 - RNA, 5797 nt, synthetic construct
  source 1..5797: mol_type = other RNA
aggaaataagagagaaaagaagagtaagaagaaatataagagccaccatggcccctaagaagaagcgtaaagtgagccggatggaacgcctcgtctacgaggtgcggcagaagtgcagaaacatcgaggacatctgcatctcctgcggatctctgaacgtgaccctggagcacccactgttcatcggcggcatgtgccagaactgtaaaaactgttttctggagtgtgcctatcaatacgacgatgacggctaccagagctactgcaccatctgttgcggcggaagagaggtgctgatgtgtggaaataacaactgctgccggtgcttctgcgtggaatgcgtggacctgctggtgggccccggcgccgcccaggccgctattaaggaagatccttggaactgctacatgtgcggccacaagggcacatacggcctgctgagacggagagaggactggcctagcagactgcagatgttcttcgccaataaccacgaccaggagttcgacccccctaaggtgtaccctcccgtccccgccgagaagagaaagcccatccgggtcctgagcctgttcgatggcatcgccaccggtctgctggtgctgaaggacctgggcatccaggtggataggtacattgcctccgaggtgtgcgaggactccatcaccgtgggaatggtgcgtcatcagggcaagatcatgtacgtgggcgacgtgcggagcgtgacacagaagcatatccaggagtggggccctttcgacctggtgatcggcggcagcccttgcaatgacctgagcatcgtgaacccagcccggaagggcctgtacgagggaaccggcagactgttcttcgagttttacagactgctgcacgacgcccggcctaaggaaggcgacgaccggcccttcttttggctgttcgagaatgtggtggccatgggagtcagcgacaagcgggatattagccggttcctggagagcaaccccgtgatgatcgatgccaaggaagtgagcgccgcccaccgggccagatacttctggggcaatctgcctggcatgaacagacccctggccagcaccgtgaacgacaagctggagctgcaggagtgcctggagcacggccggatcgccaagttcagcaaggtgagaaccatcaccacccgaagcaacagcatcaaacaaggcaaggaccagcactttcctgtgttcatgaacgagaaggaggacatcctgtggtgtaccgagatggagagagtgttcgggttcccagtccactacacagatgtcagcaacatgtctagactggccagacagagactgctgggaagaagctggtccgtccctgtgatcagacacctgttcgcccctctgaaggagtacttcgcctgcgtgagcagcggcaacagcaacgccaacagccggggccccagcttctctagcggcctggtgccactgtccctgagagggagccacatgggccccatggagatctacaaaaccgtgagcgcctggaagcggcagcctgtgcgcgtgctgagcctgtttcggaatatcgataaagtcctgaaaagcctgggattcctggagagcggctctggctccggcggtggcaccctgaagtacgtggaggatgtgacaaacgtggtcagacgggatgtggagaagtggggccccttcgatctggtgtacggcagcacccaacccctgggcagctcttgtgaccggtgccctggctggtacatgtttcagttccaccggatcctgcagtacgccctgccgagacaggagtcccagcggccattcttttggattttcatggacaacttgctgctgaccgaggatgaccaggaaactaccactcggttcctgcagaccgaagccgtgaccctgcaggacgtgagaggccgggactaccagaacgccatgcgggtgtggtccaacatccctggactgaaaagcaagcacgcacctctgacccctaaagaagaggagtacctgcaggcccaggtgcggagcagaagcaagctggacgcccctaaggtggatctgctggtgaagaattgcctcctgcccctgagagagtacttcaagtatttcagccagaatagtctgcccctgggcggcccaagcagcggcgcccctcctcccagcggcggcagcccagccggctccccaacctctaccgaggagggcacctctgagtccgccacccccgagagcggccctggcacctccaccgagcccagcgagggcagcgcacccggcagccctgccggcagccccacctccacagaggagggaaccagcaccgagcccagcgaaggcagcgccccaggcaccagcaccgagcctagtgagggcggctctggcggcggcagcgcccaggagattaaacggatcaacaagatcagaagaagacttgtgaaagacagcaacaccaagaaggccggcaagacaggccccatgaaaaccctgctggttagagtgatgacacccgatctgagagagcggctggaaaacctgagaaagaagcctgaaaatatcccccagcccatcagcaatacatctagagccaacctgaataagctgctgaccgattacaccgaaatgaagaaggcgatcctgcatgtgtactgggaagagttccagaaggaccctgtgggcctgatgagccgggtggcccagcctgccagcaagaagatcgatcagaacaagctgaaacctgagatggacgagaagggcaacctgaccaccgccggctttgcctgctctcagtgtggccagcccctgttcgtgtacaagctggagcaggtgtctgagaagggcaaggcttacaccaactacttcggacggtgcaatgtggccgagcacgaaaagctgatcctgctggcccagctgaagcccgagaaggatagcgacgaagccgtgacatatagcctgggaaagtttgggcagagggccctggatttctacagcattcatgtgaccaaggagtccacccaccccgtgaagcccctggcccagatcgccggaaacagatacgcctccggacctgtgggaaaggccctgagcgacgcatgtatgggcacaatcgcctccttcctgtctaagtaccaggacatcatcatcgaacaccagaaggtggtgaagggcaaccagaagagactggagagcctgcgggagctggccggcaaggaaaacctggaataccctagcgtgaccctgccacctcagcctcacaccaaggagggcgttgatgcctacaacgaagtgatcgcccgggtgcgaatgtgggtgaacctgaacctgtggcagaagctgaagctaagcagagatgatgccaagcctctgctgagactgaagggattcccttcctttcctctggtcgagagacaggccaacgaagtggactggtgggacatggtgtgtaacgtgaagaagctgatcaacgagaaaaaggaggatggcaaggtgttttggcagaatctggctggctacaagagacaggaagccctgagaccatacctgagcagcgaggaagatcggaagaagggaaagaaattcgctcggtaccagctgggcgacctgctgctgcacctggaaaagaagcacggcgaggactggggaaaggtgtacgacgaggcctgggagcggattgacaagaaagtggaaggcctgagcaagcacatcaagctggaagaggaacggagaagcgaggacgcccagagcaaggccgccctgaccgactggctgcgggctaaggccagcttcgtgatcgagggcctgaaggaggccgacaaggacgagttctgcagatgcgagctgaagctgcagaagtggtacggggacctgcggggaaagcccttcgccatcgaagccgagaacagcatcctggacatcagcggcttcagcaagcagtacaactgtgccttcatctggcagaaggacggcgtgaagaagctgaacctgtacctgatcatcaactacttcaagggcggcaagctgcggttcaagaagatcaaacctgaagccttcgaagccaacagattctacaccgtgatcaacaaaaagagcggcgagatcgtgcccatggaggtgaacttcaacttcgacgaccccaacctgatcatcctgcctctggcctttggcaagagacagggcagagaattcatctggaacgacctgctgtccctggaaaccggcagcctgaagctggccaacggaagagtgatcgagaagacactgtacaacagaagaacccggcaggatgagcctgccctgttcgtggccctgaccttcgagcggcgggaggtcctggactcctccaatatcaaaccaatgaacctgatcggcgtggcaagaggcgaaaacatccccgccgtgatcgccctgaccgaccccgagggctgcccactgagccggtttaaggatagcctgggaaacccaacccacatcctgagaatcggcgagagctataaggagaagcagcggaccatccaggccaagaaggaggtggagcagcggagagccggcggctacagccggaagtacgccagcaaagccaagaatctggcagacgatatggtgagaaacaccgctagagatctgctgtactacgccgtgacccaggatgccatgctgatcttcgccaacctgagccggggcttcggccggcagggcaagcggaccttcatggccgagagacagtacacacggatggaggactggctgaccgccaagctggcctacgagggcctgagcaagacctacctgtccaagacactggcccagtacacctccaagacatgcagcaactgtgggtttaccatcaccagcgccgactacgacagggtgctggagaagctgaagaagacagcaacaggctggatgaccacaattaacggcaaggagctgaaggtggagggccagattacctactacaacagatacaagagacagaacgtagtcaaggacctgtccgtcgagctggatagactgagcgaagaatctgtgaacaacgacatctcctcctggacaaagggcagaagcggagaagctctgagcctcctgaagaaaagattctcccatagacccgtgcaggagaagttcgtgtgcctgaactgcggcttcgagacacacgcagccgagcaagccgccctgaacatcgccagatcctggctgttcctgcggagccaggagtacaagaaataccagacaaacaagacaaccggcaacaccgataagagagccttcgtcgagacctggcagtccttttaccggaagaagcttaaggaggtgtggaaacctgccgtgcggtctggcggatctggcggaggctccacaagcaggcccagggccctgaagttcgtggacgtggccgtgtacttcagcagcgaggagtggggctgcctgaggcccgcccagagggccctgtacagggacgtgatgagggagacctacggccacctgggcgccctgggcttccccggccccaagcccgccctgatcagctggatggagcaggagagcgaggcctggagcagcgccgcccaggaccccgagaacggcgagagcctgggcggcgccaggaccagccccaagaaaaagagaaaagtctaagctgccttctgcggggcttgccttctggccatgcccttcttctctcccttgcacctgtacctcttggtctttgaataaagcctgagtaggaaggctagcaaaaaaaaaaaaaaaaaaaaaaaaaaaaaaaaaaaaaaaaaaaaaaaaaaaaaaaaaaaaaaaaaaaaaaaaaaaaaaaa

SEQ ID NO: 7257 - RNA, 5797 nt, synthetic construct
  source 1..5797: mol_type = other RNA
aggaaataagagagaaaagaagagtaagaagaaatataagagccaccatggcccctaagaagaagcgtaaagtgagccggatggaacgcctcgtctacgaggtgcggcagaagtgcagaaacatcgaggacatctgcatctcctgcggatctctgaacgtgaccctggagcacccactgttcatcggcggcatgtgccagaactgtaaaaactgttttctggagtgtgcctatcaatacgacgatgacggctaccagagctactgcaccatctgttgcggcggaagagaggtgctgatgtgtggaaataacaactgctgccggtgcttctgcgtggaatgcgtggacctgctggtgggccccggcgccgcccaggccgctattaaggaagatccttggaactgctacatgtgcggccacaagggcacatacggcctgctgagacggagagaggactggcctagcagactgcagatgttcttcgccaataaccacgaccaggagttcgacccccctaaggtgtaccctcccgtccccgccgagaagagaaagcccatccgggtcctgagcctgttcgatggcatcgccaccggtctgctggtgctgaaggacctgggcatccaggtggataggtacattgcctccgaggtgtgcgaggactccatcaccgtgggaatggtgcgtcatcagggcaagatcatgtacgtgggcgacgtgcggagcgtgacacagaagcatatccaggagtggggccctttcgacctggtgatcggcggcagcccttgcaatgacctgagcatcgtgaacccagcccggaagggcctgtacgagggaaccggcagactgttcttcgagttttacagactgctgcacgacgcccggcctaaggaaggcgacgaccggcccttcttttggctgttcgagaatgtggtggccatgggagtcagcgacaagcgggatattagccggttcctggagagcaaccccgtgatgatcgatgccaaggaagtgagcgccgcccaccgggccagatacttctggggcaatctgcctggcatgaacagacccctggccagcaccgtgaacgacaagctggagctgcaggagtgcctggagcacggccggatcgccaagttcagcaaggtgagaaccatcaccacccgaagcaacagcatcaaacaaggcaaggaccagcactttcctgtgttcatgaacgagaaggaggacatcctgtggtgtaccgagatggagagagtgttcgggttcccagtccactacacagatgtcagcaacatgtctagactggccagacagagactgctgggaagaagctggtccgtccctgtgatcagacacctgttcgcccctctgaaggagtacttcgcctgcgtgagcagcggcaacagcaacgccaacagccggggccccagcttctctagcggcctggtgccactgtccctgagagggagccacatgggccccatggagatctacaaaaccgtgagcgcctggaagcggcagcctgtgcgcgtgctgagcctgtttcggaatatcgataaagtcctgaaaagcctgggattcctggagagcggctctggctccggcggtggcaccctgaagtacgtggaggatgtgacaaacgtggtcagacgggatgtggagaagtggggccccttcgatctggtgtacggcagcacccaacccctgggcagctcttgtgaccggtgccctggctggtacatgtttcagttccaccggatcctgcagtacgccctgccgagacaggagtcccagcggccattcttttggattttcatggacaacttgctgctgaccgaggatgaccaggaaactaccactcggttcctgcagaccgaagccgtgaccctgcaggacgtgagaggccgggactaccagaacgccatgcgggtgtggtccaacatccctggactgaaaagcaagcacgcacctctgacccctaaagaagaggagtacctgcaggcccaggtgcggagcagaagcaagctggacgcccctaaggtggatctgctggtgaagaattgcctcctgcccctgagagagtacttcaagtatttcagccagaatagtctgcccctgggcggcccaagcagcggcgcccctcctcccagcggcggcagcccagccggctccccaacctctaccgaggagggcacctctgagtccgccacccccgagagcggccctggcacctccaccgagcccagcgagggcagcgcacccggcagccctgccggcagccccacctccacagaggagggaaccagcaccgagcccagcgaaggcagcgccccaggcaccagcaccgagcctagtgagggcggctctggcggcggcagcgcccaggagattaaacggatcaacaagatcagaagaagacttgtgaaagacagcaacaccaagaaggccggcaagacaggccccatgaaaaccctgctggttagagtgatgacacccgatctgagagagcggctggaaaacctgagaaagaagcctgaaaatatcccccagcccatcagcaatacatctagagccaacctgaataagctgctgaccgattacaccgaaatgaagaaggcgatcctgcatgtgtactgggaagagttccagaaggaccctgtgggcctgatgagccgggtggcccagcctgccagcaagaagatcgatcagaacaagctgaaacctgagatggacgagaagggcaacctgaccaccgccggctttgcctgctctcagtgtggccagcccctgttcgtgtacaagctggagcaggtgtctgagaagggcaaggcttacaccaactacttcggacggtgcaatgtggccgagcacgaaaagctgatcctgctggcccagctgaagcccgagaaggatagcgacgaagccgtgacatatagcctgggaaagtttgggcagagggccctggatttctacagcattcatgtgaccaaggagtccacccaccccgtgaagcccctggcccagatcgccggaaacagatacgcctccggacctgtgggaaaggccctgagcgacgcatgtatgggcacaatcgcctccttcctgtctaagtaccaggacatcatcatcgaacaccagaaggtggtgaagggcaaccagaagagactggagagcctgcgggagctggccggcaaggaaaacctggaataccctagcgtgaccctgccacctcagcctcacaccaaggagggcgttgatgcctacaacgaagtgatcgcccgggtgcgaatgtgggtgaacctgaacctgtggcagaagctgaagctaagcagagatgatgccaagcctctgctgagactgaagggattcccttcctttcctctggtcgagagacaggccaacgaagtggactggtgggacatggtgtgtaacgtgaagaagctgatcaacgagaaaaaggaggatggcaaggtgttttggcagaatctggctggctacaagagacaggaagccctgagaccatacctgagcagcgaggaagatcggaagaagggaaagaaattcgctcggtaccagctgggcgacctgctgctgcacctggaaaagaagcacggcgaggactggggaaaggtgtacgacgaggcctgggagcggattgacaagaaagtggaaggcctgagcaagcacatcaagctggaagaggaacggagaagcgaggacgcccagagcaaggccgccctgaccgactggctgcgggctaaggccagcttcgtgatcgagggcctgaaggaggccgacaaggacgagttctgcagatgcgagctgaagctgcagaagtggtacggggacctgcggggaaagcccttcgccatcgaagccgagaacagcatcctggacatcagcggcttcagcaagcagtacaactgtgccttcatctggcagaaggacggcgtgaagaagctgaacctgtacctgatcatcaactacttcaagggcggcaagctgcggttcaagaagatcaaacctgaagccttcgaagccaacagattctacaccgtgatcaacaaaaagagcggcgagatcgtgcccatggaggtgaacttcaacttcgacgaccccaacctgatcatcctgcctctggcctttggcaagagacagggcagagaattcatctggaacgacctgctgtccctggaaaccggcagcctgaagctggccaacggaagagtgatcgagaagacactgtacaacagaagaacccggcaggatgagcctgccctgttcgtggccctgaccttcgagcggcgggaggtcctggactcctccaatatcaaaccaatgaacctgatcggcgtggcaagaggcgaaaacatccccgccgtgatcgccctgaccgaccccgagggctgcccactgagccggtttaaggatagcctgggaaacccaacccacatcctgagaatcggcgagagctataaggagaagcagcggaccatccaggccaagaaggaggtggagcagcggagagccggcggctacagccggaagtacgccagcaaagccaagaatctggcagacgatatggtgagaaacaccgctagagatctgctgtactacgccgtgacccaggatgccatgctgatcttcgccaacctgagccggggcttcggccggcagggcaagcggaccttcatggccgagagacagtacacacggatggaggactggctgaccgccaagctggcctacgagggcctgagcaagacctacctgtccaagacactggcccagtacacctccaagacatgcagcaactgtgggtttaccatcaccagcgccgactacgacagggtgctggagaagctgaagaagacagcaacaggctggatgaccacaattaacggcaaggagctgaaggtggagggccagattacctactacaacagatacaagagacagaacgtagtcaaggacctgtccgtcgagctggatagactgagcgaagaatctgtgaacaacgacatctcctcctggacaaagggcagaagcggagaagctctgagcctcctgaagaaaagattctcccatagacccgtgcaggagaagttcgtgtgcctgaactgcggcttcgagacacacgcagccgagcaagccgccctgaacatcgccagatcctggctgttcctgcggagccaggagtacaagaaataccagacaaacaagacaaccggcaacaccgataagagagccttcgtcgagacctggcagtccttttaccggaagaagcttaaggaggtgtggaaacctgccgtgcggtctggcggatctggcggaggctccacaagcttccagggccccgtgaccttcgacgaggtggccgtgtacttcaccaaggaggagtgggccctgctggaccccgcccagagggccctgtacagggacgtgatgcaggagaactacgagaccgtgaccagcctgggcctgcccgtgagcaggcccgacgtgatcagccagatggagcagggcgaggagccctgggccagcgccctgcagggcagcgaggacaggctgatcctgaggggcatctgcaccagccccaagaaaaagagaaaagtctaagctgccttctgcggggcttgccttctggccatgcccttcttctctcccttgcacctgtacctcttggtctttgaataaagcctgagtaggaaggctagcaaaaaaaaaaaaaaaaaaaaaaaaaaaaaaaaaaaaaaaaaaaaaaaaaaaaaaaaaaaaaaaaaaaaaaaaaaaaaaaa

SEQ ID NO: 7258 - RNA, 5797 nt, synthetic construct
  source 1..5797: mol_type = other RNA
aggaaataagagagaaaagaagagtaagaagaaatataagagccaccatggcccctaagaagaagcgtaaagtgagccggatggaacgcctcgtctacgaggtgcggcagaagtgcagaaacatcgaggacatctgcatctcctgcggatctctgaacgtgaccctggagcacccactgttcatcggcggcatgtgccagaactgtaaaaactgttttctggagtgtgcctatcaatacgacgatgacggctaccagagctactgcaccatctgttgcggcggaagagaggtgctgatgtgtggaaataacaactgctgccggtgcttctgcgtggaatgcgtggacctgctggtgggccccggcgccgcccaggccgctattaaggaagatccttggaactgctacatgtgcggccacaagggcacatacggcctgctgagacggagagaggactggcctagcagactgcagatgttcttcgccaataaccacgaccaggagttcgacccccctaaggtgtaccctcccgtccccgccgagaagagaaagcccatccgggtcctgagcctgttcgatggcatcgccaccggtctgctggtgctgaaggacctgggcatccaggtggataggtacattgcctccgaggtgtgcgaggactccatcaccgtgggaatggtgcgtcatcagggcaagatcatgtacgtgggcgacgtgcggagcgtgacacagaagcatatccaggagtggggccctttcgacctggtgatcggcggcagcccttgcaatgacctgagcatcgtgaacccagcccggaagggcctgtacgagggaaccggcagactgttcttcgagttttacagactgctgcacgacgcccggcctaaggaaggcgacgaccggcccttcttttggctgttcgagaatgtggtggccatgggagtcagcgacaagcgggatattagccggttcctggagagcaaccccgtgatgatcgatgccaaggaagtgagcgccgcccaccgggccagatacttctggggcaatctgcctggcatgaacagacccctggccagcaccgtgaacgacaagctggagctgcaggagtgcctggagcacggccggatcgccaagttcagcaaggtgagaaccatcaccacccgaagcaacagcatcaaacaaggcaaggaccagcactttcctgtgttcatgaacgagaaggaggacatcctgtggtgtaccgagatggagagagtgttcgggttcccagtccactacacagatgtcagcaacatgtctagactggccagacagagactgctgggaagaagctggtccgtccctgtgatcagacacctgttcgcccctctgaaggagtacttcgcctgcgtgagcagcggcaacagcaacgccaacagccggggccccagcttctctagcggcctggtgccactgtccctgagagggagccacatgggccccatggagatctacaaaaccgtgagcgcctggaagcggcagcctgtgcgcgtgctgagcctgtttcggaatatcgataaagtcctgaaaagcctgggattcctggagagcggctctggctccggcggtggcaccctgaagtacgtggaggatgtgacaaacgtggtcagacgggatgtggagaagtggggccccttcgatctggtgtacggcagcacccaacccctgggcagctcttgtgaccggtgccctggctggtacatgtttcagttccaccggatcctgcagtacgccctgccgagacaggagtcccagcggccattcttttggattttcatggacaacttgctgctgaccgaggatgaccaggaaactaccactcggttcctgcagaccgaagccgtgaccctgcaggacgtgagaggccgggactaccagaacgccatgcgggtgtggtccaacatccctggactgaaaagcaagcacgcacctctgacccctaaagaagaggagtacctgcaggcccaggtgcggagcagaagcaagctggacgcccctaaggtggatctgctggtgaagaattgcctcctgcccctgagagagtacttcaagtatttcagccagaatagtctgcccctgggcggcccaagcagcggcgcccctcctcccagcggcggcagcccagccggctccccaacctctaccgaggagggcacctctgagtccgccacccccgagagcggccctggcacctccaccgagcccagcgagggcagcgcacccggcagccctgccggcagccccacctccacagaggagggaaccagcaccgagcccagcgaaggcagcgccccaggcaccagcaccgagcctagtgagggcggctctggcggcggcagcgcccaggagattaaacggatcaacaagatcagaagaagacttgtgaaagacagcaacaccaagaaggccggcaagacaggccccatgaaaaccctgctggttagagtgatgacacccgatctgagagagcggctggaaaacctgagaaagaagcctgaaaatatcccccagcccatcagcaatacatctagagccaacctgaataagctgctgaccgattacaccgaaatgaagaaggcgatcctgcatgtgtactgggaagagttccagaaggaccctgtgggcctgatgagccgggtggcccagcctgccagcaagaagatcgatcagaacaagctgaaacctgagatggacgagaagggcaacctgaccaccgccggctttgcctgctctcagtgtggccagcccctgttcgtgtacaagctggagcaggtgtctgagaagggcaaggcttacaccaactacttcggacggtgcaatgtggccgagcacgaaaagctgatcctgctggcccagctgaagcccgagaaggatagcgacgaagccgtgacatatagcctgggaaagtttgggcagagggccctggatttctacagcattcatgtgaccaaggagtccacccaccccgtgaagcccctggcccagatcgccggaaacagatacgcctccggacctgtgggaaaggccctgagcgacgcatgtatgggcacaatcgcctccttcctgtctaagtaccaggacatcatcatcgaacaccagaaggtggtgaagggcaaccagaagagactggagagcctgcgggagctggccggcaaggaaaacctggaataccctagcgtgaccctgccacctcagcctcacaccaaggagggcgttgatgcctacaacgaagtgatcgcccgggtgcgaatgtgggtgaacctgaacctgtggcagaagctgaagctaagcagagatgatgccaagcctctgctgagactgaagggattcccttcctttcctctggtcgagagacaggccaacgaagtggactggtgggacatggtgtgtaacgtgaagaagctgatcaacgagaaaaaggaggatggcaaggtgttttggcagaatctggctggctacaagagacaggaagccctgagaccatacctgagcagcgaggaagatcggaagaagggaaagaaattcgctcggtaccagctgggcgacctgctgctgcacctggaaaagaagcacggcgaggactggggaaaggtgtacgacgaggcctgggagcggattgacaagaaagtggaaggcctgagcaagcacatcaagctggaagaggaacggagaagcgaggacgcccagagcaaggccgccctgaccgactggctgcgggctaaggccagcttcgtgatcgagggcctgaaggaggccgacaaggacgagttctgcagatgcgagctgaagctgcagaagtggtacggggacctgcggggaaagcccttcgccatcgaagccgagaacagcatcctggacatcagcggcttcagcaagcagtacaactgtgccttcatctggcagaaggacggcgtgaagaagctgaacctgtacctgatcatcaactacttcaagggcggcaagctgcggttcaagaagatcaaacctgaagccttcgaagccaacagattctacaccgtgatcaacaaaaagagcggcgagatcgtgcccatggaggtgaacttcaacttcgacgaccccaacctgatcatcctgcctctggcctttggcaagagacagggcagagaattcatctggaacgacctgctgtccctggaaaccggcagcctgaagctggccaacggaagagtgatcgagaagacactgtacaacagaagaacccggcaggatgagcctgccctgttcgtggccctgaccttcgagcggcgggaggtcctggactcctccaatatcaaaccaatgaacctgatcggcgtggcaagaggcgaaaacatccccgccgtgatcgccctgaccgaccccgagggctgcccactgagccggtttaaggatagcctgggaaacccaacccacatcctgagaatcggcgagagctataaggagaagcagcggaccatccaggccaagaaggaggtggagcagcggagagccggcggctacagccggaagtacgccagcaaagccaagaatctggcagacgatatggtgagaaacaccgctagagatctgctgtactacgccgtgacccaggatgccatgctgatcttcgccaacctgagccggggcttcggccggcagggcaagcggaccttcatggccgagagacagtacacacggatggaggactggctgaccgccaagctggcctacgagggcctgagcaagacctacctgtccaagacactggcccagtacacctccaagacatgcagcaactgtgggtttaccatcaccagcgccgactacgacagggtgctggagaagctgaagaagacagcaacaggctggatgaccacaattaacggcaaggagctgaaggtggagggccagattacctactacaacagatacaagagacagaacgtagtcaaggacctgtccgtcgagctggatagactgagcgaagaatctgtgaacaacgacatctcctcctggacaaagggcagaagcggagaagctctgagcctcctgaagaaaagattctcccatagacccgtgcaggagaagttcgtgtgcctgaactgcggcttcgagacacacgcagccgagcaagccgccctgaacatcgccagatcctggctgttcctgcggagccaggagtacaagaaataccagacaaacaagacaaccggcaacaccgataagagagccttcgtcgagacctggcagtccttttaccggaagaagcttaaggaggtgtggaaacctgccgtgcggtctggcggatctggcggaggctccacaagcatgaccatgctgcaggacagcttcagcttcgacgacctgagcgtggacttcacccagaaggagtggcagctgctggaccccagccagaagaacctgtacaaggacgtgatgctggagaactacagcagcctggtgagcctgggctacgaggccatgaagcccgacgtgatcttcaagctggagcagggcgaggagccctggatcggcgacgaggagatccccagcagctggagccccgacatcaccagccccaagaaaaagagaaaagtctaagctgccttctgcggggcttgccttctggccatgcccttcttctctcccttgcacctgtacctcttggtctttgaataaagcctgagtaggaaggctagcaaaaaaaaaaaaaaaaaaaaaaaaaaaaaaaaaaaaaaaaaaaaaaaaaaaaaaaaaaaaaaaaaaaaaaaaaaaaaaaa

SEQ ID NO: 7259 - RNA, 5797 nt, synthetic construct
  source 1..5797: mol_type = other RNA
aggaaataagagagaaaagaagagtaagaagaaatataagagccaccatggcccctaagaagaagcgtaaagtgagccggatggaacgcctcgtctacgaggtgcggcagaagtgcagaaacatcgaggacatctgcatctcctgcggatctctgaacgtgaccctggagcacccactgttcatcggcggcatgtgccagaactgtaaaaactgttttctggagtgtgcctatcaatacgacgatgacggctaccagagctactgcaccatctgttgcggcggaagagaggtgctgatgtgtggaaataacaactgctgccggtgcttctgcgtggaatgcgtggacctgctggtgggccccggcgccgcccaggccgctattaaggaagatccttggaactgctacatgtgcggccacaagggcacatacggcctgctgagacggagagaggactggcctagcagactgcagatgttcttcgccaataaccacgaccaggagttcgacccccctaaggtgtaccctcccgtccccgccgagaagagaaagcccatccgggtcctgagcctgttcgatggcatcgccaccggtctgctggtgctgaaggacctgggcatccaggtggataggtacattgcctccgaggtgtgcgaggactccatcaccgtgggaatggtgcgtcatcagggcaagatcatgtacgtgggcgacgtgcggagcgtgacacagaagcatatccaggagtggggccctttcgacctggtgatcggcggcagcccttgcaatgacctgagcatcgtgaacccagcccggaagggcctgtacgagggaaccggcagactgttcttcgagttttacagactgctgcacgacgcccggcctaaggaaggcgacgaccggcccttcttttggctgttcgagaatgtggtggccatgggagtcagcgacaagcgggatattagccggttcctggagagcaaccccgtgatgatcgatgccaaggaagtgagcgccgcccaccgggccagatacttctggggcaatctgcctggcatgaacagacccctggccagcaccgtgaacgacaagctggagctgcaggagtgcctggagcacggccggatcgccaagttcagcaaggtgagaaccatcaccacccgaagcaacagcatcaaacaaggcaaggaccagcactttcctgtgttcatgaacgagaaggaggacatcctgtggtgtaccgagatggagagagtgttcgggttcccagtccactacacagatgtcagcaacatgtctagactggccagacagagactgctgggaagaagctggtccgtccctgtgatcagacacctgttcgcccctctgaaggagtacttcgcctgcgtgagcagcggcaacagcaacgccaacagccggggccccagcttctctagcggcctggtgccactgtccctgagagggagccacatgggccccatggagatctacaaaaccgtgagcgcctggaagcggcagcctgtgcgcgtgctgagcctgtttcggaatatcgataaagtcctgaaaagcctgggattcctggagagcggctctggctccggcggtggcaccctgaagtacgtggaggatgtgacaaacgtggtcagacgggatgtggagaagtggggccccttcgatctggtgtacggcagcacccaacccctgggcagctcttgtgaccggtgccctggctggtacatgtttcagttccaccggatcctgcagtacgccctgccgagacaggagtcccagcggccattcttttggattttcatggacaacttgctgctgaccgaggatgaccaggaaactaccactcggttcctgcagaccgaagccgtgaccctgcaggacgtgagaggccgggactaccagaacgccatgcgggtgtggtccaacatccctggactgaaaagcaagcacgcacctctgacccctaaagaagaggagtacctgcaggcccaggtgcggagcagaagcaagctggacgcccctaaggtggatctgctggtgaagaattgcctcctgcccctgagagagtacttcaagtatttcagccagaatagtctgcccctgggcggcccaagcagcggcgcccctcctcccagcggcggcagcccagccggctccccaacctctaccgaggagggcacctctgagtccgccacccccgagagcggccctggcacctccaccgagcccagcgagggcagcgcacccggcagccctgccggcagccccacctccacagaggagggaaccagcaccgagcccagcgaaggcagcgccccaggcaccagcaccgagcctagtgagggcggctctggcggcggcagcgcccaggagattaaacggatcaacaagatcagaagaagacttgtgaaagacagcaacaccaagaaggccggcaagacaggccccatgaaaaccctgctggttagagtgatgacacccgatctgagagagcggctggaaaacctgagaaagaagcctgaaaatatcccccagcccatcagcaatacatctagagccaacctgaataagctgctgaccgattacaccgaaatgaagaaggcgatcctgcatgtgtactgggaagagttccagaaggaccctgtgggcctgatgagccgggtggcccagcctgccagcaagaagatcgatcagaacaagctgaaacctgagatggacgagaagggcaacctgaccaccgccggctttgcctgctctcagtgtggccagcccctgttcgtgtacaagctggagcaggtgtctgagaagggcaaggcttacaccaactacttcggacggtgcaatgtggccgagcacgaaaagctgatcctgctggcccagctgaagcccgagaaggatagcgacgaagccgtgacatatagcctgggaaagtttgggcagagggccctggatttctacagcattcatgtgaccaaggagtccacccaccccgtgaagcccctggcccagatcgccggaaacagatacgcctccggacctgtgggaaaggccctgagcgacgcatgtatgggcacaatcgcctccttcctgtctaagtaccaggacatcatcatcgaacaccagaaggtggtgaagggcaaccagaagagactggagagcctgcgggagctggccggcaaggaaaacctggaataccctagcgtgaccctgccacctcagcctcacaccaaggagggcgttgatgcctacaacgaagtgatcgcccgggtgcgaatgtgggtgaacctgaacctgtggcagaagctgaagctaagcagagatgatgccaagcctctgctgagactgaagggattcccttcctttcctctggtcgagagacaggccaacgaagtggactggtgggacatggtgtgtaacgtgaagaagctgatcaacgagaaaaaggaggatggcaaggtgttttggcagaatctggctggctacaagagacaggaagccctgagaccatacctgagcagcgaggaagatcggaagaagggaaagaaattcgctcggtaccagctgggcgacctgctgctgcacctggaaaagaagcacggcgaggactggggaaaggtgtacgacgaggcctgggagcggattgacaagaaagtggaaggcctgagcaagcacatcaagctggaagaggaacggagaagcgaggacgcccagagcaaggccgccctgaccgactggctgcgggctaaggccagcttcgtgatcgagggcctgaaggaggccgacaaggacgagttctgcagatgcgagctgaagctgcagaagtggtacggggacctgcggggaaagcccttcgccatcgaagccgagaacagcatcctggacatcagcggcttcagcaagcagtacaactgtgccttcatctggcagaaggacggcgtgaagaagctgaacctgtacctgatcatcaactacttcaagggcggcaagctgcggttcaagaagatcaaacctgaagccttcgaagccaacagattctacaccgtgatcaacaaaaagagcggcgagatcgtgcccatggaggtgaacttcaacttcgacgaccccaacctgatcatcctgcctctggcctttggcaagagacagggcagagaattcatctggaacgacctgctgtccctggaaaccggcagcctgaagctggccaacggaagagtgatcgagaagacactgtacaacagaagaacccggcaggatgagcctgccctgttcgtggccctgaccttcgagcggcgggaggtcctggactcctccaatatcaaaccaatgaacctgatcggcgtggcaagaggcgaaaacatccccgccgtgatcgccctgaccgaccccgagggctgcccactgagccggtttaaggatagcctgggaaacccaacccacatcctgagaatcggcgagagctataaggagaagcagcggaccatccaggccaagaaggaggtggagcagcggagagccggcggctacagccggaagtacgccagcaaagccaagaatctggcagacgatatggtgagaaacaccgctagagatctgctgtactacgccgtgacccaggatgccatgctgatcttcgccaacctgagccggggcttcggccggcagggcaagcggaccttcatggccgagagacagtacacacggatggaggactggctgaccgccaagctggcctacgagggcctgagcaagacctacctgtccaagacactggcccagtacacctccaagacatgcagcaactgtgggtttaccatcaccagcgccgactacgacagggtgctggagaagctgaagaagacagcaacaggctggatgaccacaattaacggcaaggagctgaaggtggagggccagattacctactacaacagatacaagagacagaacgtagtcaaggacctgtccgtcgagctggatagactgagcgaagaatctgtgaacaacgacatctcctcctggacaaagggcagaagcggagaagctctgagcctcctgaagaaaagattctcccatagacccgtgcaggagaagttcgtgtgcctgaactgcggcttcgagacacacgcagccgagcaagccgccctgaacatcgccagatcctggctgttcctgcggagccaggagtacaagaaataccagacaaacaagacaaccggcaacaccgataagagagccttcgtcgagacctggcagtccttttaccggaagaagcttaaggaggtgtggaaacctgccgtgcggtctggcggatctggcggaggctccacaagcttccccatgcccgtgaccttcgaggaggtggccgtgtacttcacccagggccagggcgccctgctggaccccgcccagagggccctgtacagggacgtgatgcaggagaactacaagatggtgaccagcctggccggcttccccatccccaagcccgacctgatcgcccagctggagaggggcgaggagccctgggtgcccgacctgcaggccgacgaggagagggagagccccaggggcaccaccagccccaagaaaaagagaaaagtctaagctgccttctgcggggcttgccttctggccatgcccttcttctctcccttgcacctgtacctcttggtctttgaataaagcctgagtaggaaggctagcaaaaaaaaaaaaaaaaaaaaaaaaaaaaaaaaaaaaaaaaaaaaaaaaaaaaaaaaaaaaaaaaaaaaaaaaaaaaaaaa

SEQ ID NO: 7260 - RNA, 5797 nt, synthetic construct
  source 1..5797: mol_type = other RNA
aggaaataagagagaaaagaagagtaagaagaaatataagagccaccatggcccctaagaagaagcgtaaagtgagccggatggaacgcctcgtctacgaggtgcggcagaagtgcagaaacatcgaggacatctgcatctcctgcggatctctgaacgtgaccctggagcacccactgttcatcggcggcatgtgccagaactgtaaaaactgttttctggagtgtgcctatcaatacgacgatgacggctaccagagctactgcaccatctgttgcggcggaagagaggtgctgatgtgtggaaataacaactgctgccggtgcttctgcgtggaatgcgtggacctgctggtgggccccggcgccgcccaggccgctattaaggaagatccttggaactgctacatgtgcggccacaagggcacatacggcctgctgagacggagagaggactggcctagcagactgcagatgttcttcgccaataaccacgaccaggagttcgacccccctaaggtgtaccctcccgtccccgccgagaagagaaagcccatccgggtcctgagcctgttcgatggcatcgccaccggtctgctggtgctgaaggacctgggcatccaggtggataggtacattgcctccgaggtgtgcgaggactccatcaccgtgggaatggtgcgtcatcagggcaagatcatgtacgtgggcgacgtgcggagcgtgacacagaagcatatccaggagtggggccctttcgacctggtgatcggcggcagcccttgcaatgacctgagcatcgtgaacccagcccggaagggcctgtacgagggaaccggcagactgttcttcgagttttacagactgctgcacgacgcccggcctaaggaaggcgacgaccggcccttcttttggctgttcgagaatgtggtggccatgggagtcagcgacaagcgggatattagccggttcctggagagcaaccccgtgatgatcgatgccaaggaagtgagcgccgcccaccgggccagatacttctggggcaatctgcctggcatgaacagacccctggccagcaccgtgaacgacaagctggagctgcaggagtgcctggagcacggccggatcgccaagttcagcaaggtgagaaccatcaccacccgaagcaacagcatcaaacaaggcaaggaccagcactttcctgtgttcatgaacgagaaggaggacatcctgtggtgtaccgagatggagagagtgttcgggttcccagtccactacacagatgtcagcaacatgtctagactggccagacagagactgctgggaagaagctggtccgtccctgtgatcagacacctgttcgcccctctgaaggagtacttcgcctgcgtgagcagcggcaacagcaacgccaacagccggggccccagcttctctagcggcctggtgccactgtccctgagagggagccacatgggccccatggagatctacaaaaccgtgagcgcctggaagcggcagcctgtgcgcgtgctgagcctgtttcggaatatcgataaagtcctgaaaagcctgggattcctggagagcggctctggctccggcggtggcaccctgaagtacgtggaggatgtgacaaacgtggtcagacgggatgtggagaagtggggccccttcgatctggtgtacggcagcacccaacccctgggcagctcttgtgaccggtgccctggctggtacatgtttcagttccaccggatcctgcagtacgccctgccgagacaggagtcccagcggccattcttttggattttcatggacaacttgctgctgaccgaggatgaccaggaaactaccactcggttcctgcagaccgaagccgtgaccctgcaggacgtgagaggccgggactaccagaacgccatgcgggtgtggtccaacatccctggactgaaaagcaagcacgcacctctgacccctaaagaagaggagtacctgcaggcccaggtgcggagcagaagcaagctggacgcccctaaggtggatctgctggtgaagaattgcctcctgcccctgagagagtacttcaagtatttcagccagaatagtctgcccctgggcggcccaagcagcggcgcccctcctcccagcggcggcagcccagccggctccccaacctctaccgaggagggcacctctgagtccgccacccccgagagcggccctggcacctccaccgagcccagcgagggcagcgcacccggcagccctgccggcagccccacctccacagaggagggaaccagcaccgagcccagcgaaggcagcgccccaggcaccagcaccgagcctagtgagggcggctctggcggcggcagcgcccaggagattaaacggatcaacaagatcagaagaagacttgtgaaagacagcaacaccaagaaggccggcaagacaggccccatgaaaaccctgctggttagagtgatgacacccgatctgagagagcggctggaaaacctgagaaagaagcctgaaaatatcccccagcccatcagcaatacatctagagccaacctgaataagctgctgaccgattacaccgaaatgaagaaggcgatcctgcatgtgtactgggaagagttccagaaggaccctgtgggcctgatgagccgggtggcccagcctgccagcaagaagatcgatcagaacaagctgaaacctgagatggacgagaagggcaacctgaccaccgccggctttgcctgctctcagtgtggccagcccctgttcgtgtacaagctggagcaggtgtctgagaagggcaaggcttacaccaactacttcggacggtgcaatgtggccgagcacgaaaagctgatcctgctggcccagctgaagcccgagaaggatagcgacgaagccgtgacatatagcctgggaaagtttgggcagagggccctggatttctacagcattcatgtgaccaaggagtccacccaccccgtgaagcccctggcccagatcgccggaaacagatacgcctccggacctgtgggaaaggccctgagcgacgcatgtatgggcacaatcgcctccttcctgtctaagtaccaggacatcatcatcgaacaccagaaggtggtgaagggcaaccagaagagactggagagcctgcgggagctggccggcaaggaaaacctggaataccctagcgtgaccctgccacctcagcctcacaccaaggagggcgttgatgcctacaacgaagtgatcgcccgggtgcgaatgtgggtgaacctgaacctgtggcagaagctgaagctaagcagagatgatgccaagcctctgctgagactgaagggattcccttcctttcctctggtcgagagacaggccaacgaagtggactggtgggacatggtgtgtaacgtgaagaagctgatcaacgagaaaaaggaggatggcaaggtgttttggcagaatctggctggctacaagagacaggaagccctgagaccatacctgagcagcgaggaagatcggaagaagggaaagaaattcgctcggtaccagctgggcgacctgctgctgcacctggaaaagaagcacggcgaggactggggaaaggtgtacgacgaggcctgggagcggattgacaagaaagtggaaggcctgagcaagcacatcaagctggaagaggaacggagaagcgaggacgcccagagcaaggccgccctgaccgactggctgcgggctaaggccagcttcgtgatcgagggcctgaaggaggccgacaaggacgagttctgcagatgcgagctgaagctgcagaagtggtacggggacctgcggggaaagcccttcgccatcgaagccgagaacagcatcctggacatcagcggcttcagcaagcagtacaactgtgccttcatctggcagaaggacggcgtgaagaagctgaacctgtacctgatcatcaactacttcaagggcggcaagctgcggttcaagaagatcaaacctgaagccttcgaagccaacagattctacaccgtgatcaacaaaaagagcggcgagatcgtgcccatggaggtgaacttcaacttcgacgaccccaacctgatcatcctgcctctggcctttggcaagagacagggcagagaattcatctggaacgacctgctgtccctggaaaccggcagcctgaagctggccaacggaagagtgatcgagaagacactgtacaacagaagaacccggcaggatgagcctgccctgttcgtggccctgaccttcgagcggcgggaggtcctggactcctccaatatcaaaccaatgaacctgatcggcgtggcaagaggcgaaaacatccccgccgtgatcgccctgaccgaccccgagggctgcccactgagccggtttaaggatagcctgggaaacccaacccacatcctgagaatcggcgagagctataaggagaagcagcggaccatccaggccaagaaggaggtggagcagcggagagccggcggctacagccggaagtacgccagcaaagccaagaatctggcagacgatatggtgagaaacaccgctagagatctgctgtactacgccgtgacccaggatgccatgctgatcttcgccaacctgagccggggcttcggccggcagggcaagcggaccttcatggccgagagacagtacacacggatggaggactggctgaccgccaagctggcctacgagggcctgagcaagacctacctgtccaagacactggcccagtacacctccaagacatgcagcaactgtgggtttaccatcaccagcgccgactacgacagggtgctggagaagctgaagaagacagcaacaggctggatgaccacaattaacggcaaggagctgaaggtggagggccagattacctactacaacagatacaagagacagaacgtagtcaaggacctgtccgtcgagctggatagactgagcgaagaatctgtgaacaacgacatctcctcctggacaaagggcagaagcggagaagctctgagcctcctgaagaaaagattctcccatagacccgtgcaggagaagttcgtgtgcctgaactgcggcttcgagacacacgcagccgagcaagccgccctgaacatcgccagatcctggctgttcctgcggagccaggagtacaagaaataccagacaaacaagacaaccggcaacaccgataagagagccttcgtcgagacctggcagtccttttaccggaagaagcttaaggaggtgtggaaacctgccgtgcggtctggcggatctggcggaggctccacaagcctgctgaccttcgaggacgtggccgtgttcttcagcgaggaggagtggaagctgctgaaccccacccagaagatcctgtacagcgacgtgatgcaggagaactacgagaccgtgatcagcctgggcctgaagctgaagaacgacaccggcaacgaccagcccatcagcctgagcaccctggagctgcaggccagcggctgcaaggtgctgaggaaggccagggtgaaggtggcccagaagaccaccagccccaagaaaaagagaaaagtctaagctgccttctgcggggcttgccttctggccatgcccttcttctctcccttgcacctgtacctcttggtctttgaataaagcctgagtaggaaggctagcaaaaaaaaaaaaaaaaaaaaaaaaaaaaaaaaaaaaaaaaaaaaaaaaaaaaaaaaaaaaaaaaaaaaaaaaaaaaaaaa

SEQ ID NO: 7261 - RNA, 5797 nt, synthetic construct
  source 1..5797: mol_type = other RNA
aggaaataagagagaaaagaagagtaagaagaaatataagagccaccatggcccctaagaagaagcgtaaagtgagccggatggaacgcctcgtctacgaggtgcggcagaagtgcagaaacatcgaggacatctgcatctcctgcggatctctgaacgtgaccctggagcacccactgttcatcggcggcatgtgccagaactgtaaaaactgttttctggagtgtgcctatcaatacgacgatgacggctaccagagctactgcaccatctgttgcggcggaagagaggtgctgatgtgtggaaataacaactgctgccggtgcttctgcgtggaatgcgtggacctgctggtgggccccggcgccgcccaggccgctattaaggaagatccttggaactgctacatgtgcggccacaagggcacatacggcctgctgagacggagagaggactggcctagcagactgcagatgttcttcgccaataaccacgaccaggagttcgacccccctaaggtgtaccctcccgtccccgccgagaagagaaagcccatccgggtcctgagcctgttcgatggcatcgccaccggtctgctggtgctgaaggacctgggcatccaggtggataggtacattgcctccgaggtgtgcgaggactccatcaccgtgggaatggtgcgtcatcagggcaagatcatgtacgtgggcgacgtgcggagcgtgacacagaagcatatccaggagtggggccctttcgacctggtgatcggcggcagcccttgcaatgacctgagcatcgtgaacccagcccggaagggcctgtacgagggaaccggcagactgttcttcgagttttacagactgctgcacgacgcccggcctaaggaaggcgacgaccggcccttcttttggctgttcgagaatgtggtggccatgggagtcagcgacaagcgggatattagccggttcctggagagcaaccccgtgatgatcgatgccaaggaagtgagcgccgcccaccgggccagatacttctggggcaatctgcctggcatgaacagacccctggccagcaccgtgaacgacaagctggagctgcaggagtgcctggagcacggccggatcgccaagttcagcaaggtgagaaccatcaccacccgaagcaacagcatcaaacaaggcaaggaccagcactttcctgtgttcatgaacgagaaggaggacatcctgtggtgtaccgagatggagagagtgttcgggttcccagtccactacacagatgtcagcaacatgtctagactggccagacagagactgctgggaagaagctggtccgtccctgtgatcagacacctgttcgcccctctgaaggagtacttcgcctgcgtgagcagcggcaacagcaacgccaacagccggggccccagcttctctagcggcctggtgccactgtccctgagagggagccacatgggccccatggagatctacaaaaccgtgagcgcctggaagcggcagcctgtgcgcgtgctgagcctgtttcggaatatcgataaagtcctgaaaagcctgggattcctggagagcggctctggctccggcggtggcaccctgaagtacgtggaggatgtgacaaacgtggtcagacgggatgtggagaagtggggccccttcgatctggtgtacggcagcacccaacccctgggcagctcttgtgaccggtgccctggctggtacatgtttcagttccaccggatcctgcagtacgccctgccgagacaggagtcccagcggccattcttttggattttcatggacaacttgctgctgaccgaggatgaccaggaaactaccactcggttcctgcagaccgaagccgtgaccctgcaggacgtgagaggccgggactaccagaacgccatgcgggtgtggtccaacatccctggactgaaaagcaagcacgcacctctgacccctaaagaagaggagtacctgcaggcccaggtgcggagcagaagcaagctggacgcccctaaggtggatctgctggtgaagaattgcctcctgcccctgagagagtacttcaagtatttcagccagaatagtctgcccctgggcggcccaagcagcggcgcccctcctcccagcggcggcagcccagccggctccccaacctctaccgaggagggcacctctgagtccgccacccccgagagcggccctggcacctccaccgagcccagcgagggcagcgcacccggcagccctgccggcagccccacctccacagaggagggaaccagcaccgagcccagcgaaggcagcgccccaggcaccagcaccgagcctagtgagggcggctctggcggcggcagcgcccaggagattaaacggatcaacaagatcagaagaagacttgtgaaagacagcaacaccaagaaggccggcaagacaggccccatgaaaaccctgctggttagagtgatgacacccgatctgagagagcggctggaaaacctgagaaagaagcctgaaaatatcccccagcccatcagcaatacatctagagccaacctgaataagctgctgaccgattacaccgaaatgaagaaggcgatcctgcatgtgtactgggaagagttccagaaggaccctgtgggcctgatgagccgggtggcccagcctgccagcaagaagatcgatcagaacaagctgaaacctgagatggacgagaagggcaacctgaccaccgccggctttgcctgctctcagtgtggccagcccctgttcgtgtacaagctggagcaggtgtctgagaagggcaaggcttacaccaactacttcggacggtgcaatgtggccgagcacgaaaagctgatcctgctggcccagctgaagcccgagaaggatagcgacgaagccgtgacatatagcctgggaaagtttgggcagagggccctggatttctacagcattcatgtgaccaaggagtccacccaccccgtgaagcccctggcccagatcgccggaaacagatacgcctccggacctgtgggaaaggccctgagcgacgcatgtatgggcacaatcgcctccttcctgtctaagtaccaggacatcatcatcgaacaccagaaggtggtgaagggcaaccagaagagactggagagcctgcgggagctggccggcaaggaaaacctggaataccctagcgtgaccctgccacctcagcctcacaccaaggagggcgttgatgcctacaacgaagtgatcgcccgggtgcgaatgtgggtgaacctgaacctgtggcagaagctgaagctaagcagagatgatgccaagcctctgctgagactgaagggattcccttcctttcctctggtcgagagacaggccaacgaagtggactggtgggacatggtgtgtaacgtgaagaagctgatcaacgagaaaaaggaggatggcaaggtgttttggcagaatctggctggctacaagagacaggaagccctgagaccatacctgagcagcgaggaagatcggaagaagggaaagaaattcgctcggtaccagctgggcgacctgctgctgcacctggaaaagaagcacggcgaggactggggaaaggtgtacgacgaggcctgggagcggattgacaagaaagtggaaggcctgagcaagcacatcaagctggaagaggaacggagaagcgaggacgcccagagcaaggccgccctgaccgactggctgcgggctaaggccagcttcgtgatcgagggcctgaaggaggccgacaaggacgagttctgcagatgcgagctgaagctgcagaagtggtacggggacctgcggggaaagcccttcgccatcgaagccgagaacagcatcctggacatcagcggcttcagcaagcagtacaactgtgccttcatctggcagaaggacggcgtgaagaagctgaacctgtacctgatcatcaactacttcaagggcggcaagctgcggttcaagaagatcaaacctgaagccttcgaagccaacagattctacaccgtgatcaacaaaaagagcggcgagatcgtgcccatggaggtgaacttcaacttcgacgaccccaacctgatcatcctgcctctggcctttggcaagagacagggcagagaattcatctggaacgacctgctgtccctggaaaccggcagcctgaagctggccaacggaagagtgatcgagaagacactgtacaacagaagaacccggcaggatgagcctgccctgttcgtggccctgaccttcgagcggcgggaggtcctggactcctccaatatcaaaccaatgaacctgatcggcgtggcaagaggcgaaaacatccccgccgtgatcgccctgaccgaccccgagggctgcccactgagccggtttaaggatagcctgggaaacccaacccacatcctgagaatcggcgagagctataaggagaagcagcggaccatccaggccaagaaggaggtggagcagcggagagccggcggctacagccggaagtacgccagcaaagccaagaatctggcagacgatatggtgagaaacaccgctagagatctgctgtactacgccgtgacccaggatgccatgctgatcttcgccaacctgagccggggcttcggccggcagggcaagcggaccttcatggccgagagacagtacacacggatggaggactggctgaccgccaagctggcctacgagggcctgagcaagacctacctgtccaagacactggcccagtacacctccaagacatgcagcaactgtgggtttaccatcaccagcgccgactacgacagggtgctggagaagctgaagaagacagcaacaggctggatgaccacaattaacggcaaggagctgaaggtggagggccagattacctactacaacagatacaagagacagaacgtagtcaaggacctgtccgtcgagctggatagactgagcgaagaatctgtgaacaacgacatctcctcctggacaaagggcagaagcggagaagctctgagcctcctgaagaaaagattctcccatagacccgtgcaggagaagttcgtgtgcctgaactgcggcttcgagacacacgcagccgagcaagccgccctgaacatcgccagatcctggctgttcctgcggagccaggagtacaagaaataccagacaaacaagacaaccggcaacaccgataagagagccttcgtcgagacctggcagtccttttaccggaagaagcttaaggaggtgtggaaacctgccgtgcggtctggcggatctggcggaggctccacaagctggaaggagctgctgagcttcgaggacgtggccctgttcttcaccagggaggagtggaaccagctggactgggcccagaaggacctgtacagggacgtgatgctggagaactacaggaacctgatcctgctgggcttccagttccccaagcccgaggtgatctgccagctggagcagtgggaggagccctggatcctggacctgcccagggccggcaccaggaaggccagcggcagcgcctgcaccagccccaagaaaaagagaaaagtctaagctgccttctgcggggcttgccttctggccatgcccttcttctctcccttgcacctgtacctcttggtctttgaataaagcctgagtaggaaggctagcaaaaaaaaaaaaaaaaaaaaaaaaaaaaaaaaaaaaaaaaaaaaaaaaaaaaaaaaaaaaaaaaaaaaaaaaaaaaaaaa

SEQ ID NO: 7262 - RNA, 5797 nt, synthetic construct
  source 1..5797: mol_type = other RNA
aggaaataagagagaaaagaagagtaagaagaaatataagagccaccatggcccctaagaagaagcgtaaagtgagccggatggaacgcctcgtctacgaggtgcggcagaagtgcagaaacatcgaggacatctgcatctcctgcggatctctgaacgtgaccctggagcacccactgttcatcggcggcatgtgccagaactgtaaaaactgttttctggagtgtgcctatcaatacgacgatgacggctaccagagctactgcaccatctgttgcggcggaagagaggtgctgatgtgtggaaataacaactgctgccggtgcttctgcgtggaatgcgtggacctgctggtgggccccggcgccgcccaggccgctattaaggaagatccttggaactgctacatgtgcggccacaagggcacatacggcctgctgagacggagagaggactggcctagcagactgcagatgttcttcgccaataaccacgaccaggagttcgacccccctaaggtgtaccctcccgtccccgccgagaagagaaagcccatccgggtcctgagcctgttcgatggcatcgccaccggtctgctggtgctgaaggacctgggcatccaggtggataggtacattgcctccgaggtgtgcgaggactccatcaccgtgggaatggtgcgtcatcagggcaagatcatgtacgtgggcgacgtgcggagcgtgacacagaagcatatccaggagtggggccctttcgacctggtgatcggcggcagcccttgcaatgacctgagcatcgtgaacccagcccggaagggcctgtacgagggaaccggcagactgttcttcgagttttacagactgctgcacgacgcccggcctaaggaaggcgacgaccggcccttcttttggctgttcgagaatgtggtggccatgggagtcagcgacaagcgggatattagccggttcctggagagcaaccccgtgatgatcgatgccaaggaagtgagcgccgcccaccgggccagatacttctggggcaatctgcctggcatgaacagacccctggccagcaccgtgaacgacaagctggagctgcaggagtgcctggagcacggccggatcgccaagttcagcaaggtgagaaccatcaccacccgaagcaacagcatcaaacaaggcaaggaccagcactttcctgtgttcatgaacgagaaggaggacatcctgtggtgtaccgagatggagagagtgttcgggttcccagtccactacacagatgtcagcaacatgtctagactggccagacagagactgctgggaagaagctggtccgtccctgtgatcagacacctgttcgcccctctgaaggagtacttcgcctgcgtgagcagcggcaacagcaacgccaacagccggggccccagcttctctagcggcctggtgccactgtccctgagagggagccacatgggccccatggagatctacaaaaccgtgagcgcctggaagcggcagcctgtgcgcgtgctgagcctgtttcggaatatcgataaagtcctgaaaagcctgggattcctggagagcggctctggctccggcggtggcaccctgaagtacgtggaggatgtgacaaacgtggtcagacgggatgtggagaagtggggccccttcgatctggtgtacggcagcacccaacccctgggcagctcttgtgaccggtgccctggctggtacatgtttcagttccaccggatcctgcagtacgccctgccgagacaggagtcccagcggccattcttttggattttcatggacaacttgctgctgaccgaggatgaccaggaaactaccactcggttcctgcagaccgaagccgtgaccctgcaggacgtgagaggccgggactaccagaacgccatgcgggtgtggtccaacatccctggactgaaaagcaagcacgcacctctgacccctaaagaagaggagtacctgcaggcccaggtgcggagcagaagcaagctggacgcccctaaggtggatctgctggtgaagaattgcctcctgcccctgagagagtacttcaagtatttcagccagaatagtctgcccctgggcggcccaagcagcggcgcccctcctcccagcggcggcagcccagccggctccccaacctctaccgaggagggcacctctgagtccgccacccccgagagcggccctggcacctccaccgagcccagcgagggcagcgcacccggcagccctgccggcagccccacctccacagaggagggaaccagcaccgagcccagcgaaggcagcgccccaggcaccagcaccgagcctagtgagggcggctctggcggcggcagcgcccaggagattaaacggatcaacaagatcagaagaagacttgtgaaagacagcaacaccaagaaggccggcaagacaggccccatgaaaaccctgctggttagagtgatgacacccgatctgagagagcggctggaaaacctgagaaagaagcctgaaaatatcccccagcccatcagcaatacatctagagccaacctgaataagctgctgaccgattacaccgaaatgaagaaggcgatcctgcatgtgtactgggaagagttccagaaggaccctgtgggcctgatgagccgggtggcccagcctgccagcaagaagatcgatcagaacaagctgaaacctgagatggacgagaagggcaacctgaccaccgccggctttgcctgctctcagtgtggccagcccctgttcgtgtacaagctggagcaggtgtctgagaagggcaaggcttacaccaactacttcggacggtgcaatgtggccgagcacgaaaagctgatcctgctggcccagctgaagcccgagaaggatagcgacgaagccgtgacatatagcctgggaaagtttgggcagagggccctggatttctacagcattcatgtgaccaaggagtccacccaccccgtgaagcccctggcccagatcgccggaaacagatacgcctccggacctgtgggaaaggccctgagcgacgcatgtatgggcacaatcgcctccttcctgtctaagtaccaggacatcatcatcgaacaccagaaggtggtgaagggcaaccagaagagactggagagcctgcgggagctggccggcaaggaaaacctggaataccctagcgtgaccctgccacctcagcctcacaccaaggagggcgttgatgcctacaacgaagtgatcgcccgggtgcgaatgtgggtgaacctgaacctgtggcagaagctgaagctaagcagagatgatgccaagcctctgctgagactgaagggattcccttcctttcctctggtcgagagacaggccaacgaagtggactggtgggacatggtgtgtaacgtgaagaagctgatcaacgagaaaaaggaggatggcaaggtgttttggcagaatctggctggctacaagagacaggaagccctgagaccatacctgagcagcgaggaagatcggaagaagggaaagaaattcgctcggtaccagctgggcgacctgctgctgcacctggaaaagaagcacggcgaggactggggaaaggtgtacgacgaggcctgggagcggattgacaagaaagtggaaggcctgagcaagcacatcaagctggaagaggaacggagaagcgaggacgcccagagcaaggccgccctgaccgactggctgcgggctaaggccagcttcgtgatcgagggcctgaaggaggccgacaaggacgagttctgcagatgcgagctgaagctgcagaagtggtacggggacctgcggggaaagcccttcgccatcgaagccgagaacagcatcctggacatcagcggcttcagcaagcagtacaactgtgccttcatctggcagaaggacggcgtgaagaagctgaacctgtacctgatcatcaactacttcaagggcggcaagctgcggttcaagaagatcaaacctgaagccttcgaagccaacagattctacaccgtgatcaacaaaaagagcggcgagatcgtgcccatggaggtgaacttcaacttcgacgaccccaacctgatcatcctgcctctggcctttggcaagagacagggcagagaattcatctggaacgacctgctgtccctggaaaccggcagcctgaagctggccaacggaagagtgatcgagaagacactgtacaacagaagaacccggcaggatgagcctgccctgttcgtggccctgaccttcgagcggcgggaggtcctggactcctccaatatcaaaccaatgaacctgatcggcgtggcaagaggcgaaaacatccccgccgtgatcgccctgaccgaccccgagggctgcccactgagccggtttaaggatagcctgggaaacccaacccacatcctgagaatcggcgagagctataaggagaagcagcggaccatccaggccaagaaggaggtggagcagcggagagccggcggctacagccggaagtacgccagcaaagccaagaatctggcagacgatatggtgagaaacaccgctagagatctgctgtactacgccgtgacccaggatgccatgctgatcttcgccaacctgagccggggcttcggccggcagggcaagcggaccttcatggccgagagacagtacacacggatggaggactggctgaccgccaagctggcctacgagggcctgagcaagacctacctgtccaagacactggcccagtacacctccaagacatgcagcaactgtgggtttaccatcaccagcgccgactacgacagggtgctggagaagctgaagaagacagcaacaggctggatgaccacaattaacggcaaggagctgaaggtggagggccagattacctactacaacagatacaagagacagaacgtagtcaaggacctgtccgtcgagctggatagactgagcgaagaatctgtgaacaacgacatctcctcctggacaaagggcagaagcggagaagctctgagcctcctgaagaaaagattctcccatagacccgtgcaggagaagttcgtgtgcctgaactgcggcttcgagacacacgcagccgagcaagccgccctgaacatcgccagatcctggctgttcctgcggagccaggagtacaagaaataccagacaaacaagacaaccggcaacaccgataagagagccttcgtcgagacctggcagtccttttaccggaagaagcttaaggaggtgtggaaacctgccgtgcggtctggcggatctggcggaggctccacaagccagggcctgctgaccttcggcgacgtggccatcgagttcagccaggaggagtggaggtgcctgagccacacccagagggagctgtacagggacgtgatgctggagaactacggccacctgctgttcctgggcctgatcgtgagcaagcccgacctggtgagcctgctggagcagaggaaggagccctgggacgtgaagaggaagaagaccgtggtgttcgaccccgccgtgagcagccacggcaccagccccaagaaaaagagaaaagtctaagctgccttctgcggggcttgccttctggccatgcccttcttctctcccttgcacctgtacctcttggtctttgaataaagcctgagtaggaaggctagcaaaaaaaaaaaaaaaaaaaaaaaaaaaaaaaaaaaaaaaaaaaaaaaaaaaaaaaaaaaaaaaaaaaaaaaaaaaaaaaa

SEQ ID NO: 7263 - RNA, 5797 nt, synthetic construct
  source 1..5797: mol_type = other RNA
aggaaataagagagaaaagaagagtaagaagaaatataagagccaccatggcccctaagaagaagcgtaaagtgagccggatggaacgcctcgtctacgaggtgcggcagaagtgcagaaacatcgaggacatctgcatctcctgcggatctctgaacgtgaccctggagcacccactgttcatcggcggcatgtgccagaactgtaaaaactgttttctggagtgtgcctatcaatacgacgatgacggctaccagagctactgcaccatctgttgcggcggaagagaggtgctgatgtgtggaaataacaactgctgccggtgcttctgcgtggaatgcgtggacctgctggtgggccccggcgccgcccaggccgctattaaggaagatccttggaactgctacatgtgcggccacaagggcacatacggcctgctgagacggagagaggactggcctagcagactgcagatgttcttcgccaataaccacgaccaggagttcgacccccctaaggtgtaccctcccgtccccgccgagaagagaaagcccatccgggtcctgagcctgttcgatggcatcgccaccggtctgctggtgctgaaggacctgggcatccaggtggataggtacattgcctccgaggtgtgcgaggactccatcaccgtgggaatggtgcgtcatcagggcaagatcatgtacgtgggcgacgtgcggagcgtgacacagaagcatatccaggagtggggccctttcgacctggtgatcggcggcagcccttgcaatgacctgagcatcgtgaacccagcccggaagggcctgtacgagggaaccggcagactgttcttcgagttttacagactgctgcacgacgcccggcctaaggaaggcgacgaccggcccttcttttggctgttcgagaatgtggtggccatgggagtcagcgacaagcgggatattagccggttcctggagagcaaccccgtgatgatcgatgccaaggaagtgagcgccgcccaccgggccagatacttctggggcaatctgcctggcatgaacagacccctggccagcaccgtgaacgacaagctggagctgcaggagtgcctggagcacggccggatcgccaagttcagcaaggtgagaaccatcaccacccgaagcaacagcatcaaacaaggcaaggaccagcactttcctgtgttcatgaacgagaaggaggacatcctgtggtgtaccgagatggagagagtgttcgggttcccagtccactacacagatgtcagcaacatgtctagactggccagacagagactgctgggaagaagctggtccgtccctgtgatcagacacctgttcgcccctctgaaggagtacttcgcctgcgtgagcagcggcaacagcaacgccaacagccggggccccagcttctctagcggcctggtgccactgtccctgagagggagccacatgggccccatggagatctacaaaaccgtgagcgcctggaagcggcagcctgtgcgcgtgctgagcctgtttcggaatatcgataaagtcctgaaaagcctgggattcctggagagcggctctggctccggcggtggcaccctgaagtacgtggaggatgtgacaaacgtggtcagacgggatgtggagaagtggggccccttcgatctggtgtacggcagcacccaacccctgggcagctcttgtgaccggtgccctggctggtacatgtttcagttccaccggatcctgcagtacgccctgccgagacaggagtcccagcggccattcttttggattttcatggacaacttgctgctgaccgaggatgaccaggaaactaccactcggttcctgcagaccgaagccgtgaccctgcaggacgtgagaggccgggactaccagaacgccatgcgggtgtggtccaacatccctggactgaaaagcaagcacgcacctctgacccctaaagaagaggagtacctgcaggcccaggtgcggagcagaagcaagctggacgcccctaaggtggatctgctggtgaagaattgcctcctgcccctgagagagtacttcaagtatttcagccagaatagtctgcccctgggcggcccaagcagcggcgcccctcctcccagcggcggcagcccagccggctccccaacctctaccgaggagggcacctctgagtccgccacccccgagagcggccctggcacctccaccgagcccagcgagggcagcgcacccggcagccctgccggcagccccacctccacagaggagggaaccagcaccgagcccagcgaaggcagcgccccaggcaccagcaccgagcctagtgagggcggctctggcggcggcagcgcccaggagattaaacggatcaacaagatcagaagaagacttgtgaaagacagcaacaccaagaaggccggcaagacaggccccatgaaaaccctgctggttagagtgatgacacccgatctgagagagcggctggaaaacctgagaaagaagcctgaaaatatcccccagcccatcagcaatacatctagagccaacctgaataagctgctgaccgattacaccgaaatgaagaaggcgatcctgcatgtgtactgggaagagttccagaaggaccctgtgggcctgatgagccgggtggcccagcctgccagcaagaagatcgatcagaacaagctgaaacctgagatggacgagaagggcaacctgaccaccgccggctttgcctgctctcagtgtggccagcccctgttcgtgtacaagctggagcaggtgtctgagaagggcaaggcttacaccaactacttcggacggtgcaatgtggccgagcacgaaaagctgatcctgctggcccagctgaagcccgagaaggatagcgacgaagccgtgacatatagcctgggaaagtttgggcagagggccctggatttctacagcattcatgtgaccaaggagtccacccaccccgtgaagcccctggcccagatcgccggaaacagatacgcctccggacctgtgggaaaggccctgagcgacgcatgtatgggcacaatcgcctccttcctgtctaagtaccaggacatcatcatcgaacaccagaaggtggtgaagggcaaccagaagagactggagagcctgcgggagctggccggcaaggaaaacctggaataccctagcgtgaccctgccacctcagcctcacaccaaggagggcgttgatgcctacaacgaagtgatcgcccgggtgcgaatgtgggtgaacctgaacctgtggcagaagctgaagctaagcagagatgatgccaagcctctgctgagactgaagggattcccttcctttcctctggtcgagagacaggccaacgaagtggactggtgggacatggtgtgtaacgtgaagaagctgatcaacgagaaaaaggaggatggcaaggtgttttggcagaatctggctggctacaagagacaggaagccctgagaccatacctgagcagcgaggaagatcggaagaagggaaagaaattcgctcggtaccagctgggcgacctgctgctgcacctggaaaagaagcacggcgaggactggggaaaggtgtacgacgaggcctgggagcggattgacaagaaagtggaaggcctgagcaagcacatcaagctggaagaggaacggagaagcgaggacgcccagagcaaggccgccctgaccgactggctgcgggctaaggccagcttcgtgatcgagggcctgaaggaggccgacaaggacgagttctgcagatgcgagctgaagctgcagaagtggtacggggacctgcggggaaagcccttcgccatcgaagccgagaacagcatcctggacatcagcggcttcagcaagcagtacaactgtgccttcatctggcagaaggacggcgtgaagaagctgaacctgtacctgatcatcaactacttcaagggcggcaagctgcggttcaagaagatcaaacctgaagccttcgaagccaacagattctacaccgtgatcaacaaaaagagcggcgagatcgtgcccatggaggtgaacttcaacttcgacgaccccaacctgatcatcctgcctctggcctttggcaagagacagggcagagaattcatctggaacgacctgctgtccctggaaaccggcagcctgaagctggccaacggaagagtgatcgagaagacactgtacaacagaagaacccggcaggatgagcctgccctgttcgtggccctgaccttcgagcggcgggaggtcctggactcctccaatatcaaaccaatgaacctgatcggcgtggcaagaggcgaaaacatccccgccgtgatcgccctgaccgaccccgagggctgcccactgagccggtttaaggatagcctgggaaacccaacccacatcctgagaatcggcgagagctataaggagaagcagcggaccatccaggccaagaaggaggtggagcagcggagagccggcggctacagccggaagtacgccagcaaagccaagaatctggcagacgatatggtgagaaacaccgctagagatctgctgtactacgccgtgacccaggatgccatgctgatcttcgccaacctgagccggggcttcggccggcagggcaagcggaccttcatggccgagagacagtacacacggatggaggactggctgaccgccaagctggcctacgagggcctgagcaagacctacctgtccaagacactggcccagtacacctccaagacatgcagcaactgtgggtttaccatcaccagcgccgactacgacagggtgctggagaagctgaagaagacagcaacaggctggatgaccacaattaacggcaaggagctgaaggtggagggccagattacctactacaacagatacaagagacagaacgtagtcaaggacctgtccgtcgagctggatagactgagcgaagaatctgtgaacaacgacatctcctcctggacaaagggcagaagcggagaagctctgagcctcctgaagaaaagattctcccatagacccgtgcaggagaagttcgtgtgcctgaactgcggcttcgagacacacgcagccgagcaagccgccctgaacatcgccagatcctggctgttcctgcggagccaggagtacaagaaataccagacaaacaagacaaccggcaacaccgataagagagccttcgtcgagacctggcagtccttttaccggaagaagcttaaggaggtgtggaaacctgccgtgcggtctggcggatctggcggaggctccacaagcgccaggggcctgatggccttcgaggacgtggccgtgtacttcagccaggaggagtggatgttcctgaacgccgcccagagggccctgtacaggcacgtgatgctggagaacttcgccctggtggacagcatcggccccagcgtgagcaggcccagggtgatcatccagctgcagaggggcgaggagccctgggtgcccaacaggaccatcgccggccccggcaggggcacccacaggaggagcaccagccccaagaaaaagagaaaagtctaagctgccttctgcggggcttgccttctggccatgcccttcttctctcccttgcacctgtacctcttggtctttgaataaagcctgagtaggaaggctagcaaaaaaaaaaaaaaaaaaaaaaaaaaaaaaaaaaaaaaaaaaaaaaaaaaaaaaaaaaaaaaaaaaaaaaaaaaaaaaaa

SEQ ID NO: 7264 - RNA, 5797 nt, synthetic construct
  source 1..5797: mol_type = other RNA
aggaaataagagagaaaagaagagtaagaagaaatataagagccaccatggcccctaagaagaagcgtaaagtgagccggatggaacgcctcgtctacgaggtgcggcagaagtgcagaaacatcgaggacatctgcatctcctgcggatctctgaacgtgaccctggagcacccactgttcatcggcggcatgtgccagaactgtaaaaactgttttctggagtgtgcctatcaatacgacgatgacggctaccagagctactgcaccatctgttgcggcggaagagaggtgctgatgtgtggaaataacaactgctgccggtgcttctgcgtggaatgcgtggacctgctggtgggccccggcgccgcccaggccgctattaaggaagatccttggaactgctacatgtgcggccacaagggcacatacggcctgctgagacggagagaggactggcctagcagactgcagatgttcttcgccaataaccacgaccaggagttcgacccccctaaggtgtaccctcccgtccccgccgagaagagaaagcccatccgggtcctgagcctgttcgatggcatcgccaccggtctgctggtgctgaaggacctgggcatccaggtggataggtacattgcctccgaggtgtgcgaggactccatcaccgtgggaatggtgcgtcatcagggcaagatcatgtacgtgggcgacgtgcggagcgtgacacagaagcatatccaggagtggggccctttcgacctggtgatcggcggcagcccttgcaatgacctgagcatcgtgaacccagcccggaagggcctgtacgagggaaccggcagactgttcttcgagttttacagactgctgcacgacgcccggcctaaggaaggcgacgaccggcccttcttttggctgttcgagaatgtggtggccatgggagtcagcgacaagcgggatattagccggttcctggagagcaaccccgtgatgatcgatgccaaggaagtgagcgccgcccaccgggccagatacttctggggcaatctgcctggcatgaacagacccctggccagcaccgtgaacgacaagctggagctgcaggagtgcctggagcacggccggatcgccaagttcagcaaggtgagaaccatcaccacccgaagcaacagcatcaaacaaggcaaggaccagcactttcctgtgttcatgaacgagaaggaggacatcctgtggtgtaccgagatggagagagtgttcgggttcccagtccactacacagatgtcagcaacatgtctagactggccagacagagactgctgggaagaagctggtccgtccctgtgatcagacacctgttcgcccctctgaaggagtacttcgcctgcgtgagcagcggcaacagcaacgccaacagccggggccccagcttctctagcggcctggtgccactgtccctgagagggagccacatgggccccatggagatctacaaaaccgtgagcgcctggaagcggcagcctgtgcgcgtgctgagcctgtttcggaatatcgataaagtcctgaaaagcctgggattcctggagagcggctctggctccggcggtggcaccctgaagtacgtggaggatgtgacaaacgtggtcagacgggatgtggagaagtggggccccttcgatctggtgtacggcagcacccaacccctgggcagctcttgtgaccggtgccctggctggtacatgtttcagttccaccggatcctgcagtacgccctgccgagacaggagtcccagcggccattcttttggattttcatggacaacttgctgctgaccgaggatgaccaggaaactaccactcggttcctgcagaccgaagccgtgaccctgcaggacgtgagaggccgggactaccagaacgccatgcgggtgtggtccaacatccctggactgaaaagcaagcacgcacctctgacccctaaagaagaggagtacctgcaggcccaggtgcggagcagaagcaagctggacgcccctaaggtggatctgctggtgaagaattgcctcctgcccctgagagagtacttcaagtatttcagccagaatagtctgcccctgggcggcccaagcagcggcgcccctcctcccagcggcggcagcccagccggctccccaacctctaccgaggagggcacctctgagtccgccacccccgagagcggccctggcacctccaccgagcccagcgagggcagcgcacccggcagccctgccggcagccccacctccacagaggagggaaccagcaccgagcccagcgaaggcagcgccccaggcaccagcaccgagcctagtgagggcggctctggcggcggcagcgcccaggagattaaacggatcaacaagatcagaagaagacttgtgaaagacagcaacaccaagaaggccggcaagacaggccccatgaaaaccctgctggttagagtgatgacacccgatctgagagagcggctggaaaacctgagaaagaagcctgaaaatatcccccagcccatcagcaatacatctagagccaacctgaataagctgctgaccgattacaccgaaatgaagaaggcgatcctgcatgtgtactgggaagagttccagaaggaccctgtgggcctgatgagccgggtggcccagcctgccagcaagaagatcgatcagaacaagctgaaacctgagatggacgagaagggcaacctgaccaccgccggctttgcctgctctcagtgtggccagcccctgttcgtgtacaagctggagcaggtgtctgagaagggcaaggcttacaccaactacttcggacggtgcaatgtggccgagcacgaaaagctgatcctgctggcccagctgaagcccgagaaggatagcgacgaagccgtgacatatagcctgggaaagtttgggcagagggccctggatttctacagcattcatgtgaccaaggagtccacccaccccgtgaagcccctggcccagatcgccggaaacagatacgcctccggacctgtgggaaaggccctgagcgacgcatgtatgggcacaatcgcctccttcctgtctaagtaccaggacatcatcatcgaacaccagaaggtggtgaagggcaaccagaagagactggagagcctgcgggagctggccggcaaggaaaacctggaataccctagcgtgaccctgccacctcagcctcacaccaaggagggcgttgatgcctacaacgaagtgatcgcccgggtgcgaatgtgggtgaacctgaacctgtggcagaagctgaagctaagcagagatgatgccaagcctctgctgagactgaagggattcccttcctttcctctggtcgagagacaggccaacgaagtggactggtgggacatggtgtgtaacgtgaagaagctgatcaacgagaaaaaggaggatggcaaggtgttttggcagaatctggctggctacaagagacaggaagccctgagaccatacctgagcagcgaggaagatcggaagaagggaaagaaattcgctcggtaccagctgggcgacctgctgctgcacctggaaaagaagcacggcgaggactggggaaaggtgtacgacgaggcctgggagcggattgacaagaaagtggaaggcctgagcaagcacatcaagctggaagaggaacggagaagcgaggacgcccagagcaaggccgccctgaccgactggctgcgggctaaggccagcttcgtgatcgagggcctgaaggaggccgacaaggacgagttctgcagatgcgagctgaagctgcagaagtggtacggggacctgcggggaaagcccttcgccatcgaagccgagaacagcatcctggacatcagcggcttcagcaagcagtacaactgtgccttcatctggcagaaggacggcgtgaagaagctgaacctgtacctgatcatcaactacttcaagggcggcaagctgcggttcaagaagatcaaacctgaagccttcgaagccaacagattctacaccgtgatcaacaaaaagagcggcgagatcgtgcccatggaggtgaacttcaacttcgacgaccccaacctgatcatcctgcctctggcctttggcaagagacagggcagagaattcatctggaacgacctgctgtccctggaaaccggcagcctgaagctggccaacggaagagtgatcgagaagacactgtacaacagaagaacccggcaggatgagcctgccctgttcgtggccctgaccttcgagcggcgggaggtcctggactcctccaatatcaaaccaatgaacctgatcggcgtggcaagaggcgaaaacatccccgccgtgatcgccctgaccgaccccgagggctgcccactgagccggtttaaggatagcctgggaaacccaacccacatcctgagaatcggcgagagctataaggagaagcagcggaccatccaggccaagaaggaggtggagcagcggagagccggcggctacagccggaagtacgccagcaaagccaagaatctggcagacgatatggtgagaaacaccgctagagatctgctgtactacgccgtgacccaggatgccatgctgatcttcgccaacctgagccggggcttcggccggcagggcaagcggaccttcatggccgagagacagtacacacggatggaggactggctgaccgccaagctggcctacgagggcctgagcaagacctacctgtccaagacactggcccagtacacctccaagacatgcagcaactgtgggtttaccatcaccagcgccgactacgacagggtgctggagaagctgaagaagacagcaacaggctggatgaccacaattaacggcaaggagctgaaggtggagggccagattacctactacaacagatacaagagacagaacgtagtcaaggacctgtccgtcgagctggatagactgagcgaagaatctgtgaacaacgacatctcctcctggacaaagggcagaagcggagaagctctgagcctcctgaagaaaagattctcccatagacccgtgcaggagaagttcgtgtgcctgaactgcggcttcgagacacacgcagccgagcaagccgccctgaacatcgccagatcctggctgttcctgcggagccaggagtacaagaaataccagacaaacaagacaaccggcaacaccgataagagagccttcgtcgagacctggcagtccttttaccggaagaagcttaaggaggtgtggaaacctgccgtgcggtctggcggatctggcggaggctccacaagcgcccaggagagcatgaccttcagggacgtggccgtgttcttcagccaggacgagtggctgcacctggacagcgcccagagggccctgtacagggaggtgatgctggagaactacagcaccctggtgagcctgggcatccccttcagcatgcccaaggtgatccaccagctgcagcagggccaggacccctgcaccgtggagggcgacgtgcccagcaacacctgcctgggcttcaagacctggaccagccccaagaaaaagagaaaagtctaagctgccttctgcggggcttgccttctggccatgcccttcttctctcccttgcacctgtacctcttggtctttgaataaagcctgagtaggaaggctagcaaaaaaaaaaaaaaaaaaaaaaaaaaaaaaaaaaaaaaaaaaaaaaaaaaaaaaaaaaaaaaaaaaaaaaaaaaaaaaaa

SEQ ID NO: 7265 - RNA, 5797 nt, synthetic construct
  source 1..5797: mol_type = other RNA
aggaaataagagagaaaagaagagtaagaagaaatataagagccaccatggcccctaagaagaagcgtaaagtgagccggatggaacgcctcgtctacgaggtgcggcagaagtgcagaaacatcgaggacatctgcatctcctgcggatctctgaacgtgaccctggagcacccactgttcatcggcggcatgtgccagaactgtaaaaactgttttctggagtgtgcctatcaatacgacgatgacggctaccagagctactgcaccatctgttgcggcggaagagaggtgctgatgtgtggaaataacaactgctgccggtgcttctgcgtggaatgcgtggacctgctggtgggccccggcgccgcccaggccgctattaaggaagatccttggaactgctacatgtgcggccacaagggcacatacggcctgctgagacggagagaggactggcctagcagactgcagatgttcttcgccaataaccacgaccaggagttcgacccccctaaggtgtaccctcccgtccccgccgagaagagaaagcccatccgggtcctgagcctgttcgatggcatcgccaccggtctgctggtgctgaaggacctgggcatccaggtggataggtacattgcctccgaggtgtgcgaggactccatcaccgtgggaatggtgcgtcatcagggcaagatcatgtacgtgggcgacgtgcggagcgtgacacagaagcatatccaggagtggggccctttcgacctggtgatcggcggcagcccttgcaatgacctgagcatcgtgaacccagcccggaagggcctgtacgagggaaccggcagactgttcttcgagttttacagactgctgcacgacgcccggcctaaggaaggcgacgaccggcccttcttttggctgttcgagaatgtggtggccatgggagtcagcgacaagcgggatattagccggttcctggagagcaaccccgtgatgatcgatgccaaggaagtgagcgccgcccaccgggccagatacttctggggcaatctgcctggcatgaacagacccctggccagcaccgtgaacgacaagctggagctgcaggagtgcctggagcacggccggatcgccaagttcagcaaggtgagaaccatcaccacccgaagcaacagcatcaaacaaggcaaggaccagcactttcctgtgttcatgaacgagaaggaggacatcctgtggtgtaccgagatggagagagtgttcgggttcccagtccactacacagatgtcagcaacatgtctagactggccagacagagactgctgggaagaagctggtccgtccctgtgatcagacacctgttcgcccctctgaaggagtacttcgcctgcgtgagcagcggcaacagcaacgccaacagccggggccccagcttctctagcggcctggtgccactgtccctgagagggagccacatgggccccatggagatctacaaaaccgtgagcgcctggaagcggcagcctgtgcgcgtgctgagcctgtttcggaatatcgataaagtcctgaaaagcctgggattcctggagagcggctctggctccggcggtggcaccctgaagtacgtggaggatgtgacaaacgtggtcagacgggatgtggagaagtggggccccttcgatctggtgtacggcagcacccaacccctgggcagctcttgtgaccggtgccctggctggtacatgtttcagttccaccggatcctgcagtacgccctgccgagacaggagtcccagcggccattcttttggattttcatggacaacttgctgctgaccgaggatgaccaggaaactaccactcggttcctgcagaccgaagccgtgaccctgcaggacgtgagaggccgggactaccagaacgccatgcgggtgtggtccaacatccctggactgaaaagcaagcacgcacctctgacccctaaagaagaggagtacctgcaggcccaggtgcggagcagaagcaagctggacgcccctaaggtggatctgctggtgaagaattgcctcctgcccctgagagagtacttcaagtatttcagccagaatagtctgcccctgggcggcccaagcagcggcgcccctcctcccagcggcggcagcccagccggctccccaacctctaccgaggagggcacctctgagtccgccacccccgagagcggccctggcacctccaccgagcccagcgagggcagcgcacccggcagccctgccggcagccccacctccacagaggagggaaccagcaccgagcccagcgaaggcagcgccccaggcaccagcaccgagcctagtgagggcggctctggcggcggcagcgcccaggagattaaacggatcaacaagatcagaagaagacttgtgaaagacagcaacaccaagaaggccggcaagacaggccccatgaaaaccctgctggttagagtgatgacacccgatctgagagagcggctggaaaacctgagaaagaagcctgaaaatatcccccagcccatcagcaatacatctagagccaacctgaataagctgctgaccgattacaccgaaatgaagaaggcgatcctgcatgtgtactgggaagagttccagaaggaccctgtgggcctgatgagccgggtggcccagcctgccagcaagaagatcgatcagaacaagctgaaacctgagatggacgagaagggcaacctgaccaccgccggctttgcctgctctcagtgtggccagcccctgttcgtgtacaagctggagcaggtgtctgagaagggcaaggcttacaccaactacttcggacggtgcaatgtggccgagcacgaaaagctgatcctgctggcccagctgaagcccgagaaggatagcgacgaagccgtgacatatagcctgggaaagtttgggcagagggccctggatttctacagcattcatgtgaccaaggagtccacccaccccgtgaagcccctggcccagatcgccggaaacagatacgcctccggacctgtgggaaaggccctgagcgacgcatgtatgggcacaatcgcctccttcctgtctaagtaccaggacatcatcatcgaacaccagaaggtggtgaagggcaaccagaagagactggagagcctgcgggagctggccggcaaggaaaacctggaataccctagcgtgaccctgccacctcagcctcacaccaaggagggcgttgatgcctacaacgaagtgatcgcccgggtgcgaatgtgggtgaacctgaacctgtggcagaagctgaagctaagcagagatgatgccaagcctctgctgagactgaagggattcccttcctttcctctggtcgagagacaggccaacgaagtggactggtgggacatggtgtgtaacgtgaagaagctgatcaacgagaaaaaggaggatggcaaggtgttttggcagaatctggctggctacaagagacaggaagccctgagaccatacctgagcagcgaggaagatcggaagaagggaaagaaattcgctcggtaccagctgggcgacctgctgctgcacctggaaaagaagcacggcgaggactggggaaaggtgtacgacgaggcctgggagcggattgacaagaaagtggaaggcctgagcaagcacatcaagctggaagaggaacggagaagcgaggacgcccagagcaaggccgccctgaccgactggctgcgggctaaggccagcttcgtgatcgagggcctgaaggaggccgacaaggacgagttctgcagatgcgagctgaagctgcagaagtggtacggggacctgcggggaaagcccttcgccatcgaagccgagaacagcatcctggacatcagcggcttcagcaagcagtacaactgtgccttcatctggcagaaggacggcgtgaagaagctgaacctgtacctgatcatcaactacttcaagggcggcaagctgcggttcaagaagatcaaacctgaagccttcgaagccaacagattctacaccgtgatcaacaaaaagagcggcgagatcgtgcccatggaggtgaacttcaacttcgacgaccccaacctgatcatcctgcctctggcctttggcaagagacagggcagagaattcatctggaacgacctgctgtccctggaaaccggcagcctgaagctggccaacggaagagtgatcgagaagacactgtacaacagaagaacccggcaggatgagcctgccctgttcgtggccctgaccttcgagcggcgggaggtcctggactcctccaatatcaaaccaatgaacctgatcggcgtggcaagaggcgaaaacatccccgccgtgatcgccctgaccgaccccgagggctgcccactgagccggtttaaggatagcctgggaaacccaacccacatcctgagaatcggcgagagctataaggagaagcagcggaccatccaggccaagaaggaggtggagcagcggagagccggcggctacagccggaagtacgccagcaaagccaagaatctggcagacgatatggtgagaaacaccgctagagatctgctgtactacgccgtgacccaggatgccatgctgatcttcgccaacctgagccggggcttcggccggcagggcaagcggaccttcatggccgagagacagtacacacggatggaggactggctgaccgccaagctggcctacgagggcctgagcaagacctacctgtccaagacactggcccagtacacctccaagacatgcagcaactgtgggtttaccatcaccagcgccgactacgacagggtgctggagaagctgaagaagacagcaacaggctggatgaccacaattaacggcaaggagctgaaggtggagggccagattacctactacaacagatacaagagacagaacgtagtcaaggacctgtccgtcgagctggatagactgagcgaagaatctgtgaacaacgacatctcctcctggacaaagggcagaagcggagaagctctgagcctcctgaagaaaagattctcccatagacccgtgcaggagaagttcgtgtgcctgaactgcggcttcgagacacacgcagccgagcaagccgccctgaacatcgccagatcctggctgttcctgcggagccaggagtacaagaaataccagacaaacaagacaaccggcaacaccgataagagagccttcgtcgagacctggcagtccttttaccggaagaagcttaaggaggtgtggaaacctgccgtgcggtctggcggatctggcggaggctccacaagcccccagggctgcgccatcagcgaggacgtgttcgtgtacttcagcagggaggagtgggtgctgctggacgaggaccagaggctgctgtacagggacgtgatgctggagaacttcgccctgctggccagcctgggcatcaccagcagcaggagctacctggtgacccagctggagcagggcgaggagccctggatgcccgcccaggtggacatgaccgccgccaccgagaaggaggcccagaagaccagccccaagaaaaagagaaaagtctaagctgccttctgcggggcttgccttctggccatgcccttcttctctcccttgcacctgtacctcttggtctttgaataaagcctgagtaggaaggctagcaaaaaaaaaaaaaaaaaaaaaaaaaaaaaaaaaaaaaaaaaaaaaaaaaaaaaaaaaaaaaaaaaaaaaaaaaaaaaaaa

SEQ ID NO: 7266 - RNA, 5797 nt, synthetic construct
  source 1..5797: mol_type = other RNA
aggaaataagagagaaaagaagagtaagaagaaatataagagccaccatggcccctaagaagaagcgtaaagtgagccggatggaacgcctcgtctacgaggtgcggcagaagtgcagaaacatcgaggacatctgcatctcctgcggatctctgaacgtgaccctggagcacccactgttcatcggcggcatgtgccagaactgtaaaaactgttttctggagtgtgcctatcaatacgacgatgacggctaccagagctactgcaccatctgttgcggcggaagagaggtgctgatgtgtggaaataacaactgctgccggtgcttctgcgtggaatgcgtggacctgctggtgggccccggcgccgcccaggccgctattaaggaagatccttggaactgctacatgtgcggccacaagggcacatacggcctgctgagacggagagaggactggcctagcagactgcagatgttcttcgccaataaccacgaccaggagttcgacccccctaaggtgtaccctcccgtccccgccgagaagagaaagcccatccgggtcctgagcctgttcgatggcatcgccaccggtctgctggtgctgaaggacctgggcatccaggtggataggtacattgcctccgaggtgtgcgaggactccatcaccgtgggaatggtgcgtcatcagggcaagatcatgtacgtgggcgacgtgcggagcgtgacacagaagcatatccaggagtggggccctttcgacctggtgatcggcggcagcccttgcaatgacctgagcatcgtgaacccagcccggaagggcctgtacgagggaaccggcagactgttcttcgagttttacagactgctgcacgacgcccggcctaaggaaggcgacgaccggcccttcttttggctgttcgagaatgtggtggccatgggagtcagcgacaagcgggatattagccggttcctggagagcaaccccgtgatgatcgatgccaaggaagtgagcgccgcccaccgggccagatacttctggggcaatctgcctggcatgaacagacccctggccagcaccgtgaacgacaagctggagctgcaggagtgcctggagcacggccggatcgccaagttcagcaaggtgagaaccatcaccacccgaagcaacagcatcaaacaaggcaaggaccagcactttcctgtgttcatgaacgagaaggaggacatcctgtggtgtaccgagatggagagagtgttcgggttcccagtccactacacagatgtcagcaacatgtctagactggccagacagagactgctgggaagaagctggtccgtccctgtgatcagacacctgttcgcccctctgaaggagtacttcgcctgcgtgagcagcggcaacagcaacgccaacagccggggccccagcttctctagcggcctggtgccactgtccctgagagggagccacatgggccccatggagatctacaaaaccgtgagcgcctggaagcggcagcctgtgcgcgtgctgagcctgtttcggaatatcgataaagtcctgaaaagcctgggattcctggagagcggctctggctccggcggtggcaccctgaagtacgtggaggatgtgacaaacgtggtcagacgggatgtggagaagtggggccccttcgatctggtgtacggcagcacccaacccctgggcagctcttgtgaccggtgccctggctggtacatgtttcagttccaccggatcctgcagtacgccctgccgagacaggagtcccagcggccattcttttggattttcatggacaacttgctgctgaccgaggatgaccaggaaactaccactcggttcctgcagaccgaagccgtgaccctgcaggacgtgagaggccgggactaccagaacgccatgcgggtgtggtccaacatccctggactgaaaagcaagcacgcacctctgacccctaaagaagaggagtacctgcaggcccaggtgcggagcagaagcaagctggacgcccctaaggtggatctgctggtgaagaattgcctcctgcccctgagagagtacttcaagtatttcagccagaatagtctgcccctgggcggcccaagcagcggcgcccctcctcccagcggcggcagcccagccggctccccaacctctaccgaggagggcacctctgagtccgccacccccgagagcggccctggcacctccaccgagcccagcgagggcagcgcacccggcagccctgccggcagccccacctccacagaggagggaaccagcaccgagcccagcgaaggcagcgccccaggcaccagcaccgagcctagtgagggcggctctggcggcggcagcgcccaggagattaaacggatcaacaagatcagaagaagacttgtgaaagacagcaacaccaagaaggccggcaagacaggccccatgaaaaccctgctggttagagtgatgacacccgatctgagagagcggctggaaaacctgagaaagaagcctgaaaatatcccccagcccatcagcaatacatctagagccaacctgaataagctgctgaccgattacaccgaaatgaagaaggcgatcctgcatgtgtactgggaagagttccagaaggaccctgtgggcctgatgagccgggtggcccagcctgccagcaagaagatcgatcagaacaagctgaaacctgagatggacgagaagggcaacctgaccaccgccggctttgcctgctctcagtgtggccagcccctgttcgtgtacaagctggagcaggtgtctgagaagggcaaggcttacaccaactacttcggacggtgcaatgtggccgagcacgaaaagctgatcctgctggcccagctgaagcccgagaaggatagcgacgaagccgtgacatatagcctgggaaagtttgggcagagggccctggatttctacagcattcatgtgaccaaggagtccacccaccccgtgaagcccctggcccagatcgccggaaacagatacgcctccggacctgtgggaaaggccctgagcgacgcatgtatgggcacaatcgcctccttcctgtctaagtaccaggacatcatcatcgaacaccagaaggtggtgaagggcaaccagaagagactggagagcctgcgggagctggccggcaaggaaaacctggaataccctagcgtgaccctgccacctcagcctcacaccaaggagggcgttgatgcctacaacgaagtgatcgcccgggtgcgaatgtgggtgaacctgaacctgtggcagaagctgaagctaagcagagatgatgccaagcctctgctgagactgaagggattcccttcctttcctctggtcgagagacaggccaacgaagtggactggtgggacatggtgtgtaacgtgaagaagctgatcaacgagaaaaaggaggatggcaaggtgttttggcagaatctggctggctacaagagacaggaagccctgagaccatacctgagcagcgaggaagatcggaagaagggaaagaaattcgctcggtaccagctgggcgacctgctgctgcacctggaaaagaagcacggcgaggactggggaaaggtgtacgacgaggcctgggagcggattgacaagaaagtggaaggcctgagcaagcacatcaagctggaagaggaacggagaagcgaggacgcccagagcaaggccgccctgaccgactggctgcgggctaaggccagcttcgtgatcgagggcctgaaggaggccgacaaggacgagttctgcagatgcgagctgaagctgcagaagtggtacggggacctgcggggaaagcccttcgccatcgaagccgagaacagcatcctggacatcagcggcttcagcaagcagtacaactgtgccttcatctggcagaaggacggcgtgaagaagctgaacctgtacctgatcatcaactacttcaagggcggcaagctgcggttcaagaagatcaaacctgaagccttcgaagccaacagattctacaccgtgatcaacaaaaagagcggcgagatcgtgcccatggaggtgaacttcaacttcgacgaccccaacctgatcatcctgcctctggcctttggcaagagacagggcagagaattcatctggaacgacctgctgtccctggaaaccggcagcctgaagctggccaacggaagagtgatcgagaagacactgtacaacagaagaacccggcaggatgagcctgccctgttcgtggccctgaccttcgagcggcgggaggtcctggactcctccaatatcaaaccaatgaacctgatcggcgtggcaagaggcgaaaacatccccgccgtgatcgccctgaccgaccccgagggctgcccactgagccggtttaaggatagcctgggaaacccaacccacatcctgagaatcggcgagagctataaggagaagcagcggaccatccaggccaagaaggaggtggagcagcggagagccggcggctacagccggaagtacgccagcaaagccaagaatctggcagacgatatggtgagaaacaccgctagagatctgctgtactacgccgtgacccaggatgccatgctgatcttcgccaacctgagccggggcttcggccggcagggcaagcggaccttcatggccgagagacagtacacacggatggaggactggctgaccgccaagctggcctacgagggcctgagcaagacctacctgtccaagacactggcccagtacacctccaagacatgcagcaactgtgggtttaccatcaccagcgccgactacgacagggtgctggagaagctgaagaagacagcaacaggctggatgaccacaattaacggcaaggagctgaaggtggagggccagattacctactacaacagatacaagagacagaacgtagtcaaggacctgtccgtcgagctggatagactgagcgaagaatctgtgaacaacgacatctcctcctggacaaagggcagaagcggagaagctctgagcctcctgaagaaaagattctcccatagacccgtgcaggagaagttcgtgtgcctgaactgcggcttcgagacacacgcagccgagcaagccgccctgaacatcgccagatcctggctgttcctgcggagccaggagtacaagaaataccagacaaacaagacaaccggcaacaccgataagagagccttcgtcgagacctggcagtccttttaccggaagaagcttaaggaggtgtggaaacctgccgtgcggtctggcggatctggcggaggctccacaagcgtgcacggcagcgtgaccttcagggacgtggccatcgacttcagccaggaggagtgggagtgcctgcagcccgaccagaggaccctgtacagggacgtgatgctggagaactacagccacctgatcagcctgggcagcagcatcagcaagcccgacgtgatcaccctgctggagcaggagcaggagccctggatggtggtgaggaaggagaccaacaggtggtaccccgacctggagagcaagaccagccccaagaaaaagagaaaagtctaagctgccttctgcggggcttgccttctggccatgcccttcttctctcccttgcacctgtacctcttggtctttgaataaagcctgagtaggaaggctagcaaaaaaaaaaaaaaaaaaaaaaaaaaaaaaaaaaaaaaaaaaaaaaaaaaaaaaaaaaaaaaaaaaaaaaaaaaaaaaaa

SEQ ID NO: 7267 - RNA, 5797 nt, synthetic construct
  source 1..5797: mol_type = other RNA
aggaaataagagagaaaagaagagtaagaagaaatataagagccaccatggcccctaagaagaagcgtaaagtgagccggatggaacgcctcgtctacgaggtgcggcagaagtgcagaaacatcgaggacatctgcatctcctgcggatctctgaacgtgaccctggagcacccactgttcatcggcggcatgtgccagaactgtaaaaactgttttctggagtgtgcctatcaatacgacgatgacggctaccagagctactgcaccatctgttgcggcggaagagaggtgctgatgtgtggaaataacaactgctgccggtgcttctgcgtggaatgcgtggacctgctggtgggccccggcgccgcccaggccgctattaaggaagatccttggaactgctacatgtgcggccacaagggcacatacggcctgctgagacggagagaggactggcctagcagactgcagatgttcttcgccaataaccacgaccaggagttcgacccccctaaggtgtaccctcccgtccccgccgagaagagaaagcccatccgggtcctgagcctgttcgatggcatcgccaccggtctgctggtgctgaaggacctgggcatccaggtggataggtacattgcctccgaggtgtgcgaggactccatcaccgtgggaatggtgcgtcatcagggcaagatcatgtacgtgggcgacgtgcggagcgtgacacagaagcatatccaggagtggggccctttcgacctggtgatcggcggcagcccttgcaatgacctgagcatcgtgaacccagcccggaagggcctgtacgagggaaccggcagactgttcttcgagttttacagactgctgcacgacgcccggcctaaggaaggcgacgaccggcccttcttttggctgttcgagaatgtggtggccatgggagtcagcgacaagcgggatattagccggttcctggagagcaaccccgtgatgatcgatgccaaggaagtgagcgccgcccaccgggccagatacttctggggcaatctgcctggcatgaacagacccctggccagcaccgtgaacgacaagctggagctgcaggagtgcctggagcacggccggatcgccaagttcagcaaggtgagaaccatcaccacccgaagcaacagcatcaaacaaggcaaggaccagcactttcctgtgttcatgaacgagaaggaggacatcctgtggtgtaccgagatggagagagtgttcgggttcccagtccactacacagatgtcagcaacatgtctagactggccagacagagactgctgggaagaagctggtccgtccctgtgatcagacacctgttcgcccctctgaaggagtacttcgcctgcgtgagcagcggcaacagcaacgccaacagccggggccccagcttctctagcggcctggtgccactgtccctgagagggagccacatgggccccatggagatctacaaaaccgtgagcgcctggaagcggcagcctgtgcgcgtgctgagcctgtttcggaatatcgataaagtcctgaaaagcctgggattcctggagagcggctctggctccggcggtggcaccctgaagtacgtggaggatgtgacaaacgtggtcagacgggatgtggagaagtggggccccttcgatctggtgtacggcagcacccaacccctgggcagctcttgtgaccggtgccctggctggtacatgtttcagttccaccggatcctgcagtacgccctgccgagacaggagtcccagcggccattcttttggattttcatggacaacttgctgctgaccgaggatgaccaggaaactaccactcggttcctgcagaccgaagccgtgaccctgcaggacgtgagaggccgggactaccagaacgccatgcgggtgtggtccaacatccctggactgaaaagcaagcacgcacctctgacccctaaagaagaggagtacctgcaggcccaggtgcggagcagaagcaagctggacgcccctaaggtggatctgctggtgaagaattgcctcctgcccctgagagagtacttcaagtatttcagccagaatagtctgcccctgggcggcccaagcagcggcgcccctcctcccagcggcggcagcccagccggctccccaacctctaccgaggagggcacctctgagtccgccacccccgagagcggccctggcacctccaccgagcccagcgagggcagcgcacccggcagccctgccggcagccccacctccacagaggagggaaccagcaccgagcccagcgaaggcagcgccccaggcaccagcaccgagcctagtgagggcggctctggcggcggcagcgcccaggagattaaacggatcaacaagatcagaagaagacttgtgaaagacagcaacaccaagaaggccggcaagacaggccccatgaaaaccctgctggttagagtgatgacacccgatctgagagagcggctggaaaacctgagaaagaagcctgaaaatatcccccagcccatcagcaatacatctagagccaacctgaataagctgctgaccgattacaccgaaatgaagaaggcgatcctgcatgtgtactgggaagagttccagaaggaccctgtgggcctgatgagccgggtggcccagcctgccagcaagaagatcgatcagaacaagctgaaacctgagatggacgagaagggcaacctgaccaccgccggctttgcctgctctcagtgtggccagcccctgttcgtgtacaagctggagcaggtgtctgagaagggcaaggcttacaccaactacttcggacggtgcaatgtggccgagcacgaaaagctgatcctgctggcccagctgaagcccgagaaggatagcgacgaagccgtgacatatagcctgggaaagtttgggcagagggccctggatttctacagcattcatgtgaccaaggagtccacccaccccgtgaagcccctggcccagatcgccggaaacagatacgcctccggacctgtgggaaaggccctgagcgacgcatgtatgggcacaatcgcctccttcctgtctaagtaccaggacatcatcatcgaacaccagaaggtggtgaagggcaaccagaagagactggagagcctgcgggagctggccggcaaggaaaacctggaataccctagcgtgaccctgccacctcagcctcacaccaaggagggcgttgatgcctacaacgaagtgatcgcccgggtgcgaatgtgggtgaacctgaacctgtggcagaagctgaagctaagcagagatgatgccaagcctctgctgagactgaagggattcccttcctttcctctggtcgagagacaggccaacgaagtggactggtgggacatggtgtgtaacgtgaagaagctgatcaacgagaaaaaggaggatggcaaggtgttttggcagaatctggctggctacaagagacaggaagccctgagaccatacctgagcagcgaggaagatcggaagaagggaaagaaattcgctcggtaccagctgggcgacctgctgctgcacctggaaaagaagcacggcgaggactggggaaaggtgtacgacgaggcctgggagcggattgacaagaaagtggaaggcctgagcaagcacatcaagctggaagaggaacggagaagcgaggacgcccagagcaaggccgccctgaccgactggctgcgggctaaggccagcttcgtgatcgagggcctgaaggaggccgacaaggacgagttctgcagatgcgagctgaagctgcagaagtggtacggggacctgcggggaaagcccttcgccatcgaagccgagaacagcatcctggacatcagcggcttcagcaagcagtacaactgtgccttcatctggcagaaggacggcgtgaagaagctgaacctgtacctgatcatcaactacttcaagggcggcaagctgcggttcaagaagatcaaacctgaagccttcgaagccaacagattctacaccgtgatcaacaaaaagagcggcgagatcgtgcccatggaggtgaacttcaacttcgacgaccccaacctgatcatcctgcctctggcctttggcaagagacagggcagagaattcatctggaacgacctgctgtccctggaaaccggcagcctgaagctggccaacggaagagtgatcgagaagacactgtacaacagaagaacccggcaggatgagcctgccctgttcgtggccctgaccttcgagcggcgggaggtcctggactcctccaatatcaaaccaatgaacctgatcggcgtggcaagaggcgaaaacatccccgccgtgatcgccctgaccgaccccgagggctgcccactgagccggtttaaggatagcctgggaaacccaacccacatcctgagaatcggcgagagctataaggagaagcagcggaccatccaggccaagaaggaggtggagcagcggagagccggcggctacagccggaagtacgccagcaaagccaagaatctggcagacgatatggtgagaaacaccgctagagatctgctgtactacgccgtgacccaggatgccatgctgatcttcgccaacctgagccggggcttcggccggcagggcaagcggaccttcatggccgagagacagtacacacggatggaggactggctgaccgccaagctggcctacgagggcctgagcaagacctacctgtccaagacactggcccagtacacctccaagacatgcagcaactgtgggtttaccatcaccagcgccgactacgacagggtgctggagaagctgaagaagacagcaacaggctggatgaccacaattaacggcaaggagctgaaggtggagggccagattacctactacaacagatacaagagacagaacgtagtcaaggacctgtccgtcgagctggatagactgagcgaagaatctgtgaacaacgacatctcctcctggacaaagggcagaagcggagaagctctgagcctcctgaagaaaagattctcccatagacccgtgcaggagaagttcgtgtgcctgaactgcggcttcgagacacacgcagccgagcaagccgccctgaacatcgccagatcctggctgttcctgcggagccaggagtacaagaaataccagacaaacaagacaaccggcaacaccgataagagagccttcgtcgagacctggcagtccttttaccggaagaagcttaaggaggtgtggaaacctgccgtgcggtctggcggatctggcggaggctccacaagcaggcccgagagcgtgaccttcgaggacgtggccatctacttcagcgagaacgagtggaccggcctggcccccgcccagagggccctgtacagggacgtgatgctggagaactacggcgccctggccagcctggccttccccttccccaagcccgccctgatcttccagctggagcagggcgaggccccctggagcagcgccccccagggcgccctggacggcgagggccccaggggcatcagcaccagccccaagaaaaagagaaaagtctaagctgccttctgcggggcttgccttctggccatgcccttcttctctcccttgcacctgtacctcttggtctttgaataaagcctgagtaggaaggctagcaaaaaaaaaaaaaaaaaaaaaaaaaaaaaaaaaaaaaaaaaaaaaaaaaaaaaaaaaaaaaaaaaaaaaaaaaaaaaaaa

SEQ ID NO: 7268 - RNA, 5797 nt, synthetic construct
  source 1..5797: mol_type = other RNA
aggaaataagagagaaaagaagagtaagaagaaatataagagccaccatggcccctaagaagaagcgtaaagtgagccggatggaacgcctcgtctacgaggtgcggcagaagtgcagaaacatcgaggacatctgcatctcctgcggatctctgaacgtgaccctggagcacccactgttcatcggcggcatgtgccagaactgtaaaaactgttttctggagtgtgcctatcaatacgacgatgacggctaccagagctactgcaccatctgttgcggcggaagagaggtgctgatgtgtggaaataacaactgctgccggtgcttctgcgtggaatgcgtggacctgctggtgggccccggcgccgcccaggccgctattaaggaagatccttggaactgctacatgtgcggccacaagggcacatacggcctgctgagacggagagaggactggcctagcagactgcagatgttcttcgccaataaccacgaccaggagttcgacccccctaaggtgtaccctcccgtccccgccgagaagagaaagcccatccgggtcctgagcctgttcgatggcatcgccaccggtctgctggtgctgaaggacctgggcatccaggtggataggtacattgcctccgaggtgtgcgaggactccatcaccgtgggaatggtgcgtcatcagggcaagatcatgtacgtgggcgacgtgcggagcgtgacacagaagcatatccaggagtggggccctttcgacctggtgatcggcggcagcccttgcaatgacctgagcatcgtgaacccagcccggaagggcctgtacgagggaaccggcagactgttcttcgagttttacagactgctgcacgacgcccggcctaaggaaggcgacgaccggcccttcttttggctgttcgagaatgtggtggccatgggagtcagcgacaagcgggatattagccggttcctggagagcaaccccgtgatgatcgatgccaaggaagtgagcgccgcccaccgggccagatacttctggggcaatctgcctggcatgaacagacccctggccagcaccgtgaacgacaagctggagctgcaggagtgcctggagcacggccggatcgccaagttcagcaaggtgagaaccatcaccacccgaagcaacagcatcaaacaaggcaaggaccagcactttcctgtgttcatgaacgagaaggaggacatcctgtggtgtaccgagatggagagagtgttcgggttcccagtccactacacagatgtcagcaacatgtctagactggccagacagagactgctgggaagaagctggtccgtccctgtgatcagacacctgttcgcccctctgaaggagtacttcgcctgcgtgagcagcggcaacagcaacgccaacagccggggccccagcttctctagcggcctggtgccactgtccctgagagggagccacatgggccccatggagatctacaaaaccgtgagcgcctggaagcggcagcctgtgcgcgtgctgagcctgtttcggaatatcgataaagtcctgaaaagcctgggattcctggagagcggctctggctccggcggtggcaccctgaagtacgtggaggatgtgacaaacgtggtcagacgggatgtggagaagtggggccccttcgatctggtgtacggcagcacccaacccctgggcagctcttgtgaccggtgccctggctggtacatgtttcagttccaccggatcctgcagtacgccctgccgagacaggagtcccagcggccattcttttggattttcatggacaacttgctgctgaccgaggatgaccaggaaactaccactcggttcctgcagaccgaagccgtgaccctgcaggacgtgagaggccgggactaccagaacgccatgcgggtgtggtccaacatccctggactgaaaagcaagcacgcacctctgacccctaaagaagaggagtacctgcaggcccaggtgcggagcagaagcaagctggacgcccctaaggtggatctgctggtgaagaattgcctcctgcccctgagagagtacttcaagtatttcagccagaatagtctgcccctgggcggcccaagcagcggcgcccctcctcccagcggcggcagcccagccggctccccaacctctaccgaggagggcacctctgagtccgccacccccgagagcggccctggcacctccaccgagcccagcgagggcagcgcacccggcagccctgccggcagccccacctccacagaggagggaaccagcaccgagcccagcgaaggcagcgccccaggcaccagcaccgagcctagtgagggcggctctggcggcggcagcgcccaggagattaaacggatcaacaagatcagaagaagacttgtgaaagacagcaacaccaagaaggccggcaagacaggccccatgaaaaccctgctggttagagtgatgacacccgatctgagagagcggctggaaaacctgagaaagaagcctgaaaatatcccccagcccatcagcaatacatctagagccaacctgaataagctgctgaccgattacaccgaaatgaagaaggcgatcctgcatgtgtactgggaagagttccagaaggaccctgtgggcctgatgagccgggtggcccagcctgccagcaagaagatcgatcagaacaagctgaaacctgagatggacgagaagggcaacctgaccaccgccggctttgcctgctctcagtgtggccagcccctgttcgtgtacaagctggagcaggtgtctgagaagggcaaggcttacaccaactacttcggacggtgcaatgtggccgagcacgaaaagctgatcctgctggcccagctgaagcccgagaaggatagcgacgaagccgtgacatatagcctgggaaagtttgggcagagggccctggatttctacagcattcatgtgaccaaggagtccacccaccccgtgaagcccctggcccagatcgccggaaacagatacgcctccggacctgtgggaaaggccctgagcgacgcatgtatgggcacaatcgcctccttcctgtctaagtaccaggacatcatcatcgaacaccagaaggtggtgaagggcaaccagaagagactggagagcctgcgggagctggccggcaaggaaaacctggaataccctagcgtgaccctgccacctcagcctcacaccaaggagggcgttgatgcctacaacgaagtgatcgcccgggtgcgaatgtgggtgaacctgaacctgtggcagaagctgaagctaagcagagatgatgccaagcctctgctgagactgaagggattcccttcctttcctctggtcgagagacaggccaacgaagtggactggtgggacatggtgtgtaacgtgaagaagctgatcaacgagaaaaaggaggatggcaaggtgttttggcagaatctggctggctacaagagacaggaagccctgagaccatacctgagcagcgaggaagatcggaagaagggaaagaaattcgctcggtaccagctgggcgacctgctgctgcacctggaaaagaagcacggcgaggactggggaaaggtgtacgacgaggcctgggagcggattgacaagaaagtggaaggcctgagcaagcacatcaagctggaagaggaacggagaagcgaggacgcccagagcaaggccgccctgaccgactggctgcgggctaaggccagcttcgtgatcgagggcctgaaggaggccgacaaggacgagttctgcagatgcgagctgaagctgcagaagtggtacggggacctgcggggaaagcccttcgccatcgaagccgagaacagcatcctggacatcagcggcttcagcaagcagtacaactgtgccttcatctggcagaaggacggcgtgaagaagctgaacctgtacctgatcatcaactacttcaagggcggcaagctgcggttcaagaagatcaaacctgaagccttcgaagccaacagattctacaccgtgatcaacaaaaagagcggcgagatcgtgcccatggaggtgaacttcaacttcgacgaccccaacctgatcatcctgcctctggcctttggcaagagacagggcagagaattcatctggaacgacctgctgtccctggaaaccggcagcctgaagctggccaacggaagagtgatcgagaagacactgtacaacagaagaacccggcaggatgagcctgccctgttcgtggccctgaccttcgagcggcgggaggtcctggactcctccaatatcaaaccaatgaacctgatcggcgtggcaagaggcgaaaacatccccgccgtgatcgccctgaccgaccccgagggctgcccactgagccggtttaaggatagcctgggaaacccaacccacatcctgagaatcggcgagagctataaggagaagcagcggaccatccaggccaagaaggaggtggagcagcggagagccggcggctacagccggaagtacgccagcaaagccaagaatctggcagacgatatggtgagaaacaccgctagagatctgctgtactacgccgtgacccaggatgccatgctgatcttcgccaacctgagccggggcttcggccggcagggcaagcggaccttcatggccgagagacagtacacacggatggaggactggctgaccgccaagctggcctacgagggcctgagcaagacctacctgtccaagacactggcccagtacacctccaagacatgcagcaactgtgggtttaccatcaccagcgccgactacgacagggtgctggagaagctgaagaagacagcaacaggctggatgaccacaattaacggcaaggagctgaaggtggagggccagattacctactacaacagatacaagagacagaacgtagtcaaggacctgtccgtcgagctggatagactgagcgaagaatctgtgaacaacgacatctcctcctggacaaagggcagaagcggagaagctctgagcctcctgaagaaaagattctcccatagacccgtgcaggagaagttcgtgtgcctgaactgcggcttcgagacacacgcagccgagcaagccgccctgaacatcgccagatcctggctgttcctgcggagccaggagtacaagaaataccagacaaacaagacaaccggcaacaccgataagagagccttcgtcgagacctggcagtccttttaccggaagaagcttaaggaggtgtggaaacctgccgtgcggtctggcggatctggcggaggctccacaagcagccagggcagcgtgaccttcggcgacgtggccatcgacttcagcagggaggagtgggagtggctgcagcccgcccagagggacctgtacaggatcgtgatgctggagaactacggccacctggtgagcctgggcctgaacgtgagcaagcccgacgtggtgagcctgctggagcagggcaaggagccctggctgggcaacggcgacgtgaggagggacctgttcagcgtgagcgagagcaacaccagccccaagaaaaagagaaaagtctaagctgccttctgcggggcttgccttctggccatgcccttcttctctcccttgcacctgtacctcttggtctttgaataaagcctgagtaggaaggctagcaaaaaaaaaaaaaaaaaaaaaaaaaaaaaaaaaaaaaaaaaaaaaaaaaaaaaaaaaaaaaaaaaaaaaaaaaaaaaaaa

SEQ ID NO: 7269 - RNA, 5797 nt, synthetic construct
  source 1..5797: mol_type = other RNA
aggaaataagagagaaaagaagagtaagaagaaatataagagccaccatggcccctaagaagaagcgtaaagtgagccggatggaacgcctcgtctacgaggtgcggcagaagtgcagaaacatcgaggacatctgcatctcctgcggatctctgaacgtgaccctggagcacccactgttcatcggcggcatgtgccagaactgtaaaaactgttttctggagtgtgcctatcaatacgacgatgacggctaccagagctactgcaccatctgttgcggcggaagagaggtgctgatgtgtggaaataacaactgctgccggtgcttctgcgtggaatgcgtggacctgctggtgggccccggcgccgcccaggccgctattaaggaagatccttggaactgctacatgtgcggccacaagggcacatacggcctgctgagacggagagaggactggcctagcagactgcagatgttcttcgccaataaccacgaccaggagttcgacccccctaaggtgtaccctcccgtccccgccgagaagagaaagcccatccgggtcctgagcctgttcgatggcatcgccaccggtctgctggtgctgaaggacctgggcatccaggtggataggtacattgcctccgaggtgtgcgaggactccatcaccgtgggaatggtgcgtcatcagggcaagatcatgtacgtgggcgacgtgcggagcgtgacacagaagcatatccaggagtggggccctttcgacctggtgatcggcggcagcccttgcaatgacctgagcatcgtgaacccagcccggaagggcctgtacgagggaaccggcagactgttcttcgagttttacagactgctgcacgacgcccggcctaaggaaggcgacgaccggcccttcttttggctgttcgagaatgtggtggccatgggagtcagcgacaagcgggatattagccggttcctggagagcaaccccgtgatgatcgatgccaaggaagtgagcgccgcccaccgggccagatacttctggggcaatctgcctggcatgaacagacccctggccagcaccgtgaacgacaagctggagctgcaggagtgcctggagcacggccggatcgccaagttcagcaaggtgagaaccatcaccacccgaagcaacagcatcaaacaaggcaaggaccagcactttcctgtgttcatgaacgagaaggaggacatcctgtggtgtaccgagatggagagagtgttcgggttcccagtccactacacagatgtcagcaacatgtctagactggccagacagagactgctgggaagaagctggtccgtccctgtgatcagacacctgttcgcccctctgaaggagtacttcgcctgcgtgagcagcggcaacagcaacgccaacagccggggccccagcttctctagcggcctggtgccactgtccctgagagggagccacatgggccccatggagatctacaaaaccgtgagcgcctggaagcggcagcctgtgcgcgtgctgagcctgtttcggaatatcgataaagtcctgaaaagcctgggattcctggagagcggctctggctccggcggtggcaccctgaagtacgtggaggatgtgacaaacgtggtcagacgggatgtggagaagtggggccccttcgatctggtgtacggcagcacccaacccctgggcagctcttgtgaccggtgccctggctggtacatgtttcagttccaccggatcctgcagtacgccctgccgagacaggagtcccagcggccattcttttggattttcatggacaacttgctgctgaccgaggatgaccaggaaactaccactcggttcctgcagaccgaagccgtgaccctgcaggacgtgagaggccgggactaccagaacgccatgcgggtgtggtccaacatccctggactgaaaagcaagcacgcacctctgacccctaaagaagaggagtacctgcaggcccaggtgcggagcagaagcaagctggacgcccctaaggtggatctgctggtgaagaattgcctcctgcccctgagagagtacttcaagtatttcagccagaatagtctgcccctgggcggcccaagcagcggcgcccctcctcccagcggcggcagcccagccggctccccaacctctaccgaggagggcacctctgagtccgccacccccgagagcggccctggcacctccaccgagcccagcgagggcagcgcacccggcagccctgccggcagccccacctccacagaggagggaaccagcaccgagcccagcgaaggcagcgccccaggcaccagcaccgagcctagtgagggcggctctggcggcggcagcgcccaggagattaaacggatcaacaagatcagaagaagacttgtgaaagacagcaacaccaagaaggccggcaagacaggccccatgaaaaccctgctggttagagtgatgacacccgatctgagagagcggctggaaaacctgagaaagaagcctgaaaatatcccccagcccatcagcaatacatctagagccaacctgaataagctgctgaccgattacaccgaaatgaagaaggcgatcctgcatgtgtactgggaagagttccagaaggaccctgtgggcctgatgagccgggtggcccagcctgccagcaagaagatcgatcagaacaagctgaaacctgagatggacgagaagggcaacctgaccaccgccggctttgcctgctctcagtgtggccagcccctgttcgtgtacaagctggagcaggtgtctgagaagggcaaggcttacaccaactacttcggacggtgcaatgtggccgagcacgaaaagctgatcctgctggcccagctgaagcccgagaaggatagcgacgaagccgtgacatatagcctgggaaagtttgggcagagggccctggatttctacagcattcatgtgaccaaggagtccacccaccccgtgaagcccctggcccagatcgccggaaacagatacgcctccggacctgtgggaaaggccctgagcgacgcatgtatgggcacaatcgcctccttcctgtctaagtaccaggacatcatcatcgaacaccagaaggtggtgaagggcaaccagaagagactggagagcctgcgggagctggccggcaaggaaaacctggaataccctagcgtgaccctgccacctcagcctcacaccaaggagggcgttgatgcctacaacgaagtgatcgcccgggtgcgaatgtgggtgaacctgaacctgtggcagaagctgaagctaagcagagatgatgccaagcctctgctgagactgaagggattcccttcctttcctctggtcgagagacaggccaacgaagtggactggtgggacatggtgtgtaacgtgaagaagctgatcaacgagaaaaaggaggatggcaaggtgttttggcagaatctggctggctacaagagacaggaagccctgagaccatacctgagcagcgaggaagatcggaagaagggaaagaaattcgctcggtaccagctgggcgacctgctgctgcacctggaaaagaagcacggcgaggactggggaaaggtgtacgacgaggcctgggagcggattgacaagaaagtggaaggcctgagcaagcacatcaagctggaagaggaacggagaagcgaggacgcccagagcaaggccgccctgaccgactggctgcgggctaaggccagcttcgtgatcgagggcctgaaggaggccgacaaggacgagttctgcagatgcgagctgaagctgcagaagtggtacggggacctgcggggaaagcccttcgccatcgaagccgagaacagcatcctggacatcagcggcttcagcaagcagtacaactgtgccttcatctggcagaaggacggcgtgaagaagctgaacctgtacctgatcatcaactacttcaagggcggcaagctgcggttcaagaagatcaaacctgaagccttcgaagccaacagattctacaccgtgatcaacaaaaagagcggcgagatcgtgcccatggaggtgaacttcaacttcgacgaccccaacctgatcatcctgcctctggcctttggcaagagacagggcagagaattcatctggaacgacctgctgtccctggaaaccggcagcctgaagctggccaacggaagagtgatcgagaagacactgtacaacagaagaacccggcaggatgagcctgccctgttcgtggccctgaccttcgagcggcgggaggtcctggactcctccaatatcaaaccaatgaacctgatcggcgtggcaagaggcgaaaacatccccgccgtgatcgccctgaccgaccccgagggctgcccactgagccggtttaaggatagcctgggaaacccaacccacatcctgagaatcggcgagagctataaggagaagcagcggaccatccaggccaagaaggaggtggagcagcggagagccggcggctacagccggaagtacgccagcaaagccaagaatctggcagacgatatggtgagaaacaccgctagagatctgctgtactacgccgtgacccaggatgccatgctgatcttcgccaacctgagccggggcttcggccggcagggcaagcggaccttcatggccgagagacagtacacacggatggaggactggctgaccgccaagctggcctacgagggcctgagcaagacctacctgtccaagacactggcccagtacacctccaagacatgcagcaactgtgggtttaccatcaccagcgccgactacgacagggtgctggagaagctgaagaagacagcaacaggctggatgaccacaattaacggcaaggagctgaaggtggagggccagattacctactacaacagatacaagagacagaacgtagtcaaggacctgtccgtcgagctggatagactgagcgaagaatctgtgaacaacgacatctcctcctggacaaagggcagaagcggagaagctctgagcctcctgaagaaaagattctcccatagacccgtgcaggagaagttcgtgtgcctgaactgcggcttcgagacacacgcagccgagcaagccgccctgaacatcgccagatcctggctgttcctgcggagccaggagtacaagaaataccagacaaacaagacaaccggcaacaccgataagagagccttcgtcgagacctggcagtccttttaccggaagaagcttaaggaggtgtggaaacctgccgtgcggtctggcggatctggcggaggctccacaagcgagcccggcgccgtgagcttcgccgacgtggccgtgtacttctgcagggaggagtggggctgcctgaggcccgcccagaggaccctgtacagggacgtgatgagggagacctacggccacctgagcgccctgggcatcggcggcaagaagcccgccctgatcagctgggtggaggaggaggccgagctgtggggccccgccgcccaggaccccgaggtggccaagtgccccacccagaccgacaccagccccaagaaaaagagaaaagtctaagctgccttctgcggggcttgccttctggccatgcccttcttctctcccttgcacctgtacctcttggtctttgaataaagcctgagtaggaaggctagcaaaaaaaaaaaaaaaaaaaaaaaaaaaaaaaaaaaaaaaaaaaaaaaaaaaaaaaaaaaaaaaaaaaaaaaaaaaaaaaa

SEQ ID NO: 7270 - RNA, 5797 nt, synthetic construct
  source 1..5797: mol_type = other RNA
aggaaataagagagaaaagaagagtaagaagaaatataagagccaccatggcccctaagaagaagcgtaaagtgagccggatggaacgcctcgtctacgaggtgcggcagaagtgcagaaacatcgaggacatctgcatctcctgcggatctctgaacgtgaccctggagcacccactgttcatcggcggcatgtgccagaactgtaaaaactgttttctggagtgtgcctatcaatacgacgatgacggctaccagagctactgcaccatctgttgcggcggaagagaggtgctgatgtgtggaaataacaactgctgccggtgcttctgcgtggaatgcgtggacctgctggtgggccccggcgccgcccaggccgctattaaggaagatccttggaactgctacatgtgcggccacaagggcacatacggcctgctgagacggagagaggactggcctagcagactgcagatgttcttcgccaataaccacgaccaggagttcgacccccctaaggtgtaccctcccgtccccgccgagaagagaaagcccatccgggtcctgagcctgttcgatggcatcgccaccggtctgctggtgctgaaggacctgggcatccaggtggataggtacattgcctccgaggtgtgcgaggactccatcaccgtgggaatggtgcgtcatcagggcaagatcatgtacgtgggcgacgtgcggagcgtgacacagaagcatatccaggagtggggccctttcgacctggtgatcggcggcagcccttgcaatgacctgagcatcgtgaacccagcccggaagggcctgtacgagggaaccggcagactgttcttcgagttttacagactgctgcacgacgcccggcctaaggaaggcgacgaccggcccttcttttggctgttcgagaatgtggtggccatgggagtcagcgacaagcgggatattagccggttcctggagagcaaccccgtgatgatcgatgccaaggaagtgagcgccgcccaccgggccagatacttctggggcaatctgcctggcatgaacagacccctggccagcaccgtgaacgacaagctggagctgcaggagtgcctggagcacggccggatcgccaagttcagcaaggtgagaaccatcaccacccgaagcaacagcatcaaacaaggcaaggaccagcactttcctgtgttcatgaacgagaaggaggacatcctgtggtgtaccgagatggagagagtgttcgggttcccagtccactacacagatgtcagcaacatgtctagactggccagacagagactgctgggaagaagctggtccgtccctgtgatcagacacctgttcgcccctctgaaggagtacttcgcctgcgtgagcagcggcaacagcaacgccaacagccggggccccagcttctctagcggcctggtgccactgtccctgagagggagccacatgggccccatggagatctacaaaaccgtgagcgcctggaagcggcagcctgtgcgcgtgctgagcctgtttcggaatatcgataaagtcctgaaaagcctgggattcctggagagcggctctggctccggcggtggcaccctgaagtacgtggaggatgtgacaaacgtggtcagacgggatgtggagaagtggggccccttcgatctggtgtacggcagcacccaacccctgggcagctcttgtgaccggtgccctggctggtacatgtttcagttccaccggatcctgcagtacgccctgccgagacaggagtcccagcggccattcttttggattttcatggacaacttgctgctgaccgaggatgaccaggaaactaccactcggttcctgcagaccgaagccgtgaccctgcaggacgtgagaggccgggactaccagaacgccatgcgggtgtggtccaacatccctggactgaaaagcaagcacgcacctctgacccctaaagaagaggagtacctgcaggcccaggtgcggagcagaagcaagctggacgcccctaaggtggatctgctggtgaagaattgcctcctgcccctgagagagtacttcaagtatttcagccagaatagtctgcccctgggcggcccaagcagcggcgcccctcctcccagcggcggcagcccagccggctccccaacctctaccgaggagggcacctctgagtccgccacccccgagagcggccctggcacctccaccgagcccagcgagggcagcgcacccggcagccctgccggcagccccacctccacagaggagggaaccagcaccgagcccagcgaaggcagcgccccaggcaccagcaccgagcctagtgagggcggctctggcggcggcagcgcccaggagattaaacggatcaacaagatcagaagaagacttgtgaaagacagcaacaccaagaaggccggcaagacaggccccatgaaaaccctgctggttagagtgatgacacccgatctgagagagcggctggaaaacctgagaaagaagcctgaaaatatcccccagcccatcagcaatacatctagagccaacctgaataagctgctgaccgattacaccgaaatgaagaaggcgatcctgcatgtgtactgggaagagttccagaaggaccctgtgggcctgatgagccgggtggcccagcctgccagcaagaagatcgatcagaacaagctgaaacctgagatggacgagaagggcaacctgaccaccgccggctttgcctgctctcagtgtggccagcccctgttcgtgtacaagctggagcaggtgtctgagaagggcaaggcttacaccaactacttcggacggtgcaatgtggccgagcacgaaaagctgatcctgctggcccagctgaagcccgagaaggatagcgacgaagccgtgacatatagcctgggaaagtttgggcagagggccctggatttctacagcattcatgtgaccaaggagtccacccaccccgtgaagcccctggcccagatcgccggaaacagatacgcctccggacctgtgggaaaggccctgagcgacgcatgtatgggcacaatcgcctccttcctgtctaagtaccaggacatcatcatcgaacaccagaaggtggtgaagggcaaccagaagagactggagagcctgcgggagctggccggcaaggaaaacctggaataccctagcgtgaccctgccacctcagcctcacaccaaggagggcgttgatgcctacaacgaagtgatcgcccgggtgcgaatgtgggtgaacctgaacctgtggcagaagctgaagctaagcagagatgatgccaagcctctgctgagactgaagggattcccttcctttcctctggtcgagagacaggccaacgaagtggactggtgggacatggtgtgtaacgtgaagaagctgatcaacgagaaaaaggaggatggcaaggtgttttggcagaatctggctggctacaagagacaggaagccctgagaccatacctgagcagcgaggaagatcggaagaagggaaagaaattcgctcggtaccagctgggcgacctgctgctgcacctggaaaagaagcacggcgaggactggggaaaggtgtacgacgaggcctgggagcggattgacaagaaagtggaaggcctgagcaagcacatcaagctggaagaggaacggagaagcgaggacgcccagagcaaggccgccctgaccgactggctgcgggctaaggccagcttcgtgatcgagggcctgaaggaggccgacaaggacgagttctgcagatgcgagctgaagctgcagaagtggtacggggacctgcggggaaagcccttcgccatcgaagccgagaacagcatcctggacatcagcggcttcagcaagcagtacaactgtgccttcatctggcagaaggacggcgtgaagaagctgaacctgtacctgatcatcaactacttcaagggcggcaagctgcggttcaagaagatcaaacctgaagccttcgaagccaacagattctacaccgtgatcaacaaaaagagcggcgagatcgtgcccatggaggtgaacttcaacttcgacgaccccaacctgatcatcctgcctctggcctttggcaagagacagggcagagaattcatctggaacgacctgctgtccctggaaaccggcagcctgaagctggccaacggaagagtgatcgagaagacactgtacaacagaagaacccggcaggatgagcctgccctgttcgtggccctgaccttcgagcggcgggaggtcctggactcctccaatatcaaaccaatgaacctgatcggcgtggcaagaggcgaaaacatccccgccgtgatcgccctgaccgaccccgagggctgcccactgagccggtttaaggatagcctgggaaacccaacccacatcctgagaatcggcgagagctataaggagaagcagcggaccatccaggccaagaaggaggtggagcagcggagagccggcggctacagccggaagtacgccagcaaagccaagaatctggcagacgatatggtgagaaacaccgctagagatctgctgtactacgccgtgacccaggatgccatgctgatcttcgccaacctgagccggggcttcggccggcagggcaagcggaccttcatggccgagagacagtacacacggatggaggactggctgaccgccaagctggcctacgagggcctgagcaagacctacctgtccaagacactggcccagtacacctccaagacatgcagcaactgtgggtttaccatcaccagcgccgactacgacagggtgctggagaagctgaagaagacagcaacaggctggatgaccacaattaacggcaaggagctgaaggtggagggccagattacctactacaacagatacaagagacagaacgtagtcaaggacctgtccgtcgagctggatagactgagcgaagaatctgtgaacaacgacatctcctcctggacaaagggcagaagcggagaagctctgagcctcctgaagaaaagattctcccatagacccgtgcaggagaagttcgtgtgcctgaactgcggcttcgagacacacgcagccgagcaagccgccctgaacatcgccagatcctggctgttcctgcggagccaggagtacaagaaataccagacaaacaagacaaccggcaacaccgataagagagccttcgtcgagacctggcagtccttttaccggaagaagcttaaggaggtgtggaaacctgccgtgcggtctggcggatctggcggaggctccacaagcgcccagatgctggtgaccttcgaggaggtggccgtgtacttcacccagggccagggcgccctgctgggccccgcccagagggccctgtacagggacgtgatgcaggagaactacgagatggtgaccagcctgggcttcagcctgcccaagcccgagctgatcagcaggctggagaggggcgaggagccctgggtgcccgacctgcaggcctgcgagaagagggagagcctgaggggcgccaggaccagccccaagaaaaagagaaaagtctaagctgccttctgcggggcttgccttctggccatgcccttcttctctcccttgcacctgtacctcttggtctttgaataaagcctgagtaggaaggctagcaaaaaaaaaaaaaaaaaaaaaaaaaaaaaaaaaaaaaaaaaaaaaaaaaaaaaaaaaaaaaaaaaaaaaaaaaaaaaaaa

SEQ ID NO: 7271 - RNA, 5797 nt, synthetic construct
  source 1..5797: mol_type = other RNA
aggaaataagagagaaaagaagagtaagaagaaatataagagccaccatggcccctaagaagaagcgtaaagtgagccggatggaacgcctcgtctacgaggtgcggcagaagtgcagaaacatcgaggacatctgcatctcctgcggatctctgaacgtgaccctggagcacccactgttcatcggcggcatgtgccagaactgtaaaaactgttttctggagtgtgcctatcaatacgacgatgacggctaccagagctactgcaccatctgttgcggcggaagagaggtgctgatgtgtggaaataacaactgctgccggtgcttctgcgtggaatgcgtggacctgctggtgggccccggcgccgcccaggccgctattaaggaagatccttggaactgctacatgtgcggccacaagggcacatacggcctgctgagacggagagaggactggcctagcagactgcagatgttcttcgccaataaccacgaccaggagttcgacccccctaaggtgtaccctcccgtccccgccgagaagagaaagcccatccgggtcctgagcctgttcgatggcatcgccaccggtctgctggtgctgaaggacctgggcatccaggtggataggtacattgcctccgaggtgtgcgaggactccatcaccgtgggaatggtgcgtcatcagggcaagatcatgtacgtgggcgacgtgcggagcgtgacacagaagcatatccaggagtggggccctttcgacctggtgatcggcggcagcccttgcaatgacctgagcatcgtgaacccagcccggaagggcctgtacgagggaaccggcagactgttcttcgagttttacagactgctgcacgacgcccggcctaaggaaggcgacgaccggcccttcttttggctgttcgagaatgtggtggccatgggagtcagcgacaagcgggatattagccggttcctggagagcaaccccgtgatgatcgatgccaaggaagtgagcgccgcccaccgggccagatacttctggggcaatctgcctggcatgaacagacccctggccagcaccgtgaacgacaagctggagctgcaggagtgcctggagcacggccggatcgccaagttcagcaaggtgagaaccatcaccacccgaagcaacagcatcaaacaaggcaaggaccagcactttcctgtgttcatgaacgagaaggaggacatcctgtggtgtaccgagatggagagagtgttcgggttcccagtccactacacagatgtcagcaacatgtctagactggccagacagagactgctgggaagaagctggtccgtccctgtgatcagacacctgttcgcccctctgaaggagtacttcgcctgcgtgagcagcggcaacagcaacgccaacagccggggccccagcttctctagcggcctggtgccactgtccctgagagggagccacatgggccccatggagatctacaaaaccgtgagcgcctggaagcggcagcctgtgcgcgtgctgagcctgtttcggaatatcgataaagtcctgaaaagcctgggattcctggagagcggctctggctccggcggtggcaccctgaagtacgtggaggatgtgacaaacgtggtcagacgggatgtggagaagtggggccccttcgatctggtgtacggcagcacccaacccctgggcagctcttgtgaccggtgccctggctggtacatgtttcagttccaccggatcctgcagtacgccctgccgagacaggagtcccagcggccattcttttggattttcatggacaacttgctgctgaccgaggatgaccaggaaactaccactcggttcctgcagaccgaagccgtgaccctgcaggacgtgagaggccgggactaccagaacgccatgcgggtgtggtccaacatccctggactgaaaagcaagcacgcacctctgacccctaaagaagaggagtacctgcaggcccaggtgcggagcagaagcaagctggacgcccctaaggtggatctgctggtgaagaattgcctcctgcccctgagagagtacttcaagtatttcagccagaatagtctgcccctgggcggcccaagcagcggcgcccctcctcccagcggcggcagcccagccggctccccaacctctaccgaggagggcacctctgagtccgccacccccgagagcggccctggcacctccaccgagcccagcgagggcagcgcacccggcagccctgccggcagccccacctccacagaggagggaaccagcaccgagcccagcgaaggcagcgccccaggcaccagcaccgagcctagtgagggcggctctggcggcggcagcgcccaggagattaaacggatcaacaagatcagaagaagacttgtgaaagacagcaacaccaagaaggccggcaagacaggccccatgaaaaccctgctggttagagtgatgacacccgatctgagagagcggctggaaaacctgagaaagaagcctgaaaatatcccccagcccatcagcaatacatctagagccaacctgaataagctgctgaccgattacaccgaaatgaagaaggcgatcctgcatgtgtactgggaagagttccagaaggaccctgtgggcctgatgagccgggtggcccagcctgccagcaagaagatcgatcagaacaagctgaaacctgagatggacgagaagggcaacctgaccaccgccggctttgcctgctctcagtgtggccagcccctgttcgtgtacaagctggagcaggtgtctgagaagggcaaggcttacaccaactacttcggacggtgcaatgtggccgagcacgaaaagctgatcctgctggcccagctgaagcccgagaaggatagcgacgaagccgtgacatatagcctgggaaagtttgggcagagggccctggatttctacagcattcatgtgaccaaggagtccacccaccccgtgaagcccctggcccagatcgccggaaacagatacgcctccggacctgtgggaaaggccctgagcgacgcatgtatgggcacaatcgcctccttcctgtctaagtaccaggacatcatcatcgaacaccagaaggtggtgaagggcaaccagaagagactggagagcctgcgggagctggccggcaaggaaaacctggaataccctagcgtgaccctgccacctcagcctcacaccaaggagggcgttgatgcctacaacgaagtgatcgcccgggtgcgaatgtgggtgaacctgaacctgtggcagaagctgaagctaagcagagatgatgccaagcctctgctgagactgaagggattcccttcctttcctctggtcgagagacaggccaacgaagtggactggtgggacatggtgtgtaacgtgaagaagctgatcaacgagaaaaaggaggatggcaaggtgttttggcagaatctggctggctacaagagacaggaagccctgagaccatacctgagcagcgaggaagatcggaagaagggaaagaaattcgctcggtaccagctgggcgacctgctgctgcacctggaaaagaagcacggcgaggactggggaaaggtgtacgacgaggcctgggagcggattgacaagaaagtggaaggcctgagcaagcacatcaagctggaagaggaacggagaagcgaggacgcccagagcaaggccgccctgaccgactggctgcgggctaaggccagcttcgtgatcgagggcctgaaggaggccgacaaggacgagttctgcagatgcgagctgaagctgcagaagtggtacggggacctgcggggaaagcccttcgccatcgaagccgagaacagcatcctggacatcagcggcttcagcaagcagtacaactgtgccttcatctggcagaaggacggcgtgaagaagctgaacctgtacctgatcatcaactacttcaagggcggcaagctgcggttcaagaagatcaaacctgaagccttcgaagccaacagattctacaccgtgatcaacaaaaagagcggcgagatcgtgcccatggaggtgaacttcaacttcgacgaccccaacctgatcatcctgcctctggcctttggcaagagacagggcagagaattcatctggaacgacctgctgtccctggaaaccggcagcctgaagctggccaacggaagagtgatcgagaagacactgtacaacagaagaacccggcaggatgagcctgccctgttcgtggccctgaccttcgagcggcgggaggtcctggactcctccaatatcaaaccaatgaacctgatcggcgtggcaagaggcgaaaacatccccgccgtgatcgccctgaccgaccccgagggctgcccactgagccggtttaaggatagcctgggaaacccaacccacatcctgagaatcggcgagagctataaggagaagcagcggaccatccaggccaagaaggaggtggagcagcggagagccggcggctacagccggaagtacgccagcaaagccaagaatctggcagacgatatggtgagaaacaccgctagagatctgctgtactacgccgtgacccaggatgccatgctgatcttcgccaacctgagccggggcttcggccggcagggcaagcggaccttcatggccgagagacagtacacacggatggaggactggctgaccgccaagctggcctacgagggcctgagcaagacctacctgtccaagacactggcccagtacacctccaagacatgcagcaactgtgggtttaccatcaccagcgccgactacgacagggtgctggagaagctgaagaagacagcaacaggctggatgaccacaattaacggcaaggagctgaaggtggagggccagattacctactacaacagatacaagagacagaacgtagtcaaggacctgtccgtcgagctggatagactgagcgaagaatctgtgaacaacgacatctcctcctggacaaagggcagaagcggagaagctctgagcctcctgaagaaaagattctcccatagacccgtgcaggagaagttcgtgtgcctgaactgcggcttcgagacacacgcagccgagcaagccgccctgaacatcgccagatcctggctgttcctgcggagccaggagtacaagaaataccagacaaacaagacaaccggcaacaccgataagagagccttcgtcgagacctggcagtccttttaccggaagaagcttaaggaggtgtggaaacctgccgtgcggtctggcggatctggcggaggctccacaagcggcgccagggtgctggtgagcttcgccgacgtggccgtgtacttcagccccgaggagtggggcaggctgaggcccgagcagagggccctgtacagggacgtgatgagggagacctacggccacctgggcgccctgggcttccccggccccaagcccgccctgatcagctggatggaggaggccgcctgggacagcgaggccaagcccgtgatcaagaggctggaggacgtgggccagccccccaccagccccaagaaaaagagaaaagtctaagctgccttctgcggggcttgccttctggccatgcccttcttctctcccttgcacctgtacctcttggtctttgaataaagcctgagtaggaaggctagcaaaaaaaaaaaaaaaaaaaaaaaaaaaaaaaaaaaaaaaaaaaaaaaaaaaaaaaaaaaaaaaaaaaaaaaaaaaaaaaa

SEQ ID NO: 7272 - RNA, 5797 nt, synthetic construct
  source 1..5797: mol_type = other RNA
aggaaataagagagaaaagaagagtaagaagaaatataagagccaccatggcccctaagaagaagcgtaaagtgagccggatggaacgcctcgtctacgaggtgcggcagaagtgcagaaacatcgaggacatctgcatctcctgcggatctctgaacgtgaccctggagcacccactgttcatcggcggcatgtgccagaactgtaaaaactgttttctggagtgtgcctatcaatacgacgatgacggctaccagagctactgcaccatctgttgcggcggaagagaggtgctgatgtgtggaaataacaactgctgccggtgcttctgcgtggaatgcgtggacctgctggtgggccccggcgccgcccaggccgctattaaggaagatccttggaactgctacatgtgcggccacaagggcacatacggcctgctgagacggagagaggactggcctagcagactgcagatgttcttcgccaataaccacgaccaggagttcgacccccctaaggtgtaccctcccgtccccgccgagaagagaaagcccatccgggtcctgagcctgttcgatggcatcgccaccggtctgctggtgctgaaggacctgggcatccaggtggataggtacattgcctccgaggtgtgcgaggactccatcaccgtgggaatggtgcgtcatcagggcaagatcatgtacgtgggcgacgtgcggagcgtgacacagaagcatatccaggagtggggccctttcgacctggtgatcggcggcagcccttgcaatgacctgagcatcgtgaacccagcccggaagggcctgtacgagggaaccggcagactgttcttcgagttttacagactgctgcacgacgcccggcctaaggaaggcgacgaccggcccttcttttggctgttcgagaatgtggtggccatgggagtcagcgacaagcgggatattagccggttcctggagagcaaccccgtgatgatcgatgccaaggaagtgagcgccgcccaccgggccagatacttctggggcaatctgcctggcatgaacagacccctggccagcaccgtgaacgacaagctggagctgcaggagtgcctggagcacggccggatcgccaagttcagcaaggtgagaaccatcaccacccgaagcaacagcatcaaacaaggcaaggaccagcactttcctgtgttcatgaacgagaaggaggacatcctgtggtgtaccgagatggagagagtgttcgggttcccagtccactacacagatgtcagcaacatgtctagactggccagacagagactgctgggaagaagctggtccgtccctgtgatcagacacctgttcgcccctctgaaggagtacttcgcctgcgtgagcagcggcaacagcaacgccaacagccggggccccagcttctctagcggcctggtgccactgtccctgagagggagccacatgggccccatggagatctacaaaaccgtgagcgcctggaagcggcagcctgtgcgcgtgctgagcctgtttcggaatatcgataaagtcctgaaaagcctgggattcctggagagcggctctggctccggcggtggcaccctgaagtacgtggaggatgtgacaaacgtggtcagacgggatgtggagaagtggggccccttcgatctggtgtacggcagcacccaacccctgggcagctcttgtgaccggtgccctggctggtacatgtttcagttccaccggatcctgcagtacgccctgccgagacaggagtcccagcggccattcttttggattttcatggacaacttgctgctgaccgaggatgaccaggaaactaccactcggttcctgcagaccgaagccgtgaccctgcaggacgtgagaggccgggactaccagaacgccatgcgggtgtggtccaacatccctggactgaaaagcaagcacgcacctctgacccctaaagaagaggagtacctgcaggcccaggtgcggagcagaagcaagctggacgcccctaaggtggatctgctggtgaagaattgcctcctgcccctgagagagtacttcaagtatttcagccagaatagtctgcccctgggcggcccaagcagcggcgcccctcctcccagcggcggcagcccagccggctccccaacctctaccgaggagggcacctctgagtccgccacccccgagagcggccctggcacctccaccgagcccagcgagggcagcgcacccggcagccctgccggcagccccacctccacagaggagggaaccagcaccgagcccagcgaaggcagcgccccaggcaccagcaccgagcctagtgagggcggctctggcggcggcagcgcccaggagattaaacggatcaacaagatcagaagaagacttgtgaaagacagcaacaccaagaaggccggcaagacaggccccatgaaaaccctgctggttagagtgatgacacccgatctgagagagcggctggaaaacctgagaaagaagcctgaaaatatcccccagcccatcagcaatacatctagagccaacctgaataagctgctgaccgattacaccgaaatgaagaaggcgatcctgcatgtgtactgggaagagttccagaaggaccctgtgggcctgatgagccgggtggcccagcctgccagcaagaagatcgatcagaacaagctgaaacctgagatggacgagaagggcaacctgaccaccgccggctttgcctgctctcagtgtggccagcccctgttcgtgtacaagctggagcaggtgtctgagaagggcaaggcttacaccaactacttcggacggtgcaatgtggccgagcacgaaaagctgatcctgctggcccagctgaagcccgagaaggatagcgacgaagccgtgacatatagcctgggaaagtttgggcagagggccctggatttctacagcattcatgtgaccaaggagtccacccaccccgtgaagcccctggcccagatcgccggaaacagatacgcctccggacctgtgggaaaggccctgagcgacgcatgtatgggcacaatcgcctccttcctgtctaagtaccaggacatcatcatcgaacaccagaaggtggtgaagggcaaccagaagagactggagagcctgcgggagctggccggcaaggaaaacctggaataccctagcgtgaccctgccacctcagcctcacaccaaggagggcgttgatgcctacaacgaagtgatcgcccgggtgcgaatgtgggtgaacctgaacctgtggcagaagctgaagctaagcagagatgatgccaagcctctgctgagactgaagggattcccttcctttcctctggtcgagagacaggccaacgaagtggactggtgggacatggtgtgtaacgtgaagaagctgatcaacgagaaaaaggaggatggcaaggtgttttggcagaatctggctggctacaagagacaggaagccctgagaccatacctgagcagcgaggaagatcggaagaagggaaagaaattcgctcggtaccagctgggcgacctgctgctgcacctggaaaagaagcacggcgaggactggggaaaggtgtacgacgaggcctgggagcggattgacaagaaagtggaaggcctgagcaagcacatcaagctggaagaggaacggagaagcgaggacgcccagagcaaggccgccctgaccgactggctgcgggctaaggccagcttcgtgatcgagggcctgaaggaggccgacaaggacgagttctgcagatgcgagctgaagctgcagaagtggtacggggacctgcggggaaagcccttcgccatcgaagccgagaacagcatcctggacatcagcggcttcagcaagcagtacaactgtgccttcatctggcagaaggacggcgtgaagaagctgaacctgtacctgatcatcaactacttcaagggcggcaagctgcggttcaagaagatcaaacctgaagccttcgaagccaacagattctacaccgtgatcaacaaaaagagcggcgagatcgtgcccatggaggtgaacttcaacttcgacgaccccaacctgatcatcctgcctctggcctttggcaagagacagggcagagaattcatctggaacgacctgctgtccctggaaaccggcagcctgaagctggccaacggaagagtgatcgagaagacactgtacaacagaagaacccggcaggatgagcctgccctgttcgtggccctgaccttcgagcggcgggaggtcctggactcctccaatatcaaaccaatgaacctgatcggcgtggcaagaggcgaaaacatccccgccgtgatcgccctgaccgaccccgagggctgcccactgagccggtttaaggatagcctgggaaacccaacccacatcctgagaatcggcgagagctataaggagaagcagcggaccatccaggccaagaaggaggtggagcagcggagagccggcggctacagccggaagtacgccagcaaagccaagaatctggcagacgatatggtgagaaacaccgctagagatctgctgtactacgccgtgacccaggatgccatgctgatcttcgccaacctgagccggggcttcggccggcagggcaagcggaccttcatggccgagagacagtacacacggatggaggactggctgaccgccaagctggcctacgagggcctgagcaagacctacctgtccaagacactggcccagtacacctccaagacatgcagcaactgtgggtttaccatcaccagcgccgactacgacagggtgctggagaagctgaagaagacagcaacaggctggatgaccacaattaacggcaaggagctgaaggtggagggccagattacctactacaacagatacaagagacagaacgtagtcaaggacctgtccgtcgagctggatagactgagcgaagaatctgtgaacaacgacatctcctcctggacaaagggcagaagcggagaagctctgagcctcctgaagaaaagattctcccatagacccgtgcaggagaagttcgtgtgcctgaactgcggcttcgagacacacgcagccgagcaagccgccctgaacatcgccagatcctggctgttcctgcggagccaggagtacaagaaataccagacaaacaagacaaccggcaacaccgataagagagccttcgtcgagacctggcagtccttttaccggaagaagcttaaggaggtgtggaaacctgccgtgcggtctggcggatctggcggaggctccacaagcgcccagaaggtgctgaccttcagggacgtggccatcgagttcagcctggaggagtggaagttcctggaccccgcccagcagaacctgtacagggacgtgatgctggagaactacaggaacctgttcagcatcggcctgaccgtgagcaagcccggcctgatcacctgcctggagcagaggaaggccccctggaacctgaagaggagggaggccgtggacggccaccccgccatgagcagccacaccagccccaagaaaaagagaaaagtctaagctgccttctgcggggcttgccttctggccatgcccttcttctctcccttgcacctgtacctcttggtctttgaataaagcctgagtaggaaggctagcaaaaaaaaaaaaaaaaaaaaaaaaaaaaaaaaaaaaaaaaaaaaaaaaaaaaaaaaaaaaaaaaaaaaaaaaaaaaaaaa

SEQ ID NO: 7273 - RNA, 5797 nt, synthetic construct
  source 1..5797: mol_type = other RNA
aggaaataagagagaaaagaagagtaagaagaaatataagagccaccatggcccctaagaagaagcgtaaagtgagccggatggaacgcctcgtctacgaggtgcggcagaagtgcagaaacatcgaggacatctgcatctcctgcggatctctgaacgtgaccctggagcacccactgttcatcggcggcatgtgccagaactgtaaaaactgttttctggagtgtgcctatcaatacgacgatgacggctaccagagctactgcaccatctgttgcggcggaagagaggtgctgatgtgtggaaataacaactgctgccggtgcttctgcgtggaatgcgtggacctgctggtgggccccggcgccgcccaggccgctattaaggaagatccttggaactgctacatgtgcggccacaagggcacatacggcctgctgagacggagagaggactggcctagcagactgcagatgttcttcgccaataaccacgaccaggagttcgacccccctaaggtgtaccctcccgtccccgccgagaagagaaagcccatccgggtcctgagcctgttcgatggcatcgccaccggtctgctggtgctgaaggacctgggcatccaggtggataggtacattgcctccgaggtgtgcgaggactccatcaccgtgggaatggtgcgtcatcagggcaagatcatgtacgtgggcgacgtgcggagcgtgacacagaagcatatccaggagtggggccctttcgacctggtgatcggcggcagcccttgcaatgacctgagcatcgtgaacccagcccggaagggcctgtacgagggaaccggcagactgttcttcgagttttacagactgctgcacgacgcccggcctaaggaaggcgacgaccggcccttcttttggctgttcgagaatgtggtggccatgggagtcagcgacaagcgggatattagccggttcctggagagcaaccccgtgatgatcgatgccaaggaagtgagcgccgcccaccgggccagatacttctggggcaatctgcctggcatgaacagacccctggccagcaccgtgaacgacaagctggagctgcaggagtgcctggagcacggccggatcgccaagttcagcaaggtgagaaccatcaccacccgaagcaacagcatcaaacaaggcaaggaccagcactttcctgtgttcatgaacgagaaggaggacatcctgtggtgtaccgagatggagagagtgttcgggttcccagtccactacacagatgtcagcaacatgtctagactggccagacagagactgctgggaagaagctggtccgtccctgtgatcagacacctgttcgcccctctgaaggagtacttcgcctgcgtgagcagcggcaacagcaacgccaacagccggggccccagcttctctagcggcctggtgccactgtccctgagagggagccacatgggccccatggagatctacaaaaccgtgagcgcctggaagcggcagcctgtgcgcgtgctgagcctgtttcggaatatcgataaagtcctgaaaagcctgggattcctggagagcggctctggctccggcggtggcaccctgaagtacgtggaggatgtgacaaacgtggtcagacgggatgtggagaagtggggccccttcgatctggtgtacggcagcacccaacccctgggcagctcttgtgaccggtgccctggctggtacatgtttcagttccaccggatcctgcagtacgccctgccgagacaggagtcccagcggccattcttttggattttcatggacaacttgctgctgaccgaggatgaccaggaaactaccactcggttcctgcagaccgaagccgtgaccctgcaggacgtgagaggccgggactaccagaacgccatgcgggtgtggtccaacatccctggactgaaaagcaagcacgcacctctgacccctaaagaagaggagtacctgcaggcccaggtgcggagcagaagcaagctggacgcccctaaggtggatctgctggtgaagaattgcctcctgcccctgagagagtacttcaagtatttcagccagaatagtctgcccctgggcggcccaagcagcggcgcccctcctcccagcggcggcagcccagccggctccccaacctctaccgaggagggcacctctgagtccgccacccccgagagcggccctggcacctccaccgagcccagcgagggcagcgcacccggcagccctgccggcagccccacctccacagaggagggaaccagcaccgagcccagcgaaggcagcgccccaggcaccagcaccgagcctagtgagggcggctctggcggcggcagcgcccaggagattaaacggatcaacaagatcagaagaagacttgtgaaagacagcaacaccaagaaggccggcaagacaggccccatgaaaaccctgctggttagagtgatgacacccgatctgagagagcggctggaaaacctgagaaagaagcctgaaaatatcccccagcccatcagcaatacatctagagccaacctgaataagctgctgaccgattacaccgaaatgaagaaggcgatcctgcatgtgtactgggaagagttccagaaggaccctgtgggcctgatgagccgggtggcccagcctgccagcaagaagatcgatcagaacaagctgaaacctgagatggacgagaagggcaacctgaccaccgccggctttgcctgctctcagtgtggccagcccctgttcgtgtacaagctggagcaggtgtctgagaagggcaaggcttacaccaactacttcggacggtgcaatgtggccgagcacgaaaagctgatcctgctggcccagctgaagcccgagaaggatagcgacgaagccgtgacatatagcctgggaaagtttgggcagagggccctggatttctacagcattcatgtgaccaaggagtccacccaccccgtgaagcccctggcccagatcgccggaaacagatacgcctccggacctgtgggaaaggccctgagcgacgcatgtatgggcacaatcgcctccttcctgtctaagtaccaggacatcatcatcgaacaccagaaggtggtgaagggcaaccagaagagactggagagcctgcgggagctggccggcaaggaaaacctggaataccctagcgtgaccctgccacctcagcctcacaccaaggagggcgttgatgcctacaacgaagtgatcgcccgggtgcgaatgtgggtgaacctgaacctgtggcagaagctgaagctaagcagagatgatgccaagcctctgctgagactgaagggattcccttcctttcctctggtcgagagacaggccaacgaagtggactggtgggacatggtgtgtaacgtgaagaagctgatcaacgagaaaaaggaggatggcaaggtgttttggcagaatctggctggctacaagagacaggaagccctgagaccatacctgagcagcgaggaagatcggaagaagggaaagaaattcgctcggtaccagctgggcgacctgctgctgcacctggaaaagaagcacggcgaggactggggaaaggtgtacgacgaggcctgggagcggattgacaagaaagtggaaggcctgagcaagcacatcaagctggaagaggaacggagaagcgaggacgcccagagcaaggccgccctgaccgactggctgcgggctaaggccagcttcgtgatcgagggcctgaaggaggccgacaaggacgagttctgcagatgcgagctgaagctgcagaagtggtacggggacctgcggggaaagcccttcgccatcgaagccgagaacagcatcctggacatcagcggcttcagcaagcagtacaactgtgccttcatctggcagaaggacggcgtgaagaagctgaacctgtacctgatcatcaactacttcaagggcggcaagctgcggttcaagaagatcaaacctgaagccttcgaagccaacagattctacaccgtgatcaacaaaaagagcggcgagatcgtgcccatggaggtgaacttcaacttcgacgaccccaacctgatcatcctgcctctggcctttggcaagagacagggcagagaattcatctggaacgacctgctgtccctggaaaccggcagcctgaagctggccaacggaagagtgatcgagaagacactgtacaacagaagaacccggcaggatgagcctgccctgttcgtggccctgaccttcgagcggcgggaggtcctggactcctccaatatcaaaccaatgaacctgatcggcgtggcaagaggcgaaaacatccccgccgtgatcgccctgaccgaccccgagggctgcccactgagccggtttaaggatagcctgggaaacccaacccacatcctgagaatcggcgagagctataaggagaagcagcggaccatccaggccaagaaggaggtggagcagcggagagccggcggctacagccggaagtacgccagcaaagccaagaatctggcagacgatatggtgagaaacaccgctagagatctgctgtactacgccgtgacccaggatgccatgctgatcttcgccaacctgagccggggcttcggccggcagggcaagcggaccttcatggccgagagacagtacacacggatggaggactggctgaccgccaagctggcctacgagggcctgagcaagacctacctgtccaagacactggcccagtacacctccaagacatgcagcaactgtgggtttaccatcaccagcgccgactacgacagggtgctggagaagctgaagaagacagcaacaggctggatgaccacaattaacggcaaggagctgaaggtggagggccagattacctactacaacagatacaagagacagaacgtagtcaaggacctgtccgtcgagctggatagactgagcgaagaatctgtgaacaacgacatctcctcctggacaaagggcagaagcggagaagctctgagcctcctgaagaaaagattctcccatagacccgtgcaggagaagttcgtgtgcctgaactgcggcttcgagacacacgcagccgagcaagccgccctgaacatcgccagatcctggctgttcctgcggagccaggagtacaagaaataccagacaaacaagacaaccggcaacaccgataagagagccttcgtcgagacctggcagtccttttaccggaagaagcttaaggaggtgtggaaacctgccgtgcggtctggcggatctggcggaggctccacaagcccccaggacctgatgaccttcgaggacgtggccgtggagttcacccagtgggagtggggccagctggaccccgcccagaaggacctgtacagggtggtgatgctggagaacttcaagaacctggccagcctgggcttccccgtggccaagccctacgtgatcagccagctggagaagggcaaggagccctgcgtgctggagggcgagatcagcaccgactgggagaagaggcccaaggccaagaccagccccaagaaaaagagaaaagtctaagctgccttctgcggggcttgccttctggccatgcccttcttctctcccttgcacctgtacctcttggtctttgaataaagcctgagtaggaaggctagcaaaaaaaaaaaaaaaaaaaaaaaaaaaaaaaaaaaaaaaaaaaaaaaaaaaaaaaaaaaaaaaaaaaaaaaaaaaaaaaa

SEQ ID NO: 7274 - RNA, 5797 nt, synthetic construct
  source 1..5797: mol_type = other RNA
aggaaataagagagaaaagaagagtaagaagaaatataagagccaccatggcccctaagaagaagcgtaaagtgagccggatggaacgcctcgtctacgaggtgcggcagaagtgcagaaacatcgaggacatctgcatctcctgcggatctctgaacgtgaccctggagcacccactgttcatcggcggcatgtgccagaactgtaaaaactgttttctggagtgtgcctatcaatacgacgatgacggctaccagagctactgcaccatctgttgcggcggaagagaggtgctgatgtgtggaaataacaactgctgccggtgcttctgcgtggaatgcgtggacctgctggtgggccccggcgccgcccaggccgctattaaggaagatccttggaactgctacatgtgcggccacaagggcacatacggcctgctgagacggagagaggactggcctagcagactgcagatgttcttcgccaataaccacgaccaggagttcgacccccctaaggtgtaccctcccgtccccgccgagaagagaaagcccatccgggtcctgagcctgttcgatggcatcgccaccggtctgctggtgctgaaggacctgggcatccaggtggataggtacattgcctccgaggtgtgcgaggactccatcaccgtgggaatggtgcgtcatcagggcaagatcatgtacgtgggcgacgtgcggagcgtgacacagaagcatatccaggagtggggccctttcgacctggtgatcggcggcagcccttgcaatgacctgagcatcgtgaacccagcccggaagggcctgtacgagggaaccggcagactgttcttcgagttttacagactgctgcacgacgcccggcctaaggaaggcgacgaccggcccttcttttggctgttcgagaatgtggtggccatgggagtcagcgacaagcgggatattagccggttcctggagagcaaccccgtgatgatcgatgccaaggaagtgagcgccgcccaccgggccagatacttctggggcaatctgcctggcatgaacagacccctggccagcaccgtgaacgacaagctggagctgcaggagtgcctggagcacggccggatcgccaagttcagcaaggtgagaaccatcaccacccgaagcaacagcatcaaacaaggcaaggaccagcactttcctgtgttcatgaacgagaaggaggacatcctgtggtgtaccgagatggagagagtgttcgggttcccagtccactacacagatgtcagcaacatgtctagactggccagacagagactgctgggaagaagctggtccgtccctgtgatcagacacctgttcgcccctctgaaggagtacttcgcctgcgtgagcagcggcaacagcaacgccaacagccggggccccagcttctctagcggcctggtgccactgtccctgagagggagccacatgggccccatggagatctacaaaaccgtgagcgcctggaagcggcagcctgtgcgcgtgctgagcctgtttcggaatatcgataaagtcctgaaaagcctgggattcctggagagcggctctggctccggcggtggcaccctgaagtacgtggaggatgtgacaaacgtggtcagacgggatgtggagaagtggggccccttcgatctggtgtacggcagcacccaacccctgggcagctcttgtgaccggtgccctggctggtacatgtttcagttccaccggatcctgcagtacgccctgccgagacaggagtcccagcggccattcttttggattttcatggacaacttgctgctgaccgaggatgaccaggaaactaccactcggttcctgcagaccgaagccgtgaccctgcaggacgtgagaggccgggactaccagaacgccatgcgggtgtggtccaacatccctggactgaaaagcaagcacgcacctctgacccctaaagaagaggagtacctgcaggcccaggtgcggagcagaagcaagctggacgcccctaaggtggatctgctggtgaagaattgcctcctgcccctgagagagtacttcaagtatttcagccagaatagtctgcccctgggcggcccaagcagcggcgcccctcctcccagcggcggcagcccagccggctccccaacctctaccgaggagggcacctctgagtccgccacccccgagagcggccctggcacctccaccgagcccagcgagggcagcgcacccggcagccctgccggcagccccacctccacagaggagggaaccagcaccgagcccagcgaaggcagcgccccaggcaccagcaccgagcctagtgagggcggctctggcggcggcagcgcccaggagattaaacggatcaacaagatcagaagaagacttgtgaaagacagcaacaccaagaaggccggcaagacaggccccatgaaaaccctgctggttagagtgatgacacccgatctgagagagcggctggaaaacctgagaaagaagcctgaaaatatcccccagcccatcagcaatacatctagagccaacctgaataagctgctgaccgattacaccgaaatgaagaaggcgatcctgcatgtgtactgggaagagttccagaaggaccctgtgggcctgatgagccgggtggcccagcctgccagcaagaagatcgatcagaacaagctgaaacctgagatggacgagaagggcaacctgaccaccgccggctttgcctgctctcagtgtggccagcccctgttcgtgtacaagctggagcaggtgtctgagaagggcaaggcttacaccaactacttcggacggtgcaatgtggccgagcacgaaaagctgatcctgctggcccagctgaagcccgagaaggatagcgacgaagccgtgacatatagcctgggaaagtttgggcagagggccctggatttctacagcattcatgtgaccaaggagtccacccaccccgtgaagcccctggcccagatcgccggaaacagatacgcctccggacctgtgggaaaggccctgagcgacgcatgtatgggcacaatcgcctccttcctgtctaagtaccaggacatcatcatcgaacaccagaaggtggtgaagggcaaccagaagagactggagagcctgcgggagctggccggcaaggaaaacctggaataccctagcgtgaccctgccacctcagcctcacaccaaggagggcgttgatgcctacaacgaagtgatcgcccgggtgcgaatgtgggtgaacctgaacctgtggcagaagctgaagctaagcagagatgatgccaagcctctgctgagactgaagggattcccttcctttcctctggtcgagagacaggccaacgaagtggactggtgggacatggtgtgtaacgtgaagaagctgatcaacgagaaaaaggaggatggcaaggtgttttggcagaatctggctggctacaagagacaggaagccctgagaccatacctgagcagcgaggaagatcggaagaagggaaagaaattcgctcggtaccagctgggcgacctgctgctgcacctggaaaagaagcacggcgaggactggggaaaggtgtacgacgaggcctgggagcggattgacaagaaagtggaaggcctgagcaagcacatcaagctggaagaggaacggagaagcgaggacgcccagagcaaggccgccctgaccgactggctgcgggctaaggccagcttcgtgatcgagggcctgaaggaggccgacaaggacgagttctgcagatgcgagctgaagctgcagaagtggtacggggacctgcggggaaagcccttcgccatcgaagccgagaacagcatcctggacatcagcggcttcagcaagcagtacaactgtgccttcatctggcagaaggacggcgtgaagaagctgaacctgtacctgatcatcaactacttcaagggcggcaagctgcggttcaagaagatcaaacctgaagccttcgaagccaacagattctacaccgtgatcaacaaaaagagcggcgagatcgtgcccatggaggtgaacttcaacttcgacgaccccaacctgatcatcctgcctctggcctttggcaagagacagggcagagaattcatctggaacgacctgctgtccctggaaaccggcagcctgaagctggccaacggaagagtgatcgagaagacactgtacaacagaagaacccggcaggatgagcctgccctgttcgtggccctgaccttcgagcggcgggaggtcctggactcctccaatatcaaaccaatgaacctgatcggcgtggcaagaggcgaaaacatccccgccgtgatcgccctgaccgaccccgagggctgcccactgagccggtttaaggatagcctgggaaacccaacccacatcctgagaatcggcgagagctataaggagaagcagcggaccatccaggccaagaaggaggtggagcagcggagagccggcggctacagccggaagtacgccagcaaagccaagaatctggcagacgatatggtgagaaacaccgctagagatctgctgtactacgccgtgacccaggatgccatgctgatcttcgccaacctgagccggggcttcggccggcagggcaagcggaccttcatggccgagagacagtacacacggatggaggactggctgaccgccaagctggcctacgagggcctgagcaagacctacctgtccaagacactggcccagtacacctccaagacatgcagcaactgtgggtttaccatcaccagcgccgactacgacagggtgctggagaagctgaagaagacagcaacaggctggatgaccacaattaacggcaaggagctgaaggtggagggccagattacctactacaacagatacaagagacagaacgtagtcaaggacctgtccgtcgagctggatagactgagcgaagaatctgtgaacaacgacatctcctcctggacaaagggcagaagcggagaagctctgagcctcctgaagaaaagattctcccatagacccgtgcaggagaagttcgtgtgcctgaactgcggcttcgagacacacgcagccgagcaagccgccctgaacatcgccagatcctggctgttcctgcggagccaggagtacaagaaataccagacaaacaagacaaccggcaacaccgataagagagccttcgtcgagacctggcagtccttttaccggaagaagcttaaggaggtgtggaaacctgccgtgcggtctggcggatctggcggaggctccacaagcagcctggagagcgacctgttcagggacgtggccatcgtgttcagccaggaggagtgggagcagctggcccccgcccagagggacctgtacagggacgtgatgctggagacctacagcaacctggtgagcctgggcctggccatcgccaagcccgacgtgatcagcttcctggagcagggcaaggagccctgggtggtggagaagatgagcaggggcggcctgtgccccgtgctggagagcaggaccagccccaagaaaaagagaaaagtctaagctgccttctgcggggcttgccttctggccatgcccttcttctctcccttgcacctgtacctcttggtctttgaataaagcctgagtaggaaggctagcaaaaaaaaaaaaaaaaaaaaaaaaaaaaaaaaaaaaaaaaaaaaaaaaaaaaaaaaaaaaaaaaaaaaaaaaaaaaaaaa

SEQ ID NO: 7275 - RNA, 5797 nt, synthetic construct
  source 1..5797: mol_type = other RNA
aggaaataagagagaaaagaagagtaagaagaaatataagagccaccatggcccctaagaagaagcgtaaagtgagccggatggaacgcctcgtctacgaggtgcggcagaagtgcagaaacatcgaggacatctgcatctcctgcggatctctgaacgtgaccctggagcacccactgttcatcggcggcatgtgccagaactgtaaaaactgttttctggagtgtgcctatcaatacgacgatgacggctaccagagctactgcaccatctgttgcggcggaagagaggtgctgatgtgtggaaataacaactgctgccggtgcttctgcgtggaatgcgtggacctgctggtgggccccggcgccgcccaggccgctattaaggaagatccttggaactgctacatgtgcggccacaagggcacatacggcctgctgagacggagagaggactggcctagcagactgcagatgttcttcgccaataaccacgaccaggagttcgacccccctaaggtgtaccctcccgtccccgccgagaagagaaagcccatccgggtcctgagcctgttcgatggcatcgccaccggtctgctggtgctgaaggacctgggcatccaggtggataggtacattgcctccgaggtgtgcgaggactccatcaccgtgggaatggtgcgtcatcagggcaagatcatgtacgtgggcgacgtgcggagcgtgacacagaagcatatccaggagtggggccctttcgacctggtgatcggcggcagcccttgcaatgacctgagcatcgtgaacccagcccggaagggcctgtacgagggaaccggcagactgttcttcgagttttacagactgctgcacgacgcccggcctaaggaaggcgacgaccggcccttcttttggctgttcgagaatgtggtggccatgggagtcagcgacaagcgggatattagccggttcctggagagcaaccccgtgatgatcgatgccaaggaagtgagcgccgcccaccgggccagatacttctggggcaatctgcctggcatgaacagacccctggccagcaccgtgaacgacaagctggagctgcaggagtgcctggagcacggccggatcgccaagttcagcaaggtgagaaccatcaccacccgaagcaacagcatcaaacaaggcaaggaccagcactttcctgtgttcatgaacgagaaggaggacatcctgtggtgtaccgagatggagagagtgttcgggttcccagtccactacacagatgtcagcaacatgtctagactggccagacagagactgctgggaagaagctggtccgtccctgtgatcagacacctgttcgcccctctgaaggagtacttcgcctgcgtgagcagcggcaacagcaacgccaacagccggggccccagcttctctagcggcctggtgccactgtccctgagagggagccacatgggccccatggagatctacaaaaccgtgagcgcctggaagcggcagcctgtgcgcgtgctgagcctgtttcggaatatcgataaagtcctgaaaagcctgggattcctggagagcggctctggctccggcggtggcaccctgaagtacgtggaggatgtgacaaacgtggtcagacgggatgtggagaagtggggccccttcgatctggtgtacggcagcacccaacccctgggcagctcttgtgaccggtgccctggctggtacatgtttcagttccaccggatcctgcagtacgccctgccgagacaggagtcccagcggccattcttttggattttcatggacaacttgctgctgaccgaggatgaccaggaaactaccactcggttcctgcagaccgaagccgtgaccctgcaggacgtgagaggccgggactaccagaacgccatgcgggtgtggtccaacatccctggactgaaaagcaagcacgcacctctgacccctaaagaagaggagtacctgcaggcccaggtgcggagcagaagcaagctggacgcccctaaggtggatctgctggtgaagaattgcctcctgcccctgagagagtacttcaagtatttcagccagaatagtctgcccctgggcggcccaagcagcggcgcccctcctcccagcggcggcagcccagccggctccccaacctctaccgaggagggcacctctgagtccgccacccccgagagcggccctggcacctccaccgagcccagcgagggcagcgcacccggcagccctgccggcagccccacctccacagaggagggaaccagcaccgagcccagcgaaggcagcgccccaggcaccagcaccgagcctagtgagggcggctctggcggcggcagcgcccaggagattaaacggatcaacaagatcagaagaagacttgtgaaagacagcaacaccaagaaggccggcaagacaggccccatgaaaaccctgctggttagagtgatgacacccgatctgagagagcggctggaaaacctgagaaagaagcctgaaaatatcccccagcccatcagcaatacatctagagccaacctgaataagctgctgaccgattacaccgaaatgaagaaggcgatcctgcatgtgtactgggaagagttccagaaggaccctgtgggcctgatgagccgggtggcccagcctgccagcaagaagatcgatcagaacaagctgaaacctgagatggacgagaagggcaacctgaccaccgccggctttgcctgctctcagtgtggccagcccctgttcgtgtacaagctggagcaggtgtctgagaagggcaaggcttacaccaactacttcggacggtgcaatgtggccgagcacgaaaagctgatcctgctggcccagctgaagcccgagaaggatagcgacgaagccgtgacatatagcctgggaaagtttgggcagagggccctggatttctacagcattcatgtgaccaaggagtccacccaccccgtgaagcccctggcccagatcgccggaaacagatacgcctccggacctgtgggaaaggccctgagcgacgcatgtatgggcacaatcgcctccttcctgtctaagtaccaggacatcatcatcgaacaccagaaggtggtgaagggcaaccagaagagactggagagcctgcgggagctggccggcaaggaaaacctggaataccctagcgtgaccctgccacctcagcctcacaccaaggagggcgttgatgcctacaacgaagtgatcgcccgggtgcgaatgtgggtgaacctgaacctgtggcagaagctgaagctaagcagagatgatgccaagcctctgctgagactgaagggattcccttcctttcctctggtcgagagacaggccaacgaagtggactggtgggacatggtgtgtaacgtgaagaagctgatcaacgagaaaaaggaggatggcaaggtgttttggcagaatctggctggctacaagagacaggaagccctgagaccatacctgagcagcgaggaagatcggaagaagggaaagaaattcgctcggtaccagctgggcgacctgctgctgcacctggaaaagaagcacggcgaggactggggaaaggtgtacgacgaggcctgggagcggattgacaagaaagtggaaggcctgagcaagcacatcaagctggaagaggaacggagaagcgaggacgcccagagcaaggccgccctgaccgactggctgcgggctaaggccagcttcgtgatcgagggcctgaaggaggccgacaaggacgagttctgcagatgcgagctgaagctgcagaagtggtacggggacctgcggggaaagcccttcgccatcgaagccgagaacagcatcctggacatcagcggcttcagcaagcagtacaactgtgccttcatctggcagaaggacggcgtgaagaagctgaacctgtacctgatcatcaactacttcaagggcggcaagctgcggttcaagaagatcaaacctgaagccttcgaagccaacagattctacaccgtgatcaacaaaaagagcggcgagatcgtgcccatggaggtgaacttcaacttcgacgaccccaacctgatcatcctgcctctggcctttggcaagagacagggcagagaattcatctggaacgacctgctgtccctggaaaccggcagcctgaagctggccaacggaagagtgatcgagaagacactgtacaacagaagaacccggcaggatgagcctgccctgttcgtggccctgaccttcgagcggcgggaggtcctggactcctccaatatcaaaccaatgaacctgatcggcgtggcaagaggcgaaaacatccccgccgtgatcgccctgaccgaccccgagggctgcccactgagccggtttaaggatagcctgggaaacccaacccacatcctgagaatcggcgagagctataaggagaagcagcggaccatccaggccaagaaggaggtggagcagcggagagccggcggctacagccggaagtacgccagcaaagccaagaatctggcagacgatatggtgagaaacaccgctagagatctgctgtactacgccgtgacccaggatgccatgctgatcttcgccaacctgagccggggcttcggccggcagggcaagcggaccttcatggccgagagacagtacacacggatggaggactggctgaccgccaagctggcctacgagggcctgagcaagacctacctgtccaagacactggcccagtacacctccaagacatgcagcaactgtgggtttaccatcaccagcgccgactacgacagggtgctggagaagctgaagaagacagcaacaggctggatgaccacaattaacggcaaggagctgaaggtggagggccagattacctactacaacagatacaagagacagaacgtagtcaaggacctgtccgtcgagctggatagactgagcgaagaatctgtgaacaacgacatctcctcctggacaaagggcagaagcggagaagctctgagcctcctgaagaaaagattctcccatagacccgtgcaggagaagttcgtgtgcctgaactgcggcttcgagacacacgcagccgagcaagccgccctgaacatcgccagatcctggctgttcctgcggagccaggagtacaagaaataccagacaaacaagacaaccggcaacaccgataagagagccttcgtcgagacctggcagtccttttaccggaagaagcttaaggaggtgtggaaacctgccgtgcggtctggcggatctggcggaggctccacaagcatgatgaccgccgtgagcctgaccaccaggccccaggagagcgtggccttcgaggacgtggccgtgtacttcaccaccaaggagtgggccatcatggtgcccgccgagagggccctgtacagggacgtgatgctggagaactacgaggccgtggccttcgtggtgagccccaccagcaagcccgccctggtgagccacctggagcagggcaaggagagctgcttcaccaggccccagggcgtgaccagccccaagaaaaagagaaaagtctaagctgccttctgcggggcttgccttctggccatgcccttcttctctcccttgcacctgtacctcttggtctttgaataaagcctgagtaggaaggctagcaaaaaaaaaaaaaaaaaaaaaaaaaaaaaaaaaaaaaaaaaaaaaaaaaaaaaaaaaaaaaaaaaaaaaaaaaaaaaaaa

SEQ ID NO: 7276 - RNA, 5797 nt, synthetic construct
  source 1..5797: mol_type = other RNA
aggaaataagagagaaaagaagagtaagaagaaatataagagccaccatggcccctaagaagaagcgtaaagtgagccggatggaacgcctcgtctacgaggtgcggcagaagtgcagaaacatcgaggacatctgcatctcctgcggatctctgaacgtgaccctggagcacccactgttcatcggcggcatgtgccagaactgtaaaaactgttttctggagtgtgcctatcaatacgacgatgacggctaccagagctactgcaccatctgttgcggcggaagagaggtgctgatgtgtggaaataacaactgctgccggtgcttctgcgtggaatgcgtggacctgctggtgggccccggcgccgcccaggccgctattaaggaagatccttggaactgctacatgtgcggccacaagggcacatacggcctgctgagacggagagaggactggcctagcagactgcagatgttcttcgccaataaccacgaccaggagttcgacccccctaaggtgtaccctcccgtccccgccgagaagagaaagcccatccgggtcctgagcctgttcgatggcatcgccaccggtctgctggtgctgaaggacctgggcatccaggtggataggtacattgcctccgaggtgtgcgaggactccatcaccgtgggaatggtgcgtcatcagggcaagatcatgtacgtgggcgacgtgcggagcgtgacacagaagcatatccaggagtggggccctttcgacctggtgatcggcggcagcccttgcaatgacctgagcatcgtgaacccagcccggaagggcctgtacgagggaaccggcagactgttcttcgagttttacagactgctgcacgacgcccggcctaaggaaggcgacgaccggcccttcttttggctgttcgagaatgtggtggccatgggagtcagcgacaagcgggatattagccggttcctggagagcaaccccgtgatgatcgatgccaaggaagtgagcgccgcccaccgggccagatacttctggggcaatctgcctggcatgaacagacccctggccagcaccgtgaacgacaagctggagctgcaggagtgcctggagcacggccggatcgccaagttcagcaaggtgagaaccatcaccacccgaagcaacagcatcaaacaaggcaaggaccagcactttcctgtgttcatgaacgagaaggaggacatcctgtggtgtaccgagatggagagagtgttcgggttcccagtccactacacagatgtcagcaacatgtctagactggccagacagagactgctgggaagaagctggtccgtccctgtgatcagacacctgttcgcccctctgaaggagtacttcgcctgcgtgagcagcggcaacagcaacgccaacagccggggccccagcttctctagcggcctggtgccactgtccctgagagggagccacatgggccccatggagatctacaaaaccgtgagcgcctggaagcggcagcctgtgcgcgtgctgagcctgtttcggaatatcgataaagtcctgaaaagcctgggattcctggagagcggctctggctccggcggtggcaccctgaagtacgtggaggatgtgacaaacgtggtcagacgggatgtggagaagtggggccccttcgatctggtgtacggcagcacccaacccctgggcagctcttgtgaccggtgccctggctggtacatgtttcagttccaccggatcctgcagtacgccctgccgagacaggagtcccagcggccattcttttggattttcatggacaacttgctgctgaccgaggatgaccaggaaactaccactcggttcctgcagaccgaagccgtgaccctgcaggacgtgagaggccgggactaccagaacgccatgcgggtgtggtccaacatccctggactgaaaagcaagcacgcacctctgacccctaaagaagaggagtacctgcaggcccaggtgcggagcagaagcaagctggacgcccctaaggtggatctgctggtgaagaattgcctcctgcccctgagagagtacttcaagtatttcagccagaatagtctgcccctgggcggcccaagcagcggcgcccctcctcccagcggcggcagcccagccggctccccaacctctaccgaggagggcacctctgagtccgccacccccgagagcggccctggcacctccaccgagcccagcgagggcagcgcacccggcagccctgccggcagccccacctccacagaggagggaaccagcaccgagcccagcgaaggcagcgccccaggcaccagcaccgagcctagtgagggcggctctggcggcggcagcgcccaggagattaaacggatcaacaagatcagaagaagacttgtgaaagacagcaacaccaagaaggccggcaagacaggccccatgaaaaccctgctggttagagtgatgacacccgatctgagagagcggctggaaaacctgagaaagaagcctgaaaatatcccccagcccatcagcaatacatctagagccaacctgaataagctgctgaccgattacaccgaaatgaagaaggcgatcctgcatgtgtactgggaagagttccagaaggaccctgtgggcctgatgagccgggtggcccagcctgccagcaagaagatcgatcagaacaagctgaaacctgagatggacgagaagggcaacctgaccaccgccggctttgcctgctctcagtgtggccagcccctgttcgtgtacaagctggagcaggtgtctgagaagggcaaggcttacaccaactacttcggacggtgcaatgtggccgagcacgaaaagctgatcctgctggcccagctgaagcccgagaaggatagcgacgaagccgtgacatatagcctgggaaagtttgggcagagggccctggatttctacagcattcatgtgaccaaggagtccacccaccccgtgaagcccctggcccagatcgccggaaacagatacgcctccggacctgtgggaaaggccctgagcgacgcatgtatgggcacaatcgcctccttcctgtctaagtaccaggacatcatcatcgaacaccagaaggtggtgaagggcaaccagaagagactggagagcctgcgggagctggccggcaaggaaaacctggaataccctagcgtgaccctgccacctcagcctcacaccaaggagggcgttgatgcctacaacgaagtgatcgcccgggtgcgaatgtgggtgaacctgaacctgtggcagaagctgaagctaagcagagatgatgccaagcctctgctgagactgaagggattcccttcctttcctctggtcgagagacaggccaacgaagtggactggtgggacatggtgtgtaacgtgaagaagctgatcaacgagaaaaaggaggatggcaaggtgttttggcagaatctggctggctacaagagacaggaagccctgagaccatacctgagcagcgaggaagatcggaagaagggaaagaaattcgctcggtaccagctgggcgacctgctgctgcacctggaaaagaagcacggcgaggactggggaaaggtgtacgacgaggcctgggagcggattgacaagaaagtggaaggcctgagcaagcacatcaagctggaagaggaacggagaagcgaggacgcccagagcaaggccgccctgaccgactggctgcgggctaaggccagcttcgtgatcgagggcctgaaggaggccgacaaggacgagttctgcagatgcgagctgaagctgcagaagtggtacggggacctgcggggaaagcccttcgccatcgaagccgagaacagcatcctggacatcagcggcttcagcaagcagtacaactgtgccttcatctggcagaaggacggcgtgaagaagctgaacctgtacctgatcatcaactacttcaagggcggcaagctgcggttcaagaagatcaaacctgaagccttcgaagccaacagattctacaccgtgatcaacaaaaagagcggcgagatcgtgcccatggaggtgaacttcaacttcgacgaccccaacctgatcatcctgcctctggcctttggcaagagacagggcagagaattcatctggaacgacctgctgtccctggaaaccggcagcctgaagctggccaacggaagagtgatcgagaagacactgtacaacagaagaacccggcaggatgagcctgccctgttcgtggccctgaccttcgagcggcgggaggtcctggactcctccaatatcaaaccaatgaacctgatcggcgtggcaagaggcgaaaacatccccgccgtgatcgccctgaccgaccccgagggctgcccactgagccggtttaaggatagcctgggaaacccaacccacatcctgagaatcggcgagagctataaggagaagcagcggaccatccaggccaagaaggaggtggagcagcggagagccggcggctacagccggaagtacgccagcaaagccaagaatctggcagacgatatggtgagaaacaccgctagagatctgctgtactacgccgtgacccaggatgccatgctgatcttcgccaacctgagccggggcttcggccggcagggcaagcggaccttcatggccgagagacagtacacacggatggaggactggctgaccgccaagctggcctacgagggcctgagcaagacctacctgtccaagacactggcccagtacacctccaagacatgcagcaactgtgggtttaccatcaccagcgccgactacgacagggtgctggagaagctgaagaagacagcaacaggctggatgaccacaattaacggcaaggagctgaaggtggagggccagattacctactacaacagatacaagagacagaacgtagtcaaggacctgtccgtcgagctggatagactgagcgaagaatctgtgaacaacgacatctcctcctggacaaagggcagaagcggagaagctctgagcctcctgaagaaaagattctcccatagacccgtgcaggagaagttcgtgtgcctgaactgcggcttcgagacacacgcagccgagcaagccgccctgaacatcgccagatcctggctgttcctgcggagccaggagtacaagaaataccagacaaacaagacaaccggcaacaccgataagagagccttcgtcgagacctggcagtccttttaccggaagaagcttaaggaggtgtggaaacctgccgtgcggtctggcggatctggcggaggctccacaagcctgaaggccagcgtgagcttcaaggacgtggccgtggagctgacccaggaggagtggcagcacatgggccccgcccagaggaccctgtacagggacgtgatgctggagaactacagccacctggtgagcgtgggctactgcatcttcaagcccgaggtgatcttcaagctggagcagggcgagcagccctggttcctggagcaggagttcagcaaccagagctaccccgaggactacaacatcaccagccccaagaaaaagagaaaagtctaagctgccttctgcggggcttgccttctggccatgcccttcttctctcccttgcacctgtacctcttggtctttgaataaagcctgagtaggaaggctagcaaaaaaaaaaaaaaaaaaaaaaaaaaaaaaaaaaaaaaaaaaaaaaaaaaaaaaaaaaaaaaaaaaaaaaaaaaaaaaaa

SEQ ID NO: 7277 - RNA, 5797 nt, synthetic construct
  source 1..5797: mol_type = other RNA
aggaaataagagagaaaagaagagtaagaagaaatataagagccaccatggcccctaagaagaagcgtaaagtgagccggatggaacgcctcgtctacgaggtgcggcagaagtgcagaaacatcgaggacatctgcatctcctgcggatctctgaacgtgaccctggagcacccactgttcatcggcggcatgtgccagaactgtaaaaactgttttctggagtgtgcctatcaatacgacgatgacggctaccagagctactgcaccatctgttgcggcggaagagaggtgctgatgtgtggaaataacaactgctgccggtgcttctgcgtggaatgcgtggacctgctggtgggccccggcgccgcccaggccgctattaaggaagatccttggaactgctacatgtgcggccacaagggcacatacggcctgctgagacggagagaggactggcctagcagactgcagatgttcttcgccaataaccacgaccaggagttcgacccccctaaggtgtaccctcccgtccccgccgagaagagaaagcccatccgggtcctgagcctgttcgatggcatcgccaccggtctgctggtgctgaaggacctgggcatccaggtggataggtacattgcctccgaggtgtgcgaggactccatcaccgtgggaatggtgcgtcatcagggcaagatcatgtacgtgggcgacgtgcggagcgtgacacagaagcatatccaggagtggggccctttcgacctggtgatcggcggcagcccttgcaatgacctgagcatcgtgaacccagcccggaagggcctgtacgagggaaccggcagactgttcttcgagttttacagactgctgcacgacgcccggcctaaggaaggcgacgaccggcccttcttttggctgttcgagaatgtggtggccatgggagtcagcgacaagcgggatattagccggttcctggagagcaaccccgtgatgatcgatgccaaggaagtgagcgccgcccaccgggccagatacttctggggcaatctgcctggcatgaacagacccctggccagcaccgtgaacgacaagctggagctgcaggagtgcctggagcacggccggatcgccaagttcagcaaggtgagaaccatcaccacccgaagcaacagcatcaaacaaggcaaggaccagcactttcctgtgttcatgaacgagaaggaggacatcctgtggtgtaccgagatggagagagtgttcgggttcccagtccactacacagatgtcagcaacatgtctagactggccagacagagactgctgggaagaagctggtccgtccctgtgatcagacacctgttcgcccctctgaaggagtacttcgcctgcgtgagcagcggcaacagcaacgccaacagccggggccccagcttctctagcggcctggtgccactgtccctgagagggagccacatgggccccatggagatctacaaaaccgtgagcgcctggaagcggcagcctgtgcgcgtgctgagcctgtttcggaatatcgataaagtcctgaaaagcctgggattcctggagagcggctctggctccggcggtggcaccctgaagtacgtggaggatgtgacaaacgtggtcagacgggatgtggagaagtggggccccttcgatctggtgtacggcagcacccaacccctgggcagctcttgtgaccggtgccctggctggtacatgtttcagttccaccggatcctgcagtacgccctgccgagacaggagtcccagcggccattcttttggattttcatggacaacttgctgctgaccgaggatgaccaggaaactaccactcggttcctgcagaccgaagccgtgaccctgcaggacgtgagaggccgggactaccagaacgccatgcgggtgtggtccaacatccctggactgaaaagcaagcacgcacctctgacccctaaagaagaggagtacctgcaggcccaggtgcggagcagaagcaagctggacgcccctaaggtggatctgctggtgaagaattgcctcctgcccctgagagagtacttcaagtatttcagccagaatagtctgcccctgggcggcccaagcagcggcgcccctcctcccagcggcggcagcccagccggctccccaacctctaccgaggagggcacctctgagtccgccacccccgagagcggccctggcacctccaccgagcccagcgagggcagcgcacccggcagccctgccggcagccccacctccacagaggagggaaccagcaccgagcccagcgaaggcagcgccccaggcaccagcaccgagcctagtgagggcggctctggcggcggcagcgcccaggagattaaacggatcaacaagatcagaagaagacttgtgaaagacagcaacaccaagaaggccggcaagacaggccccatgaaaaccctgctggttagagtgatgacacccgatctgagagagcggctggaaaacctgagaaagaagcctgaaaatatcccccagcccatcagcaatacatctagagccaacctgaataagctgctgaccgattacaccgaaatgaagaaggcgatcctgcatgtgtactgggaagagttccagaaggaccctgtgggcctgatgagccgggtggcccagcctgccagcaagaagatcgatcagaacaagctgaaacctgagatggacgagaagggcaacctgaccaccgccggctttgcctgctctcagtgtggccagcccctgttcgtgtacaagctggagcaggtgtctgagaagggcaaggcttacaccaactacttcggacggtgcaatgtggccgagcacgaaaagctgatcctgctggcccagctgaagcccgagaaggatagcgacgaagccgtgacatatagcctgggaaagtttgggcagagggccctggatttctacagcattcatgtgaccaaggagtccacccaccccgtgaagcccctggcccagatcgccggaaacagatacgcctccggacctgtgggaaaggccctgagcgacgcatgtatgggcacaatcgcctccttcctgtctaagtaccaggacatcatcatcgaacaccagaaggtggtgaagggcaaccagaagagactggagagcctgcgggagctggccggcaaggaaaacctggaataccctagcgtgaccctgccacctcagcctcacaccaaggagggcgttgatgcctacaacgaagtgatcgcccgggtgcgaatgtgggtgaacctgaacctgtggcagaagctgaagctaagcagagatgatgccaagcctctgctgagactgaagggattcccttcctttcctctggtcgagagacaggccaacgaagtggactggtgggacatggtgtgtaacgtgaagaagctgatcaacgagaaaaaggaggatggcaaggtgttttggcagaatctggctggctacaagagacaggaagccctgagaccatacctgagcagcgaggaagatcggaagaagggaaagaaattcgctcggtaccagctgggcgacctgctgctgcacctggaaaagaagcacggcgaggactggggaaaggtgtacgacgaggcctgggagcggattgacaagaaagtggaaggcctgagcaagcacatcaagctggaagaggaacggagaagcgaggacgcccagagcaaggccgccctgaccgactggctgcgggctaaggccagcttcgtgatcgagggcctgaaggaggccgacaaggacgagttctgcagatgcgagctgaagctgcagaagtggtacggggacctgcggggaaagcccttcgccatcgaagccgagaacagcatcctggacatcagcggcttcagcaagcagtacaactgtgccttcatctggcagaaggacggcgtgaagaagctgaacctgtacctgatcatcaactacttcaagggcggcaagctgcggttcaagaagatcaaacctgaagccttcgaagccaacagattctacaccgtgatcaacaaaaagagcggcgagatcgtgcccatggaggtgaacttcaacttcgacgaccccaacctgatcatcctgcctctggcctttggcaagagacagggcagagaattcatctggaacgacctgctgtccctggaaaccggcagcctgaagctggccaacggaagagtgatcgagaagacactgtacaacagaagaacccggcaggatgagcctgccctgttcgtggccctgaccttcgagcggcgggaggtcctggactcctccaatatcaaaccaatgaacctgatcggcgtggcaagaggcgaaaacatccccgccgtgatcgccctgaccgaccccgagggctgcccactgagccggtttaaggatagcctgggaaacccaacccacatcctgagaatcggcgagagctataaggagaagcagcggaccatccaggccaagaaggaggtggagcagcggagagccggcggctacagccggaagtacgccagcaaagccaagaatctggcagacgatatggtgagaaacaccgctagagatctgctgtactacgccgtgacccaggatgccatgctgatcttcgccaacctgagccggggcttcggccggcagggcaagcggaccttcatggccgagagacagtacacacggatggaggactggctgaccgccaagctggcctacgagggcctgagcaagacctacctgtccaagacactggcccagtacacctccaagacatgcagcaactgtgggtttaccatcaccagcgccgactacgacagggtgctggagaagctgaagaagacagcaacaggctggatgaccacaattaacggcaaggagctgaaggtggagggccagattacctactacaacagatacaagagacagaacgtagtcaaggacctgtccgtcgagctggatagactgagcgaagaatctgtgaacaacgacatctcctcctggacaaagggcagaagcggagaagctctgagcctcctgaagaaaagattctcccatagacccgtgcaggagaagttcgtgtgcctgaactgcggcttcgagacacacgcagccgagcaagccgccctgaacatcgccagatcctggctgttcctgcggagccaggagtacaagaaataccagacaaacaagacaaccggcaacaccgataagagagccttcgtcgagacctggcagtccttttaccggaagaagcttaaggaggtgtggaaacctgccgtgcggtctggcggatctggcggaggctccacaagcagccagccccccgtgagcttcaaggacgtggtggtgagcttcaccagggaggagtggggccagctggacaccgtgcagaggaccctgtacagggacgtgaccctggagacctgcggccacctggtgagcctgggcctgctgctgcccaacctggacgtgatcagccacctggagaacggcgaggacccctggagggccgagcaggagccccccacccaggactggaagaccaccctggagaagaccagccccaagaaaaagagaaaagtctaagctgccttctgcggggcttgccttctggccatgcccttcttctctcccttgcacctgtacctcttggtctttgaataaagcctgagtaggaaggctagcaaaaaaaaaaaaaaaaaaaaaaaaaaaaaaaaaaaaaaaaaaaaaaaaaaaaaaaaaaaaaaaaaaaaaaaaaaaaaaaa

SEQ ID NO: 7278 - RNA, 5797 nt, synthetic construct
  source 1..5797: mol_type = other RNA
aggaaataagagagaaaagaagagtaagaagaaatataagagccaccatggcccctaagaagaagcgtaaagtgagccggatggaacgcctcgtctacgaggtgcggcagaagtgcagaaacatcgaggacatctgcatctcctgcggatctctgaacgtgaccctggagcacccactgttcatcggcggcatgtgccagaactgtaaaaactgttttctggagtgtgcctatcaatacgacgatgacggctaccagagctactgcaccatctgttgcggcggaagagaggtgctgatgtgtggaaataacaactgctgccggtgcttctgcgtggaatgcgtggacctgctggtgggccccggcgccgcccaggccgctattaaggaagatccttggaactgctacatgtgcggccacaagggcacatacggcctgctgagacggagagaggactggcctagcagactgcagatgttcttcgccaataaccacgaccaggagttcgacccccctaaggtgtaccctcccgtccccgccgagaagagaaagcccatccgggtcctgagcctgttcgatggcatcgccaccggtctgctggtgctgaaggacctgggcatccaggtggataggtacattgcctccgaggtgtgcgaggactccatcaccgtgggaatggtgcgtcatcagggcaagatcatgtacgtgggcgacgtgcggagcgtgacacagaagcatatccaggagtggggccctttcgacctggtgatcggcggcagcccttgcaatgacctgagcatcgtgaacccagcccggaagggcctgtacgagggaaccggcagactgttcttcgagttttacagactgctgcacgacgcccggcctaaggaaggcgacgaccggcccttcttttggctgttcgagaatgtggtggccatgggagtcagcgacaagcgggatattagccggttcctggagagcaaccccgtgatgatcgatgccaaggaagtgagcgccgcccaccgggccagatacttctggggcaatctgcctggcatgaacagacccctggccagcaccgtgaacgacaagctggagctgcaggagtgcctggagcacggccggatcgccaagttcagcaaggtgagaaccatcaccacccgaagcaacagcatcaaacaaggcaaggaccagcactttcctgtgttcatgaacgagaaggaggacatcctgtggtgtaccgagatggagagagtgttcgggttcccagtccactacacagatgtcagcaacatgtctagactggccagacagagactgctgggaagaagctggtccgtccctgtgatcagacacctgttcgcccctctgaaggagtacttcgcctgcgtgagcagcggcaacagcaacgccaacagccggggccccagcttctctagcggcctggtgccactgtccctgagagggagccacatgggccccatggagatctacaaaaccgtgagcgcctggaagcggcagcctgtgcgcgtgctgagcctgtttcggaatatcgataaagtcctgaaaagcctgggattcctggagagcggctctggctccggcggtggcaccctgaagtacgtggaggatgtgacaaacgtggtcagacgggatgtggagaagtggggccccttcgatctggtgtacggcagcacccaacccctgggcagctcttgtgaccggtgccctggctggtacatgtttcagttccaccggatcctgcagtacgccctgccgagacaggagtcccagcggccattcttttggattttcatggacaacttgctgctgaccgaggatgaccaggaaactaccactcggttcctgcagaccgaagccgtgaccctgcaggacgtgagaggccgggactaccagaacgccatgcgggtgtggtccaacatccctggactgaaaagcaagcacgcacctctgacccctaaagaagaggagtacctgcaggcccaggtgcggagcagaagcaagctggacgcccctaaggtggatctgctggtgaagaattgcctcctgcccctgagagagtacttcaagtatttcagccagaatagtctgcccctgggcggcccaagcagcggcgcccctcctcccagcggcggcagcccagccggctccccaacctctaccgaggagggcacctctgagtccgccacccccgagagcggccctggcacctccaccgagcccagcgagggcagcgcacccggcagccctgccggcagccccacctccacagaggagggaaccagcaccgagcccagcgaaggcagcgccccaggcaccagcaccgagcctagtgagggcggctctggcggcggcagcgcccaggagattaaacggatcaacaagatcagaagaagacttgtgaaagacagcaacaccaagaaggccggcaagacaggccccatgaaaaccctgctggttagagtgatgacacccgatctgagagagcggctggaaaacctgagaaagaagcctgaaaatatcccccagcccatcagcaatacatctagagccaacctgaataagctgctgaccgattacaccgaaatgaagaaggcgatcctgcatgtgtactgggaagagttccagaaggaccctgtgggcctgatgagccgggtggcccagcctgccagcaagaagatcgatcagaacaagctgaaacctgagatggacgagaagggcaacctgaccaccgccggctttgcctgctctcagtgtggccagcccctgttcgtgtacaagctggagcaggtgtctgagaagggcaaggcttacaccaactacttcggacggtgcaatgtggccgagcacgaaaagctgatcctgctggcccagctgaagcccgagaaggatagcgacgaagccgtgacatatagcctgggaaagtttgggcagagggccctggatttctacagcattcatgtgaccaaggagtccacccaccccgtgaagcccctggcccagatcgccggaaacagatacgcctccggacctgtgggaaaggccctgagcgacgcatgtatgggcacaatcgcctccttcctgtctaagtaccaggacatcatcatcgaacaccagaaggtggtgaagggcaaccagaagagactggagagcctgcgggagctggccggcaaggaaaacctggaataccctagcgtgaccctgccacctcagcctcacaccaaggagggcgttgatgcctacaacgaagtgatcgcccgggtgcgaatgtgggtgaacctgaacctgtggcagaagctgaagctaagcagagatgatgccaagcctctgctgagactgaagggattcccttcctttcctctggtcgagagacaggccaacgaagtggactggtgggacatggtgtgtaacgtgaagaagctgatcaacgagaaaaaggaggatggcaaggtgttttggcagaatctggctggctacaagagacaggaagccctgagaccatacctgagcagcgaggaagatcggaagaagggaaagaaattcgctcggtaccagctgggcgacctgctgctgcacctggaaaagaagcacggcgaggactggggaaaggtgtacgacgaggcctgggagcggattgacaagaaagtggaaggcctgagcaagcacatcaagctggaagaggaacggagaagcgaggacgcccagagcaaggccgccctgaccgactggctgcgggctaaggccagcttcgtgatcgagggcctgaaggaggccgacaaggacgagttctgcagatgcgagctgaagctgcagaagtggtacggggacctgcggggaaagcccttcgccatcgaagccgagaacagcatcctggacatcagcggcttcagcaagcagtacaactgtgccttcatctggcagaaggacggcgtgaagaagctgaacctgtacctgatcatcaactacttcaagggcggcaagctgcggttcaagaagatcaaacctgaagccttcgaagccaacagattctacaccgtgatcaacaaaaagagcggcgagatcgtgcccatggaggtgaacttcaacttcgacgaccccaacctgatcatcctgcctctggcctttggcaagagacagggcagagaattcatctggaacgacctgctgtccctggaaaccggcagcctgaagctggccaacggaagagtgatcgagaagacactgtacaacagaagaacccggcaggatgagcctgccctgttcgtggccctgaccttcgagcggcgggaggtcctggactcctccaatatcaaaccaatgaacctgatcggcgtggcaagaggcgaaaacatccccgccgtgatcgccctgaccgaccccgagggctgcccactgagccggtttaaggatagcctgggaaacccaacccacatcctgagaatcggcgagagctataaggagaagcagcggaccatccaggccaagaaggaggtggagcagcggagagccggcggctacagccggaagtacgccagcaaagccaagaatctggcagacgatatggtgagaaacaccgctagagatctgctgtactacgccgtgacccaggatgccatgctgatcttcgccaacctgagccggggcttcggccggcagggcaagcggaccttcatggccgagagacagtacacacggatggaggactggctgaccgccaagctggcctacgagggcctgagcaagacctacctgtccaagacactggcccagtacacctccaagacatgcagcaactgtgggtttaccatcaccagcgccgactacgacagggtgctggagaagctgaagaagacagcaacaggctggatgaccacaattaacggcaaggagctgaaggtggagggccagattacctactacaacagatacaagagacagaacgtagtcaaggacctgtccgtcgagctggatagactgagcgaagaatctgtgaacaacgacatctcctcctggacaaagggcagaagcggagaagctctgagcctcctgaagaaaagattctcccatagacccgtgcaggagaagttcgtgtgcctgaactgcggcttcgagacacacgcagccgagcaagccgccctgaacatcgccagatcctggctgttcctgcggagccaggagtacaagaaataccagacaaacaagacaaccggcaacaccgataagagagccttcgtcgagacctggcagtccttttaccggaagaagcttaaggaggtgtggaaacctgccgtgcggtctggcggatctggcggaggctccacaagcgcccagggccaggtgaccttcgaggacgtggccgtgtgcttcagccaggaggagtggggcctgctggacgagacccagaggctgctgtacaggagcgtgatgctggagaccttcagcctgatggccagcctgggcctgaccagcagcaggacccacgacatcagccagctggagaggtggggcgagcccttcctgagcgccagcggcgccatgagggccaccaggcccaccggctgctggcacaccagccccaagaaaaagagaaaagtctaagctgccttctgcggggcttgccttctggccatgcccttcttctctcccttgcacctgtacctcttggtctttgaataaagcctgagtaggaaggctagcaaaaaaaaaaaaaaaaaaaaaaaaaaaaaaaaaaaaaaaaaaaaaaaaaaaaaaaaaaaaaaaaaaaaaaaaaaaaaaaa

SEQ ID NO: 7279 - RNA, 5794 nt, synthetic construct
  source 1..5794: mol_type = other RNA
aggaaataagagagaaaagaagagtaagaagaaatataagagccaccatggcccctaagaagaagcgtaaagtgagccggatggaacgcctcgtctacgaggtgcggcagaagtgcagaaacatcgaggacatctgcatctcctgcggatctctgaacgtgaccctggagcacccactgttcatcggcggcatgtgccagaactgtaaaaactgttttctggagtgtgcctatcaatacgacgatgacggctaccagagctactgcaccatctgttgcggcggaagagaggtgctgatgtgtggaaataacaactgctgccggtgcttctgcgtggaatgcgtggacctgctggtgggccccggcgccgcccaggccgctattaaggaagatccttggaactgctacatgtgcggccacaagggcacatacggcctgctgagacggagagaggactggcctagcagactgcagatgttcttcgccaataaccacgaccaggagttcgacccccctaaggtgtaccctcccgtccccgccgagaagagaaagcccatccgggtcctgagcctgttcgatggcatcgccaccggtctgctggtgctgaaggacctgggcatccaggtggataggtacattgcctccgaggtgtgcgaggactccatcaccgtgggaatggtgcgtcatcagggcaagatcatgtacgtgggcgacgtgcggagcgtgacacagaagcatatccaggagtggggccctttcgacctggtgatcggcggcagcccttgcaatgacctgagcatcgtgaacccagcccggaagggcctgtacgagggaaccggcagactgttcttcgagttttacagactgctgcacgacgcccggcctaaggaaggcgacgaccggcccttcttttggctgttcgagaatgtggtggccatgggagtcagcgacaagcgggatattagccggttcctggagagcaaccccgtgatgatcgatgccaaggaagtgagcgccgcccaccgggccagatacttctggggcaatctgcctggcatgaacagacccctggccagcaccgtgaacgacaagctggagctgcaggagtgcctggagcacggccggatcgccaagttcagcaaggtgagaaccatcaccacccgaagcaacagcatcaaacaaggcaaggaccagcactttcctgtgttcatgaacgagaaggaggacatcctgtggtgtaccgagatggagagagtgttcgggttcccagtccactacacagatgtcagcaacatgtctagactggccagacagagactgctgggaagaagctggtccgtccctgtgatcagacacctgttcgcccctctgaaggagtacttcgcctgcgtgagcagcggcaacagcaacgccaacagccggggccccagcttctctagcggcctggtgccactgtccctgagagggagccacatgggccccatggagatctacaaaaccgtgagcgcctggaagcggcagcctgtgcgcgtgctgagcctgtttcggaatatcgataaagtcctgaaaagcctgggattcctggagagcggctctggctccggcggtggcaccctgaagtacgtggaggatgtgacaaacgtggtcagacgggatgtggagaagtggggccccttcgatctggtgtacggcagcacccaacccctgggcagctcttgtgaccggtgccctggctggtacatgtttcagttccaccggatcctgcagtacgccctgccgagacaggagtcccagcggccattcttttggattttcatggacaacttgctgctgaccgaggatgaccaggaaactaccactcggttcctgcagaccgaagccgtgaccctgcaggacgtgagaggccgggactaccagaacgccatgcgggtgtggtccaacatccctggactgaaaagcaagcacgcacctctgacccctaaagaagaggagtacctgcaggcccaggtgcggagcagaagcaagctggacgcccctaaggtggatctgctggtgaagaattgcctcctgcccctgagagagtacttcaagtatttcagccagaatagtctgcccctgggcggcccaagcagcggcgcccctcctcccagcggcggcagcccagccggctccccaacctctaccgaggagggcacctctgagtccgccacccccgagagcggccctggcacctccaccgagcccagcgagggcagcgcacccggcagccctgccggcagccccacctccacagaggagggaaccagcaccgagcccagcgaaggcagcgccccaggcaccagcaccgagcctagtgagggcggctctggcggcggcagcgcccaggagattaaacggatcaacaagatcagaagaagacttgtgaaagacagcaacaccaagaaggccggcaagacaggccccatgaaaaccctgctggttagagtgatgacacccgatctgagagagcggctggaaaacctgagaaagaagcctgaaaatatcccccagcccatcagcaatacatctagagccaacctgaataagctgctgaccgattacaccgaaatgaagaaggcgatcctgcatgtgtactgggaagagttccagaaggaccctgtgggcctgatgagccgggtggcccagcctgccagcaagaagatcgatcagaacaagctgaaacctgagatggacgagaagggcaacctgaccaccgccggctttgcctgctctcagtgtggccagcccctgttcgtgtacaagctggagcaggtgtctgagaagggcaaggcttacaccaactacttcggacggtgcaatgtggccgagcacgaaaagctgatcctgctggcccagctgaagcccgagaaggatagcgacgaagccgtgacatatagcctgggaaagtttgggcagagggccctggatttctacagcattcatgtgaccaaggagtccacccaccccgtgaagcccctggcccagatcgccggaaacagatacgcctccggacctgtgggaaaggccctgagcgacgcatgtatgggcacaatcgcctccttcctgtctaagtaccaggacatcatcatcgaacaccagaaggtggtgaagggcaaccagaagagactggagagcctgcgggagctggccggcaaggaaaacctggaataccctagcgtgaccctgccacctcagcctcacaccaaggagggcgttgatgcctacaacgaagtgatcgcccgggtgcgaatgtgggtgaacctgaacctgtggcagaagctgaagctaagcagagatgatgccaagcctctgctgagactgaagggattcccttcctttcctctggtcgagagacaggccaacgaagtggactggtgggacatggtgtgtaacgtgaagaagctgatcaacgagaaaaaggaggatggcaaggtgttttggcagaatctggctggctacaagagacaggaagccctgagaccatacctgagcagcgaggaagatcggaagaagggaaagaaattcgctcggtaccagctgggcgacctgctgctgcacctggaaaagaagcacggcgaggactggggaaaggtgtacgacgaggcctgggagcggattgacaagaaagtggaaggcctgagcaagcacatcaagctggaagaggaacggagaagcgaggacgcccagagcaaggccgccctgaccgactggctgcgggctaaggccagcttcgtgatcgagggcctgaaggaggccgacaaggacgagttctgcagatgcgagctgaagctgcagaagtggtacggggacctgcggggaaagcccttcgccatcgaagccgagaacagcatcctggacatcagcggcttcagcaagcagtacaactgtgccttcatctggcagaaggacggcgtgaagaagctgaacctgtacctgatcatcaactacttcaagggcggcaagctgcggttcaagaagatcaaacctgaagccttcgaagccaacagattctacaccgtgatcaacaaaaagagcggcgagatcgtgcccatggaggtgaacttcaacttcgacgaccccaacctgatcatcctgcctctggcctttggcaagagacagggcagagaattcatctggaacgacctgctgtccctggaaaccggcagcctgaagctggccaacggaagagtgatcgagaagacactgtacaacagaagaacccggcaggatgagcctgccctgttcgtggccctgaccttcgagcggcgggaggtcctggactcctccaatatcaaaccaatgaacctgatcggcgtggcaagaggcgaaaacatccccgccgtgatcgccctgaccgaccccgagggctgcccactgagccggtttaaggatagcctgggaaacccaacccacatcctgagaatcggcgagagctataaggagaagcagcggaccatccaggccaagaaggaggtggagcagcggagagccggcggctacagccggaagtacgccagcaaagccaagaatctggcagacgatatggtgagaaacaccgctagagatctgctgtactacgccgtgacccaggatgccatgctgatcttcgccaacctgagccggggcttcggccggcagggcaagcggaccttcatggccgagagacagtacacacggatggaggactggctgaccgccaagctggcctacgagggcctgagcaagacctacctgtccaagacactggcccagtacacctccaagacatgcagcaactgtgggtttaccatcaccagcgccgactacgacagggtgctggagaagctgaagaagacagcaacaggctggatgaccacaattaacggcaaggagctgaaggtggagggccagattacctactacaacagatacaagagacagaacgtagtcaaggacctgtccgtcgagctggatagactgagcgaagaatctgtgaacaacgacatctcctcctggacaaagggcagaagcggagaagctctgagcctcctgaagaaaagattctcccatagacccgtgcaggagaagttcgtgtgcctgaactgcggcttcgagacacacgcagccgagcaagccgccctgaacatcgccagatcctggctgttcctgcggagccaggagtacaagaaataccagacaaacaagacaaccggcaacaccgataagagagccttcgtcgagacctggcagtccttttaccggaagaagcttaaggaggtgtggaaacctgccgtgcggtctggcggatctggcggaggctccacaagcatgggcgagcccctggagttcagggacgtggccatcgagttcagcctggaggagtggcactgcctggacaccgcccagaggaacctgtacagggacgtgatgctggagaactacaggaacctggtgttcctgggcatcgccgtgagcaagcccgacctgatcacctggctggagcagggcaagaagcccctgaccgtgaagggccacgagatgatcgccaccccccccggcaggtgcaagaccagccccaagaaaaagagaaaagtctaagctgccttctgcggggcttgccttctggccatgcccttcttctctcccttgcacctgtacctcttggtctttgaataaagcctgagtaggaaggctagcaaaaaaaaaaaaaaaaaaaaaaaaaaaaaaaaaaaaaaaaaaaaaaaaaaaaaaaaaaaaaaaaaaaaaaaaaaaaaaaa

SEQ ID NO: 7280 - RNA, 5797 nt, synthetic construct
  source 1..5797: mol_type = other RNA
aggaaataagagagaaaagaagagtaagaagaaatataagagccaccatggcccctaagaagaagcgtaaagtgagccggatggaacgcctcgtctacgaggtgcggcagaagtgcagaaacatcgaggacatctgcatctcctgcggatctctgaacgtgaccctggagcacccactgttcatcggcggcatgtgccagaactgtaaaaactgttttctggagtgtgcctatcaatacgacgatgacggctaccagagctactgcaccatctgttgcggcggaagagaggtgctgatgtgtggaaataacaactgctgccggtgcttctgcgtggaatgcgtggacctgctggtgggccccggcgccgcccaggccgctattaaggaagatccttggaactgctacatgtgcggccacaagggcacatacggcctgctgagacggagagaggactggcctagcagactgcagatgttcttcgccaataaccacgaccaggagttcgacccccctaaggtgtaccctcccgtccccgccgagaagagaaagcccatccgggtcctgagcctgttcgatggcatcgccaccggtctgctggtgctgaaggacctgggcatccaggtggataggtacattgcctccgaggtgtgcgaggactccatcaccgtgggaatggtgcgtcatcagggcaagatcatgtacgtgggcgacgtgcggagcgtgacacagaagcatatccaggagtggggccctttcgacctggtgatcggcggcagcccttgcaatgacctgagcatcgtgaacccagcccggaagggcctgtacgagggaaccggcagactgttcttcgagttttacagactgctgcacgacgcccggcctaaggaaggcgacgaccggcccttcttttggctgttcgagaatgtggtggccatgggagtcagcgacaagcgggatattagccggttcctggagagcaaccccgtgatgatcgatgccaaggaagtgagcgccgcccaccgggccagatacttctggggcaatctgcctggcatgaacagacccctggccagcaccgtgaacgacaagctggagctgcaggagtgcctggagcacggccggatcgccaagttcagcaaggtgagaaccatcaccacccgaagcaacagcatcaaacaaggcaaggaccagcactttcctgtgttcatgaacgagaaggaggacatcctgtggtgtaccgagatggagagagtgttcgggttcccagtccactacacagatgtcagcaacatgtctagactggccagacagagactgctgggaagaagctggtccgtccctgtgatcagacacctgttcgcccctctgaaggagtacttcgcctgcgtgagcagcggcaacagcaacgccaacagccggggccccagcttctctagcggcctggtgccactgtccctgagagggagccacatgggccccatggagatctacaaaaccgtgagcgcctggaagcggcagcctgtgcgcgtgctgagcctgtttcggaatatcgataaagtcctgaaaagcctgggattcctggagagcggctctggctccggcggtggcaccctgaagtacgtggaggatgtgacaaacgtggtcagacgggatgtggagaagtggggccccttcgatctggtgtacggcagcacccaacccctgggcagctcttgtgaccggtgccctggctggtacatgtttcagttccaccggatcctgcagtacgccctgccgagacaggagtcccagcggccattcttttggattttcatggacaacttgctgctgaccgaggatgaccaggaaactaccactcggttcctgcagaccgaagccgtgaccctgcaggacgtgagaggccgggactaccagaacgccatgcgggtgtggtccaacatccctggactgaaaagcaagcacgcacctctgacccctaaagaagaggagtacctgcaggcccaggtgcggagcagaagcaagctggacgcccctaaggtggatctgctggtgaagaattgcctcctgcccctgagagagtacttcaagtatttcagccagaatagtctgcccctgggcggcccaagcagcggcgcccctcctcccagcggcggcagcccagccggctccccaacctctaccgaggagggcacctctgagtccgccacccccgagagcggccctggcacctccaccgagcccagcgagggcagcgcacccggcagccctgccggcagccccacctccacagaggagggaaccagcaccgagcccagcgaaggcagcgccccaggcaccagcaccgagcctagtgagggcggctctggcggcggcagcgcccaggagattaaacggatcaacaagatcagaagaagacttgtgaaagacagcaacaccaagaaggccggcaagacaggccccatgaaaaccctgctggttagagtgatgacacccgatctgagagagcggctggaaaacctgagaaagaagcctgaaaatatcccccagcccatcagcaatacatctagagccaacctgaataagctgctgaccgattacaccgaaatgaagaaggcgatcctgcatgtgtactgggaagagttccagaaggaccctgtgggcctgatgagccgggtggcccagcctgccagcaagaagatcgatcagaacaagctgaaacctgagatggacgagaagggcaacctgaccaccgccggctttgcctgctctcagtgtggccagcccctgttcgtgtacaagctggagcaggtgtctgagaagggcaaggcttacaccaactacttcggacggtgcaatgtggccgagcacgaaaagctgatcctgctggcccagctgaagcccgagaaggatagcgacgaagccgtgacatatagcctgggaaagtttgggcagagggccctggatttctacagcattcatgtgaccaaggagtccacccaccccgtgaagcccctggcccagatcgccggaaacagatacgcctccggacctgtgggaaaggccctgagcgacgcatgtatgggcacaatcgcctccttcctgtctaagtaccaggacatcatcatcgaacaccagaaggtggtgaagggcaaccagaagagactggagagcctgcgggagctggccggcaaggaaaacctggaataccctagcgtgaccctgccacctcagcctcacaccaaggagggcgttgatgcctacaacgaagtgatcgcccgggtgcgaatgtgggtgaacctgaacctgtggcagaagctgaagctaagcagagatgatgccaagcctctgctgagactgaagggattcccttcctttcctctggtcgagagacaggccaacgaagtggactggtgggacatggtgtgtaacgtgaagaagctgatcaacgagaaaaaggaggatggcaaggtgttttggcagaatctggctggctacaagagacaggaagccctgagaccatacctgagcagcgaggaagatcggaagaagggaaagaaattcgctcggtaccagctgggcgacctgctgctgcacctggaaaagaagcacggcgaggactggggaaaggtgtacgacgaggcctgggagcggattgacaagaaagtggaaggcctgagcaagcacatcaagctggaagaggaacggagaagcgaggacgcccagagcaaggccgccctgaccgactggctgcgggctaaggccagcttcgtgatcgagggcctgaaggaggccgacaaggacgagttctgcagatgcgagctgaagctgcagaagtggtacggggacctgcggggaaagcccttcgccatcgaagccgagaacagcatcctggacatcagcggcttcagcaagcagtacaactgtgccttcatctggcagaaggacggcgtgaagaagctgaacctgtacctgatcatcaactacttcaagggcggcaagctgcggttcaagaagatcaaacctgaagccttcgaagccaacagattctacaccgtgatcaacaaaaagagcggcgagatcgtgcccatggaggtgaacttcaacttcgacgaccccaacctgatcatcctgcctctggcctttggcaagagacagggcagagaattcatctggaacgacctgctgtccctggaaaccggcagcctgaagctggccaacggaagagtgatcgagaagacactgtacaacagaagaacccggcaggatgagcctgccctgttcgtggccctgaccttcgagcggcgggaggtcctggactcctccaatatcaaaccaatgaacctgatcggcgtggcaagaggcgaaaacatccccgccgtgatcgccctgaccgaccccgagggctgcccactgagccggtttaaggatagcctgggaaacccaacccacatcctgagaatcggcgagagctataaggagaagcagcggaccatccaggccaagaaggaggtggagcagcggagagccggcggctacagccggaagtacgccagcaaagccaagaatctggcagacgatatggtgagaaacaccgctagagatctgctgtactacgccgtgacccaggatgccatgctgatcttcgccaacctgagccggggcttcggccggcagggcaagcggaccttcatggccgagagacagtacacacggatggaggactggctgaccgccaagctggcctacgagggcctgagcaagacctacctgtccaagacactggcccagtacacctccaagacatgcagcaactgtgggtttaccatcaccagcgccgactacgacagggtgctggagaagctgaagaagacagcaacaggctggatgaccacaattaacggcaaggagctgaaggtggagggccagattacctactacaacagatacaagagacagaacgtagtcaaggacctgtccgtcgagctggatagactgagcgaagaatctgtgaacaacgacatctcctcctggacaaagggcagaagcggagaagctctgagcctcctgaagaaaagattctcccatagacccgtgcaggagaagttcgtgtgcctgaactgcggcttcgagacacacgcagccgagcaagccgccctgaacatcgccagatcctggctgttcctgcggagccaggagtacaagaaataccagacaaacaagacaaccggcaacaccgataagagagccttcgtcgagacctggcagtccttttaccggaagaagcttaaggaggtgtggaaacctgccgtgcggtctggcggatctggcggaggctccacaagccccggccaggaggtggtgaccttcaaggacatggccgtggacttcaccagggaggagtggaggctgctgacccccccccagaaggagctgtacaaggaggtgatgctggagaacgccaggaacctgctgagcgtgggcttcgccgtgcccggcgacgtgatcagctacctggagcagagggaggccccctggctgctggagcaggagggcctgaggagctgcagccccggcgacatcagccccaccagccccaagaaaaagagaaaagtctaagctgccttctgcggggcttgccttctggccatgcccttcttctctcccttgcacctgtacctcttggtctttgaataaagcctgagtaggaaggctagcaaaaaaaaaaaaaaaaaaaaaaaaaaaaaaaaaaaaaaaaaaaaaaaaaaaaaaaaaaaaaaaaaaaaaaaaaaaaaaaa

SEQ ID NO: 7281 - RNA, 5797 nt, synthetic construct
  source 1..5797: mol_type = other RNA
aggaaataagagagaaaagaagagtaagaagaaatataagagccaccatggcccctaagaagaagcgtaaagtgagccggatggaacgcctcgtctacgaggtgcggcagaagtgcagaaacatcgaggacatctgcatctcctgcggatctctgaacgtgaccctggagcacccactgttcatcggcggcatgtgccagaactgtaaaaactgttttctggagtgtgcctatcaatacgacgatgacggctaccagagctactgcaccatctgttgcggcggaagagaggtgctgatgtgtggaaataacaactgctgccggtgcttctgcgtggaatgcgtggacctgctggtgggccccggcgccgcccaggccgctattaaggaagatccttggaactgctacatgtgcggccacaagggcacatacggcctgctgagacggagagaggactggcctagcagactgcagatgttcttcgccaataaccacgaccaggagttcgacccccctaaggtgtaccctcccgtccccgccgagaagagaaagcccatccgggtcctgagcctgttcgatggcatcgccaccggtctgctggtgctgaaggacctgggcatccaggtggataggtacattgcctccgaggtgtgcgaggactccatcaccgtgggaatggtgcgtcatcagggcaagatcatgtacgtgggcgacgtgcggagcgtgacacagaagcatatccaggagtggggccctttcgacctggtgatcggcggcagcccttgcaatgacctgagcatcgtgaacccagcccggaagggcctgtacgagggaaccggcagactgttcttcgagttttacagactgctgcacgacgcccggcctaaggaaggcgacgaccggcccttcttttggctgttcgagaatgtggtggccatgggagtcagcgacaagcgggatattagccggttcctggagagcaaccccgtgatgatcgatgccaaggaagtgagcgccgcccaccgggccagatacttctggggcaatctgcctggcatgaacagacccctggccagcaccgtgaacgacaagctggagctgcaggagtgcctggagcacggccggatcgccaagttcagcaaggtgagaaccatcaccacccgaagcaacagcatcaaacaaggcaaggaccagcactttcctgtgttcatgaacgagaaggaggacatcctgtggtgtaccgagatggagagagtgttcgggttcccagtccactacacagatgtcagcaacatgtctagactggccagacagagactgctgggaagaagctggtccgtccctgtgatcagacacctgttcgcccctctgaaggagtacttcgcctgcgtgagcagcggcaacagcaacgccaacagccggggccccagcttctctagcggcctggtgccactgtccctgagagggagccacatgggccccatggagatctacaaaaccgtgagcgcctggaagcggcagcctgtgcgcgtgctgagcctgtttcggaatatcgataaagtcctgaaaagcctgggattcctggagagcggctctggctccggcggtggcaccctgaagtacgtggaggatgtgacaaacgtggtcagacgggatgtggagaagtggggccccttcgatctggtgtacggcagcacccaacccctgggcagctcttgtgaccggtgccctggctggtacatgtttcagttccaccggatcctgcagtacgccctgccgagacaggagtcccagcggccattcttttggattttcatggacaacttgctgctgaccgaggatgaccaggaaactaccactcggttcctgcagaccgaagccgtgaccctgcaggacgtgagaggccgggactaccagaacgccatgcgggtgtggtccaacatccctggactgaaaagcaagcacgcacctctgacccctaaagaagaggagtacctgcaggcccaggtgcggagcagaagcaagctggacgcccctaaggtggatctgctggtgaagaattgcctcctgcccctgagagagtacttcaagtatttcagccagaatagtctgcccctgggcggcccaagcagcggcgcccctcctcccagcggcggcagcccagccggctccccaacctctaccgaggagggcacctctgagtccgccacccccgagagcggccctggcacctccaccgagcccagcgagggcagcgcacccggcagccctgccggcagccccacctccacagaggagggaaccagcaccgagcccagcgaaggcagcgccccaggcaccagcaccgagcctagtgagggcggctctggcggcggcagcgcccaggagattaaacggatcaacaagatcagaagaagacttgtgaaagacagcaacaccaagaaggccggcaagacaggccccatgaaaaccctgctggttagagtgatgacacccgatctgagagagcggctggaaaacctgagaaagaagcctgaaaatatcccccagcccatcagcaatacatctagagccaacctgaataagctgctgaccgattacaccgaaatgaagaaggcgatcctgcatgtgtactgggaagagttccagaaggaccctgtgggcctgatgagccgggtggcccagcctgccagcaagaagatcgatcagaacaagctgaaacctgagatggacgagaagggcaacctgaccaccgccggctttgcctgctctcagtgtggccagcccctgttcgtgtacaagctggagcaggtgtctgagaagggcaaggcttacaccaactacttcggacggtgcaatgtggccgagcacgaaaagctgatcctgctggcccagctgaagcccgagaaggatagcgacgaagccgtgacatatagcctgggaaagtttgggcagagggccctggatttctacagcattcatgtgaccaaggagtccacccaccccgtgaagcccctggcccagatcgccggaaacagatacgcctccggacctgtgggaaaggccctgagcgacgcatgtatgggcacaatcgcctccttcctgtctaagtaccaggacatcatcatcgaacaccagaaggtggtgaagggcaaccagaagagactggagagcctgcgggagctggccggcaaggaaaacctggaataccctagcgtgaccctgccacctcagcctcacaccaaggagggcgttgatgcctacaacgaagtgatcgcccgggtgcgaatgtgggtgaacctgaacctgtggcagaagctgaagctaagcagagatgatgccaagcctctgctgagactgaagggattcccttcctttcctctggtcgagagacaggccaacgaagtggactggtgggacatggtgtgtaacgtgaagaagctgatcaacgagaaaaaggaggatggcaaggtgttttggcagaatctggctggctacaagagacaggaagccctgagaccatacctgagcagcgaggaagatcggaagaagggaaagaaattcgctcggtaccagctgggcgacctgctgctgcacctggaaaagaagcacggcgaggactggggaaaggtgtacgacgaggcctgggagcggattgacaagaaagtggaaggcctgagcaagcacatcaagctggaagaggaacggagaagcgaggacgcccagagcaaggccgccctgaccgactggctgcgggctaaggccagcttcgtgatcgagggcctgaaggaggccgacaaggacgagttctgcagatgcgagctgaagctgcagaagtggtacggggacctgcggggaaagcccttcgccatcgaagccgagaacagcatcctggacatcagcggcttcagcaagcagtacaactgtgccttcatctggcagaaggacggcgtgaagaagctgaacctgtacctgatcatcaactacttcaagggcggcaagctgcggttcaagaagatcaaacctgaagccttcgaagccaacagattctacaccgtgatcaacaaaaagagcggcgagatcgtgcccatggaggtgaacttcaacttcgacgaccccaacctgatcatcctgcctctggcctttggcaagagacagggcagagaattcatctggaacgacctgctgtccctggaaaccggcagcctgaagctggccaacggaagagtgatcgagaagacactgtacaacagaagaacccggcaggatgagcctgccctgttcgtggccctgaccttcgagcggcgggaggtcctggactcctccaatatcaaaccaatgaacctgatcggcgtggcaagaggcgaaaacatccccgccgtgatcgccctgaccgaccccgagggctgcccactgagccggtttaaggatagcctgggaaacccaacccacatcctgagaatcggcgagagctataaggagaagcagcggaccatccaggccaagaaggaggtggagcagcggagagccggcggctacagccggaagtacgccagcaaagccaagaatctggcagacgatatggtgagaaacaccgctagagatctgctgtactacgccgtgacccaggatgccatgctgatcttcgccaacctgagccggggcttcggccggcagggcaagcggaccttcatggccgagagacagtacacacggatggaggactggctgaccgccaagctggcctacgagggcctgagcaagacctacctgtccaagacactggcccagtacacctccaagacatgcagcaactgtgggtttaccatcaccagcgccgactacgacagggtgctggagaagctgaagaagacagcaacaggctggatgaccacaattaacggcaaggagctgaaggtggagggccagattacctactacaacagatacaagagacagaacgtagtcaaggacctgtccgtcgagctggatagactgagcgaagaatctgtgaacaacgacatctcctcctggacaaagggcagaagcggagaagctctgagcctcctgaagaaaagattctcccatagacccgtgcaggagaagttcgtgtgcctgaactgcggcttcgagacacacgcagccgagcaagccgccctgaacatcgccagatcctggctgttcctgcggagccaggagtacaagaaataccagacaaacaagacaaccggcaacaccgataagagagccttcgtcgagacctggcagtccttttaccggaagaagcttaaggaggtgtggaaacctgccgtgcggtctggcggatctggcggaggctccacaagcaagcccaggaccgtgagcttcgccgacgtggccgtgtacttcagcagggaggagtggggctgcctgaggcccgcccagagggccctgtacagggacgtgatgagggagacctacggccacctgggcgccctgggcgtgggcggcagcaagcccgccctgatcagctgggtggaggaggaggccgagctgtgggaccccgccgcccaggaccccgaggtgaccaagtgccccaccgagaccgacaccagccccaagaaaaagagaaaagtctaagctgccttctgcggggcttgccttctggccatgcccttcttctctcccttgcacctgtacctcttggtctttgaataaagcctgagtaggaaggctagcaaaaaaaaaaaaaaaaaaaaaaaaaaaaaaaaaaaaaaaaaaaaaaaaaaaaaaaaaaaaaaaaaaaaaaaaaaaaaaaa

SEQ ID NO: 7282 - RNA, 5797 nt, synthetic construct
  source 1..5797: mol_type = other RNA
aggaaataagagagaaaagaagagtaagaagaaatataagagccaccatggcccctaagaagaagcgtaaagtgagccggatggaacgcctcgtctacgaggtgcggcagaagtgcagaaacatcgaggacatctgcatctcctgcggatctctgaacgtgaccctggagcacccactgttcatcggcggcatgtgccagaactgtaaaaactgttttctggagtgtgcctatcaatacgacgatgacggctaccagagctactgcaccatctgttgcggcggaagagaggtgctgatgtgtggaaataacaactgctgccggtgcttctgcgtggaatgcgtggacctgctggtgggccccggcgccgcccaggccgctattaaggaagatccttggaactgctacatgtgcggccacaagggcacatacggcctgctgagacggagagaggactggcctagcagactgcagatgttcttcgccaataaccacgaccaggagttcgacccccctaaggtgtaccctcccgtccccgccgagaagagaaagcccatccgggtcctgagcctgttcgatggcatcgccaccggtctgctggtgctgaaggacctgggcatccaggtggataggtacattgcctccgaggtgtgcgaggactccatcaccgtgggaatggtgcgtcatcagggcaagatcatgtacgtgggcgacgtgcggagcgtgacacagaagcatatccaggagtggggccctttcgacctggtgatcggcggcagcccttgcaatgacctgagcatcgtgaacccagcccggaagggcctgtacgagggaaccggcagactgttcttcgagttttacagactgctgcacgacgcccggcctaaggaaggcgacgaccggcccttcttttggctgttcgagaatgtggtggccatgggagtcagcgacaagcgggatattagccggttcctggagagcaaccccgtgatgatcgatgccaaggaagtgagcgccgcccaccgggccagatacttctggggcaatctgcctggcatgaacagacccctggccagcaccgtgaacgacaagctggagctgcaggagtgcctggagcacggccggatcgccaagttcagcaaggtgagaaccatcaccacccgaagcaacagcatcaaacaaggcaaggaccagcactttcctgtgttcatgaacgagaaggaggacatcctgtggtgtaccgagatggagagagtgttcgggttcccagtccactacacagatgtcagcaacatgtctagactggccagacagagactgctgggaagaagctggtccgtccctgtgatcagacacctgttcgcccctctgaaggagtacttcgcctgcgtgagcagcggcaacagcaacgccaacagccggggccccagcttctctagcggcctggtgccactgtccctgagagggagccacatgggccccatggagatctacaaaaccgtgagcgcctggaagcggcagcctgtgcgcgtgctgagcctgtttcggaatatcgataaagtcctgaaaagcctgggattcctggagagcggctctggctccggcggtggcaccctgaagtacgtggaggatgtgacaaacgtggtcagacgggatgtggagaagtggggccccttcgatctggtgtacggcagcacccaacccctgggcagctcttgtgaccggtgccctggctggtacatgtttcagttccaccggatcctgcagtacgccctgccgagacaggagtcccagcggccattcttttggattttcatggacaacttgctgctgaccgaggatgaccaggaaactaccactcggttcctgcagaccgaagccgtgaccctgcaggacgtgagaggccgggactaccagaacgccatgcgggtgtggtccaacatccctggactgaaaagcaagcacgcacctctgacccctaaagaagaggagtacctgcaggcccaggtgcggagcagaagcaagctggacgcccctaaggtggatctgctggtgaagaattgcctcctgcccctgagagagtacttcaagtatttcagccagaatagtctgcccctgggcggcccaagcagcggcgcccctcctcccagcggcggcagcccagccggctccccaacctctaccgaggagggcacctctgagtccgccacccccgagagcggccctggcacctccaccgagcccagcgagggcagcgcacccggcagccctgccggcagccccacctccacagaggagggaaccagcaccgagcccagcgaaggcagcgccccaggcaccagcaccgagcctagtgagggcggctctggcggcggcagcgcccaggagattaaacggatcaacaagatcagaagaagacttgtgaaagacagcaacaccaagaaggccggcaagacaggccccatgaaaaccctgctggttagagtgatgacacccgatctgagagagcggctggaaaacctgagaaagaagcctgaaaatatcccccagcccatcagcaatacatctagagccaacctgaataagctgctgaccgattacaccgaaatgaagaaggcgatcctgcatgtgtactgggaagagttccagaaggaccctgtgggcctgatgagccgggtggcccagcctgccagcaagaagatcgatcagaacaagctgaaacctgagatggacgagaagggcaacctgaccaccgccggctttgcctgctctcagtgtggccagcccctgttcgtgtacaagctggagcaggtgtctgagaagggcaaggcttacaccaactacttcggacggtgcaatgtggccgagcacgaaaagctgatcctgctggcccagctgaagcccgagaaggatagcgacgaagccgtgacatatagcctgggaaagtttgggcagagggccctggatttctacagcattcatgtgaccaaggagtccacccaccccgtgaagcccctggcccagatcgccggaaacagatacgcctccggacctgtgggaaaggccctgagcgacgcatgtatgggcacaatcgcctccttcctgtctaagtaccaggacatcatcatcgaacaccagaaggtggtgaagggcaaccagaagagactggagagcctgcgggagctggccggcaaggaaaacctggaataccctagcgtgaccctgccacctcagcctcacaccaaggagggcgttgatgcctacaacgaagtgatcgcccgggtgcgaatgtgggtgaacctgaacctgtggcagaagctgaagctaagcagagatgatgccaagcctctgctgagactgaagggattcccttcctttcctctggtcgagagacaggccaacgaagtggactggtgggacatggtgtgtaacgtgaagaagctgatcaacgagaaaaaggaggatggcaaggtgttttggcagaatctggctggctacaagagacaggaagccctgagaccatacctgagcagcgaggaagatcggaagaagggaaagaaattcgctcggtaccagctgggcgacctgctgctgcacctggaaaagaagcacggcgaggactggggaaaggtgtacgacgaggcctgggagcggattgacaagaaagtggaaggcctgagcaagcacatcaagctggaagaggaacggagaagcgaggacgcccagagcaaggccgccctgaccgactggctgcgggctaaggccagcttcgtgatcgagggcctgaaggaggccgacaaggacgagttctgcagatgcgagctgaagctgcagaagtggtacggggacctgcggggaaagcccttcgccatcgaagccgagaacagcatcctggacatcagcggcttcagcaagcagtacaactgtgccttcatctggcagaaggacggcgtgaagaagctgaacctgtacctgatcatcaactacttcaagggcggcaagctgcggttcaagaagatcaaacctgaagccttcgaagccaacagattctacaccgtgatcaacaaaaagagcggcgagatcgtgcccatggaggtgaacttcaacttcgacgaccccaacctgatcatcctgcctctggcctttggcaagagacagggcagagaattcatctggaacgacctgctgtccctggaaaccggcagcctgaagctggccaacggaagagtgatcgagaagacactgtacaacagaagaacccggcaggatgagcctgccctgttcgtggccctgaccttcgagcggcgggaggtcctggactcctccaatatcaaaccaatgaacctgatcggcgtggcaagaggcgaaaacatccccgccgtgatcgccctgaccgaccccgagggctgcccactgagccggtttaaggatagcctgggaaacccaacccacatcctgagaatcggcgagagctataaggagaagcagcggaccatccaggccaagaaggaggtggagcagcggagagccggcggctacagccggaagtacgccagcaaagccaagaatctggcagacgatatggtgagaaacaccgctagagatctgctgtactacgccgtgacccaggatgccatgctgatcttcgccaacctgagccggggcttcggccggcagggcaagcggaccttcatggccgagagacagtacacacggatggaggactggctgaccgccaagctggcctacgagggcctgagcaagacctacctgtccaagacactggcccagtacacctccaagacatgcagcaactgtgggtttaccatcaccagcgccgactacgacagggtgctggagaagctgaagaagacagcaacaggctggatgaccacaattaacggcaaggagctgaaggtggagggccagattacctactacaacagatacaagagacagaacgtagtcaaggacctgtccgtcgagctggatagactgagcgaagaatctgtgaacaacgacatctcctcctggacaaagggcagaagcggagaagctctgagcctcctgaagaaaagattctcccatagacccgtgcaggagaagttcgtgtgcctgaactgcggcttcgagacacacgcagccgagcaagccgccctgaacatcgccagatcctggctgttcctgcggagccaggagtacaagaaataccagacaaacaagacaaccggcaacaccgataagagagccttcgtcgagacctggcagtccttttaccggaagaagcttaaggaggtgtggaaacctgccgtgcggtctggcggatctggcggaggctccacaagcggccccctgaccttcagggacgtgaccatcgagttcagccacgaggagtggaagtgcctggaccccgcccagaaggccctgtacaaggacgtgatgctggagaactacaggaacctggtgttcctgggcatcacccccaagtgcaccaccaaggagctgccccccatcggcaacaacaacaccggcgagaagttcaggaccgtgaccctggagaggcacgagtgctacgacatcgaggacatcaccagccccaagaaaaagagaaaagtctaagctgccttctgcggggcttgccttctggccatgcccttcttctctcccttgcacctgtacctcttggtctttgaataaagcctgagtaggaaggctagcaaaaaaaaaaaaaaaaaaaaaaaaaaaaaaaaaaaaaaaaaaaaaaaaaaaaaaaaaaaaaaaaaaaaaaaaaaaaaaaa

SEQ ID NO: 7283 - RNA, 5797 nt, synthetic construct
  source 1..5797: mol_type = other RNA
aggaaataagagagaaaagaagagtaagaagaaatataagagccaccatggcccctaagaagaagcgtaaagtgagccggatggaacgcctcgtctacgaggtgcggcagaagtgcagaaacatcgaggacatctgcatctcctgcggatctctgaacgtgaccctggagcacccactgttcatcggcggcatgtgccagaactgtaaaaactgttttctggagtgtgcctatcaatacgacgatgacggctaccagagctactgcaccatctgttgcggcggaagagaggtgctgatgtgtggaaataacaactgctgccggtgcttctgcgtggaatgcgtggacctgctggtgggccccggcgccgcccaggccgctattaaggaagatccttggaactgctacatgtgcggccacaagggcacatacggcctgctgagacggagagaggactggcctagcagactgcagatgttcttcgccaataaccacgaccaggagttcgacccccctaaggtgtaccctcccgtccccgccgagaagagaaagcccatccgggtcctgagcctgttcgatggcatcgccaccggtctgctggtgctgaaggacctgggcatccaggtggataggtacattgcctccgaggtgtgcgaggactccatcaccgtgggaatggtgcgtcatcagggcaagatcatgtacgtgggcgacgtgcggagcgtgacacagaagcatatccaggagtggggccctttcgacctggtgatcggcggcagcccttgcaatgacctgagcatcgtgaacccagcccggaagggcctgtacgagggaaccggcagactgttcttcgagttttacagactgctgcacgacgcccggcctaaggaaggcgacgaccggcccttcttttggctgttcgagaatgtggtggccatgggagtcagcgacaagcgggatattagccggttcctggagagcaaccccgtgatgatcgatgccaaggaagtgagcgccgcccaccgggccagatacttctggggcaatctgcctggcatgaacagacccctggccagcaccgtgaacgacaagctggagctgcaggagtgcctggagcacggccggatcgccaagttcagcaaggtgagaaccatcaccacccgaagcaacagcatcaaacaaggcaaggaccagcactttcctgtgttcatgaacgagaaggaggacatcctgtggtgtaccgagatggagagagtgttcgggttcccagtccactacacagatgtcagcaacatgtctagactggccagacagagactgctgggaagaagctggtccgtccctgtgatcagacacctgttcgcccctctgaaggagtacttcgcctgcgtgagcagcggcaacagcaacgccaacagccggggccccagcttctctagcggcctggtgccactgtccctgagagggagccacatgggccccatggagatctacaaaaccgtgagcgcctggaagcggcagcctgtgcgcgtgctgagcctgtttcggaatatcgataaagtcctgaaaagcctgggattcctggagagcggctctggctccggcggtggcaccctgaagtacgtggaggatgtgacaaacgtggtcagacgggatgtggagaagtggggccccttcgatctggtgtacggcagcacccaacccctgggcagctcttgtgaccggtgccctggctggtacatgtttcagttccaccggatcctgcagtacgccctgccgagacaggagtcccagcggccattcttttggattttcatggacaacttgctgctgaccgaggatgaccaggaaactaccactcggttcctgcagaccgaagccgtgaccctgcaggacgtgagaggccgggactaccagaacgccatgcgggtgtggtccaacatccctggactgaaaagcaagcacgcacctctgacccctaaagaagaggagtacctgcaggcccaggtgcggagcagaagcaagctggacgcccctaaggtggatctgctggtgaagaattgcctcctgcccctgagagagtacttcaagtatttcagccagaatagtctgcccctgggcggcccaagcagcggcgcccctcctcccagcggcggcagcccagccggctccccaacctctaccgaggagggcacctctgagtccgccacccccgagagcggccctggcacctccaccgagcccagcgagggcagcgcacccggcagccctgccggcagccccacctccacagaggagggaaccagcaccgagcccagcgaaggcagcgccccaggcaccagcaccgagcctagtgagggcggctctggcggcggcagcgcccaggagattaaacggatcaacaagatcagaagaagacttgtgaaagacagcaacaccaagaaggccggcaagacaggccccatgaaaaccctgctggttagagtgatgacacccgatctgagagagcggctggaaaacctgagaaagaagcctgaaaatatcccccagcccatcagcaatacatctagagccaacctgaataagctgctgaccgattacaccgaaatgaagaaggcgatcctgcatgtgtactgggaagagttccagaaggaccctgtgggcctgatgagccgggtggcccagcctgccagcaagaagatcgatcagaacaagctgaaacctgagatggacgagaagggcaacctgaccaccgccggctttgcctgctctcagtgtggccagcccctgttcgtgtacaagctggagcaggtgtctgagaagggcaaggcttacaccaactacttcggacggtgcaatgtggccgagcacgaaaagctgatcctgctggcccagctgaagcccgagaaggatagcgacgaagccgtgacatatagcctgggaaagtttgggcagagggccctggatttctacagcattcatgtgaccaaggagtccacccaccccgtgaagcccctggcccagatcgccggaaacagatacgcctccggacctgtgggaaaggccctgagcgacgcatgtatgggcacaatcgcctccttcctgtctaagtaccaggacatcatcatcgaacaccagaaggtggtgaagggcaaccagaagagactggagagcctgcgggagctggccggcaaggaaaacctggaataccctagcgtgaccctgccacctcagcctcacaccaaggagggcgttgatgcctacaacgaagtgatcgcccgggtgcgaatgtgggtgaacctgaacctgtggcagaagctgaagctaagcagagatgatgccaagcctctgctgagactgaagggattcccttcctttcctctggtcgagagacaggccaacgaagtggactggtgggacatggtgtgtaacgtgaagaagctgatcaacgagaaaaaggaggatggcaaggtgttttggcagaatctggctggctacaagagacaggaagccctgagaccatacctgagcagcgaggaagatcggaagaagggaaagaaattcgctcggtaccagctgggcgacctgctgctgcacctggaaaagaagcacggcgaggactggggaaaggtgtacgacgaggcctgggagcggattgacaagaaagtggaaggcctgagcaagcacatcaagctggaagaggaacggagaagcgaggacgcccagagcaaggccgccctgaccgactggctgcgggctaaggccagcttcgtgatcgagggcctgaaggaggccgacaaggacgagttctgcagatgcgagctgaagctgcagaagtggtacggggacctgcggggaaagcccttcgccatcgaagccgagaacagcatcctggacatcagcggcttcagcaagcagtacaactgtgccttcatctggcagaaggacggcgtgaagaagctgaacctgtacctgatcatcaactacttcaagggcggcaagctgcggttcaagaagatcaaacctgaagccttcgaagccaacagattctacaccgtgatcaacaaaaagagcggcgagatcgtgcccatggaggtgaacttcaacttcgacgaccccaacctgatcatcctgcctctggcctttggcaagagacagggcagagaattcatctggaacgacctgctgtccctggaaaccggcagcctgaagctggccaacggaagagtgatcgagaagacactgtacaacagaagaacccggcaggatgagcctgccctgttcgtggccctgaccttcgagcggcgggaggtcctggactcctccaatatcaaaccaatgaacctgatcggcgtggcaagaggcgaaaacatccccgccgtgatcgccctgaccgaccccgagggctgcccactgagccggtttaaggatagcctgggaaacccaacccacatcctgagaatcggcgagagctataaggagaagcagcggaccatccaggccaagaaggaggtggagcagcggagagccggcggctacagccggaagtacgccagcaaagccaagaatctggcagacgatatggtgagaaacaccgctagagatctgctgtactacgccgtgacccaggatgccatgctgatcttcgccaacctgagccggggcttcggccggcagggcaagcggaccttcatggccgagagacagtacacacggatggaggactggctgaccgccaagctggcctacgagggcctgagcaagacctacctgtccaagacactggcccagtacacctccaagacatgcagcaactgtgggtttaccatcaccagcgccgactacgacagggtgctggagaagctgaagaagacagcaacaggctggatgaccacaattaacggcaaggagctgaaggtggagggccagattacctactacaacagatacaagagacagaacgtagtcaaggacctgtccgtcgagctggatagactgagcgaagaatctgtgaacaacgacatctcctcctggacaaagggcagaagcggagaagctctgagcctcctgaagaaaagattctcccatagacccgtgcaggagaagttcgtgtgcctgaactgcggcttcgagacacacgcagccgagcaagccgccctgaacatcgccagatcctggctgttcctgcggagccaggagtacaagaaataccagacaaacaagacaaccggcaacaccgataagagagccttcgtcgagacctggcagtccttttaccggaagaagcttaaggaggtgtggaaacctgccgtgcggtctggcggatctggcggaggctccacaagcttccaggagagcgtgaccttcgaggacgtggccgtgtacttcagcgagaacgagtggatcggcctggcccccgcccagagggtgctgtacagggacgtgatgctggagaactacggcgtggtggccagcctggccttccccttccccaagcccgccctgatcagccagctggagaggggcgaggccccctggtgcaaggccccccagggcgccgtggacggcgagtgccccaggggcgtgagcaccagccccaagaaaaagagaaaagtctaagctgccttctgcggggcttgccttctggccatgcccttcttctctcccttgcacctgtacctcttggtctttgaataaagcctgagtaggaaggctagcaaaaaaaaaaaaaaaaaaaaaaaaaaaaaaaaaaaaaaaaaaaaaaaaaaaaaaaaaaaaaaaaaaaaaaaaaaaaaaaa

SEQ ID NO: 7284 - RNA, 5797 nt, synthetic construct
  source 1..5797: mol_type = other RNA
aggaaataagagagaaaagaagagtaagaagaaatataagagccaccatggcccctaagaagaagcgtaaagtgagccggatggaacgcctcgtctacgaggtgcggcagaagtgcagaaacatcgaggacatctgcatctcctgcggatctctgaacgtgaccctggagcacccactgttcatcggcggcatgtgccagaactgtaaaaactgttttctggagtgtgcctatcaatacgacgatgacggctaccagagctactgcaccatctgttgcggcggaagagaggtgctgatgtgtggaaataacaactgctgccggtgcttctgcgtggaatgcgtggacctgctggtgggccccggcgccgcccaggccgctattaaggaagatccttggaactgctacatgtgcggccacaagggcacatacggcctgctgagacggagagaggactggcctagcagactgcagatgttcttcgccaataaccacgaccaggagttcgacccccctaaggtgtaccctcccgtccccgccgagaagagaaagcccatccgggtcctgagcctgttcgatggcatcgccaccggtctgctggtgctgaaggacctgggcatccaggtggataggtacattgcctccgaggtgtgcgaggactccatcaccgtgggaatggtgcgtcatcagggcaagatcatgtacgtgggcgacgtgcggagcgtgacacagaagcatatccaggagtggggccctttcgacctggtgatcggcggcagcccttgcaatgacctgagcatcgtgaacccagcccggaagggcctgtacgagggaaccggcagactgttcttcgagttttacagactgctgcacgacgcccggcctaaggaaggcgacgaccggcccttcttttggctgttcgagaatgtggtggccatgggagtcagcgacaagcgggatattagccggttcctggagagcaaccccgtgatgatcgatgccaaggaagtgagcgccgcccaccgggccagatacttctggggcaatctgcctggcatgaacagacccctggccagcaccgtgaacgacaagctggagctgcaggagtgcctggagcacggccggatcgccaagttcagcaaggtgagaaccatcaccacccgaagcaacagcatcaaacaaggcaaggaccagcactttcctgtgttcatgaacgagaaggaggacatcctgtggtgtaccgagatggagagagtgttcgggttcccagtccactacacagatgtcagcaacatgtctagactggccagacagagactgctgggaagaagctggtccgtccctgtgatcagacacctgttcgcccctctgaaggagtacttcgcctgcgtgagcagcggcaacagcaacgccaacagccggggccccagcttctctagcggcctggtgccactgtccctgagagggagccacatgggccccatggagatctacaaaaccgtgagcgcctggaagcggcagcctgtgcgcgtgctgagcctgtttcggaatatcgataaagtcctgaaaagcctgggattcctggagagcggctctggctccggcggtggcaccctgaagtacgtggaggatgtgacaaacgtggtcagacgggatgtggagaagtggggccccttcgatctggtgtacggcagcacccaacccctgggcagctcttgtgaccggtgccctggctggtacatgtttcagttccaccggatcctgcagtacgccctgccgagacaggagtcccagcggccattcttttggattttcatggacaacttgctgctgaccgaggatgaccaggaaactaccactcggttcctgcagaccgaagccgtgaccctgcaggacgtgagaggccgggactaccagaacgccatgcgggtgtggtccaacatccctggactgaaaagcaagcacgcacctctgacccctaaagaagaggagtacctgcaggcccaggtgcggagcagaagcaagctggacgcccctaaggtggatctgctggtgaagaattgcctcctgcccctgagagagtacttcaagtatttcagccagaatagtctgcccctgggcggcccaagcagcggcgcccctcctcccagcggcggcagcccagccggctccccaacctctaccgaggagggcacctctgagtccgccacccccgagagcggccctggcacctccaccgagcccagcgagggcagcgcacccggcagccctgccggcagccccacctccacagaggagggaaccagcaccgagcccagcgaaggcagcgccccaggcaccagcaccgagcctagtgagggcggctctggcggcggcagcgcccaggagattaaacggatcaacaagatcagaagaagacttgtgaaagacagcaacaccaagaaggccggcaagacaggccccatgaaaaccctgctggttagagtgatgacacccgatctgagagagcggctggaaaacctgagaaagaagcctgaaaatatcccccagcccatcagcaatacatctagagccaacctgaataagctgctgaccgattacaccgaaatgaagaaggcgatcctgcatgtgtactgggaagagttccagaaggaccctgtgggcctgatgagccgggtggcccagcctgccagcaagaagatcgatcagaacaagctgaaacctgagatggacgagaagggcaacctgaccaccgccggctttgcctgctctcagtgtggccagcccctgttcgtgtacaagctggagcaggtgtctgagaagggcaaggcttacaccaactacttcggacggtgcaatgtggccgagcacgaaaagctgatcctgctggcccagctgaagcccgagaaggatagcgacgaagccgtgacatatagcctgggaaagtttgggcagagggccctggatttctacagcattcatgtgaccaaggagtccacccaccccgtgaagcccctggcccagatcgccggaaacagatacgcctccggacctgtgggaaaggccctgagcgacgcatgtatgggcacaatcgcctccttcctgtctaagtaccaggacatcatcatcgaacaccagaaggtggtgaagggcaaccagaagagactggagagcctgcgggagctggccggcaaggaaaacctggaataccctagcgtgaccctgccacctcagcctcacaccaaggagggcgttgatgcctacaacgaagtgatcgcccgggtgcgaatgtgggtgaacctgaacctgtggcagaagctgaagctaagcagagatgatgccaagcctctgctgagactgaagggattcccttcctttcctctggtcgagagacaggccaacgaagtggactggtgggacatggtgtgtaacgtgaagaagctgatcaacgagaaaaaggaggatggcaaggtgttttggcagaatctggctggctacaagagacaggaagccctgagaccatacctgagcagcgaggaagatcggaagaagggaaagaaattcgctcggtaccagctgggcgacctgctgctgcacctggaaaagaagcacggcgaggactggggaaaggtgtacgacgaggcctgggagcggattgacaagaaagtggaaggcctgagcaagcacatcaagctggaagaggaacggagaagcgaggacgcccagagcaaggccgccctgaccgactggctgcgggctaaggccagcttcgtgatcgagggcctgaaggaggccgacaaggacgagttctgcagatgcgagctgaagctgcagaagtggtacggggacctgcggggaaagcccttcgccatcgaagccgagaacagcatcctggacatcagcggcttcagcaagcagtacaactgtgccttcatctggcagaaggacggcgtgaagaagctgaacctgtacctgatcatcaactacttcaagggcggcaagctgcggttcaagaagatcaaacctgaagccttcgaagccaacagattctacaccgtgatcaacaaaaagagcggcgagatcgtgcccatggaggtgaacttcaacttcgacgaccccaacctgatcatcctgcctctggcctttggcaagagacagggcagagaattcatctggaacgacctgctgtccctggaaaccggcagcctgaagctggccaacggaagagtgatcgagaagacactgtacaacagaagaacccggcaggatgagcctgccctgttcgtggccctgaccttcgagcggcgggaggtcctggactcctccaatatcaaaccaatgaacctgatcggcgtggcaagaggcgaaaacatccccgccgtgatcgccctgaccgaccccgagggctgcccactgagccggtttaaggatagcctgggaaacccaacccacatcctgagaatcggcgagagctataaggagaagcagcggaccatccaggccaagaaggaggtggagcagcggagagccggcggctacagccggaagtacgccagcaaagccaagaatctggcagacgatatggtgagaaacaccgctagagatctgctgtactacgccgtgacccaggatgccatgctgatcttcgccaacctgagccggggcttcggccggcagggcaagcggaccttcatggccgagagacagtacacacggatggaggactggctgaccgccaagctggcctacgagggcctgagcaagacctacctgtccaagacactggcccagtacacctccaagacatgcagcaactgtgggtttaccatcaccagcgccgactacgacagggtgctggagaagctgaagaagacagcaacaggctggatgaccacaattaacggcaaggagctgaaggtggagggccagattacctactacaacagatacaagagacagaacgtagtcaaggacctgtccgtcgagctggatagactgagcgaagaatctgtgaacaacgacatctcctcctggacaaagggcagaagcggagaagctctgagcctcctgaagaaaagattctcccatagacccgtgcaggagaagttcgtgtgcctgaactgcggcttcgagacacacgcagccgagcaagccgccctgaacatcgccagatcctggctgttcctgcggagccaggagtacaagaaataccagacaaacaagacaaccggcaacaccgataagagagccttcgtcgagacctggcagtccttttaccggaagaagcttaaggaggtgtggaaacctgccgtgcggtctggcggatctggcggaggctccacaagcaggcccagggccgtgaagttcgccgacgtggccgtgtacttcagccccgaggagtggggctgcctgaggcccgcccagagggccctgtacagggacgtgatgagggagacctacggccacctgggcgccctgggctgcgccggccccaagcccgccctgatcagctggctggagaggaacaccgacgagtgggagcccgccgccctggaccccagggagtgccccaggggcgtgaccgtgcagaccagccccaagaaaaagagaaaagtctaagctgccttctgcggggcttgccttctggccatgcccttcttctctcccttgcacctgtacctcttggtctttgaataaagcctgagtaggaaggctagcaaaaaaaaaaaaaaaaaaaaaaaaaaaaaaaaaaaaaaaaaaaaaaaaaaaaaaaaaaaaaaaaaaaaaaaaaaaaaaaa

SEQ ID NO: 7285 - RNA, 5797 nt, synthetic construct
  source 1..5797: mol_type = other RNA
aggaaataagagagaaaagaagagtaagaagaaatataagagccaccatggcccctaagaagaagcgtaaagtgagccggatggaacgcctcgtctacgaggtgcggcagaagtgcagaaacatcgaggacatctgcatctcctgcggatctctgaacgtgaccctggagcacccactgttcatcggcggcatgtgccagaactgtaaaaactgttttctggagtgtgcctatcaatacgacgatgacggctaccagagctactgcaccatctgttgcggcggaagagaggtgctgatgtgtggaaataacaactgctgccggtgcttctgcgtggaatgcgtggacctgctggtgggccccggcgccgcccaggccgctattaaggaagatccttggaactgctacatgtgcggccacaagggcacatacggcctgctgagacggagagaggactggcctagcagactgcagatgttcttcgccaataaccacgaccaggagttcgacccccctaaggtgtaccctcccgtccccgccgagaagagaaagcccatccgggtcctgagcctgttcgatggcatcgccaccggtctgctggtgctgaaggacctgggcatccaggtggataggtacattgcctccgaggtgtgcgaggactccatcaccgtgggaatggtgcgtcatcagggcaagatcatgtacgtgggcgacgtgcggagcgtgacacagaagcatatccaggagtggggccctttcgacctggtgatcggcggcagcccttgcaatgacctgagcatcgtgaacccagcccggaagggcctgtacgagggaaccggcagactgttcttcgagttttacagactgctgcacgacgcccggcctaaggaaggcgacgaccggcccttcttttggctgttcgagaatgtggtggccatgggagtcagcgacaagcgggatattagccggttcctggagagcaaccccgtgatgatcgatgccaaggaagtgagcgccgcccaccgggccagatacttctggggcaatctgcctggcatgaacagacccctggccagcaccgtgaacgacaagctggagctgcaggagtgcctggagcacggccggatcgccaagttcagcaaggtgagaaccatcaccacccgaagcaacagcatcaaacaaggcaaggaccagcactttcctgtgttcatgaacgagaaggaggacatcctgtggtgtaccgagatggagagagtgttcgggttcccagtccactacacagatgtcagcaacatgtctagactggccagacagagactgctgggaagaagctggtccgtccctgtgatcagacacctgttcgcccctctgaaggagtacttcgcctgcgtgagcagcggcaacagcaacgccaacagccggggccccagcttctctagcggcctggtgccactgtccctgagagggagccacatgggccccatggagatctacaaaaccgtgagcgcctggaagcggcagcctgtgcgcgtgctgagcctgtttcggaatatcgataaagtcctgaaaagcctgggattcctggagagcggctctggctccggcggtggcaccctgaagtacgtggaggatgtgacaaacgtggtcagacgggatgtggagaagtggggccccttcgatctggtgtacggcagcacccaacccctgggcagctcttgtgaccggtgccctggctggtacatgtttcagttccaccggatcctgcagtacgccctgccgagacaggagtcccagcggccattcttttggattttcatggacaacttgctgctgaccgaggatgaccaggaaactaccactcggttcctgcagaccgaagccgtgaccctgcaggacgtgagaggccgggactaccagaacgccatgcgggtgtggtccaacatccctggactgaaaagcaagcacgcacctctgacccctaaagaagaggagtacctgcaggcccaggtgcggagcagaagcaagctggacgcccctaaggtggatctgctggtgaagaattgcctcctgcccctgagagagtacttcaagtatttcagccagaatagtctgcccctgggcggcccaagcagcggcgcccctcctcccagcggcggcagcccagccggctccccaacctctaccgaggagggcacctctgagtccgccacccccgagagcggccctggcacctccaccgagcccagcgagggcagcgcacccggcagccctgccggcagccccacctccacagaggagggaaccagcaccgagcccagcgaaggcagcgccccaggcaccagcaccgagcctagtgagggcggctctggcggcggcagcgcccaggagattaaacggatcaacaagatcagaagaagacttgtgaaagacagcaacaccaagaaggccggcaagacaggccccatgaaaaccctgctggttagagtgatgacacccgatctgagagagcggctggaaaacctgagaaagaagcctgaaaatatcccccagcccatcagcaatacatctagagccaacctgaataagctgctgaccgattacaccgaaatgaagaaggcgatcctgcatgtgtactgggaagagttccagaaggaccctgtgggcctgatgagccgggtggcccagcctgccagcaagaagatcgatcagaacaagctgaaacctgagatggacgagaagggcaacctgaccaccgccggctttgcctgctctcagtgtggccagcccctgttcgtgtacaagctggagcaggtgtctgagaagggcaaggcttacaccaactacttcggacggtgcaatgtggccgagcacgaaaagctgatcctgctggcccagctgaagcccgagaaggatagcgacgaagccgtgacatatagcctgggaaagtttgggcagagggccctggatttctacagcattcatgtgaccaaggagtccacccaccccgtgaagcccctggcccagatcgccggaaacagatacgcctccggacctgtgggaaaggccctgagcgacgcatgtatgggcacaatcgcctccttcctgtctaagtaccaggacatcatcatcgaacaccagaaggtggtgaagggcaaccagaagagactggagagcctgcgggagctggccggcaaggaaaacctggaataccctagcgtgaccctgccacctcagcctcacaccaaggagggcgttgatgcctacaacgaagtgatcgcccgggtgcgaatgtgggtgaacctgaacctgtggcagaagctgaagctaagcagagatgatgccaagcctctgctgagactgaagggattcccttcctttcctctggtcgagagacaggccaacgaagtggactggtgggacatggtgtgtaacgtgaagaagctgatcaacgagaaaaaggaggatggcaaggtgttttggcagaatctggctggctacaagagacaggaagccctgagaccatacctgagcagcgaggaagatcggaagaagggaaagaaattcgctcggtaccagctgggcgacctgctgctgcacctggaaaagaagcacggcgaggactggggaaaggtgtacgacgaggcctgggagcggattgacaagaaagtggaaggcctgagcaagcacatcaagctggaagaggaacggagaagcgaggacgcccagagcaaggccgccctgaccgactggctgcgggctaaggccagcttcgtgatcgagggcctgaaggaggccgacaaggacgagttctgcagatgcgagctgaagctgcagaagtggtacggggacctgcggggaaagcccttcgccatcgaagccgagaacagcatcctggacatcagcggcttcagcaagcagtacaactgtgccttcatctggcagaaggacggcgtgaagaagctgaacctgtacctgatcatcaactacttcaagggcggcaagctgcggttcaagaagatcaaacctgaagccttcgaagccaacagattctacaccgtgatcaacaaaaagagcggcgagatcgtgcccatggaggtgaacttcaacttcgacgaccccaacctgatcatcctgcctctggcctttggcaagagacagggcagagaattcatctggaacgacctgctgtccctggaaaccggcagcctgaagctggccaacggaagagtgatcgagaagacactgtacaacagaagaacccggcaggatgagcctgccctgttcgtggccctgaccttcgagcggcgggaggtcctggactcctccaatatcaaaccaatgaacctgatcggcgtggcaagaggcgaaaacatccccgccgtgatcgccctgaccgaccccgagggctgcccactgagccggtttaaggatagcctgggaaacccaacccacatcctgagaatcggcgagagctataaggagaagcagcggaccatccaggccaagaaggaggtggagcagcggagagccggcggctacagccggaagtacgccagcaaagccaagaatctggcagacgatatggtgagaaacaccgctagagatctgctgtactacgccgtgacccaggatgccatgctgatcttcgccaacctgagccggggcttcggccggcagggcaagcggaccttcatggccgagagacagtacacacggatggaggactggctgaccgccaagctggcctacgagggcctgagcaagacctacctgtccaagacactggcccagtacacctccaagacatgcagcaactgtgggtttaccatcaccagcgccgactacgacagggtgctggagaagctgaagaagacagcaacaggctggatgaccacaattaacggcaaggagctgaaggtggagggccagattacctactacaacagatacaagagacagaacgtagtcaaggacctgtccgtcgagctggatagactgagcgaagaatctgtgaacaacgacatctcctcctggacaaagggcagaagcggagaagctctgagcctcctgaagaaaagattctcccatagacccgtgcaggagaagttcgtgtgcctgaactgcggcttcgagacacacgcagccgagcaagccgccctgaacatcgccagatcctggctgttcctgcggagccaggagtacaagaaataccagacaaacaagacaaccggcaacaccgataagagagccttcgtcgagacctggcagtccttttaccggaagaagcttaaggaggtgtggaaacctgccgtgcggtctggcggatctggcggaggctccacaagcctgcaggagcccgtgaccttcgccgacgtggccgtgctgttcacccccgaggagtggatgttcctggacagcgcccagaggagcctgtacagggacgtgatgctggagaactacaggaacctggccagcgtgggcgaccagctgggcaagcccagcatgctgagcctgagcgagcccggcgaggagctgtgggcccccgagaggaggaccttccccggcaccaggcccgagccccagcaccagaccagccccaagaaaaagagaaaagtctaagctgccttctgcggggcttgccttctggccatgcccttcttctctcccttgcacctgtacctcttggtctttgaataaagcctgagtaggaaggctagcaaaaaaaaaaaaaaaaaaaaaaaaaaaaaaaaaaaaaaaaaaaaaaaaaaaaaaaaaaaaaaaaaaaaaaaaaaaaaaaa

SEQ ID NO: 7286 - RNA, 5797 nt, synthetic construct
  source 1..5797: mol_type = other RNA
aggaaataagagagaaaagaagagtaagaagaaatataagagccaccatggcccctaagaagaagcgtaaagtgagccggatggaacgcctcgtctacgaggtgcggcagaagtgcagaaacatcgaggacatctgcatctcctgcggatctctgaacgtgaccctggagcacccactgttcatcggcggcatgtgccagaactgtaaaaactgttttctggagtgtgcctatcaatacgacgatgacggctaccagagctactgcaccatctgttgcggcggaagagaggtgctgatgtgtggaaataacaactgctgccggtgcttctgcgtggaatgcgtggacctgctggtgggccccggcgccgcccaggccgctattaaggaagatccttggaactgctacatgtgcggccacaagggcacatacggcctgctgagacggagagaggactggcctagcagactgcagatgttcttcgccaataaccacgaccaggagttcgacccccctaaggtgtaccctcccgtccccgccgagaagagaaagcccatccgggtcctgagcctgttcgatggcatcgccaccggtctgctggtgctgaaggacctgggcatccaggtggataggtacattgcctccgaggtgtgcgaggactccatcaccgtgggaatggtgcgtcatcagggcaagatcatgtacgtgggcgacgtgcggagcgtgacacagaagcatatccaggagtggggccctttcgacctggtgatcggcggcagcccttgcaatgacctgagcatcgtgaacccagcccggaagggcctgtacgagggaaccggcagactgttcttcgagttttacagactgctgcacgacgcccggcctaaggaaggcgacgaccggcccttcttttggctgttcgagaatgtggtggccatgggagtcagcgacaagcgggatattagccggttcctggagagcaaccccgtgatgatcgatgccaaggaagtgagcgccgcccaccgggccagatacttctggggcaatctgcctggcatgaacagacccctggccagcaccgtgaacgacaagctggagctgcaggagtgcctggagcacggccggatcgccaagttcagcaaggtgagaaccatcaccacccgaagcaacagcatcaaacaaggcaaggaccagcactttcctgtgttcatgaacgagaaggaggacatcctgtggtgtaccgagatggagagagtgttcgggttcccagtccactacacagatgtcagcaacatgtctagactggccagacagagactgctgggaagaagctggtccgtccctgtgatcagacacctgttcgcccctctgaaggagtacttcgcctgcgtgagcagcggcaacagcaacgccaacagccggggccccagcttctctagcggcctggtgccactgtccctgagagggagccacatgggccccatggagatctacaaaaccgtgagcgcctggaagcggcagcctgtgcgcgtgctgagcctgtttcggaatatcgataaagtcctgaaaagcctgggattcctggagagcggctctggctccggcggtggcaccctgaagtacgtggaggatgtgacaaacgtggtcagacgggatgtggagaagtggggccccttcgatctggtgtacggcagcacccaacccctgggcagctcttgtgaccggtgccctggctggtacatgtttcagttccaccggatcctgcagtacgccctgccgagacaggagtcccagcggccattcttttggattttcatggacaacttgctgctgaccgaggatgaccaggaaactaccactcggttcctgcagaccgaagccgtgaccctgcaggacgtgagaggccgggactaccagaacgccatgcgggtgtggtccaacatccctggactgaaaagcaagcacgcacctctgacccctaaagaagaggagtacctgcaggcccaggtgcggagcagaagcaagctggacgcccctaaggtggatctgctggtgaagaattgcctcctgcccctgagagagtacttcaagtatttcagccagaatagtctgcccctgggcggcccaagcagcggcgcccctcctcccagcggcggcagcccagccggctccccaacctctaccgaggagggcacctctgagtccgccacccccgagagcggccctggcacctccaccgagcccagcgagggcagcgcacccggcagccctgccggcagccccacctccacagaggagggaaccagcaccgagcccagcgaaggcagcgccccaggcaccagcaccgagcctagtgagggcggctctggcggcggcagcgcccaggagattaaacggatcaacaagatcagaagaagacttgtgaaagacagcaacaccaagaaggccggcaagacaggccccatgaaaaccctgctggttagagtgatgacacccgatctgagagagcggctggaaaacctgagaaagaagcctgaaaatatcccccagcccatcagcaatacatctagagccaacctgaataagctgctgaccgattacaccgaaatgaagaaggcgatcctgcatgtgtactgggaagagttccagaaggaccctgtgggcctgatgagccgggtggcccagcctgccagcaagaagatcgatcagaacaagctgaaacctgagatggacgagaagggcaacctgaccaccgccggctttgcctgctctcagtgtggccagcccctgttcgtgtacaagctggagcaggtgtctgagaagggcaaggcttacaccaactacttcggacggtgcaatgtggccgagcacgaaaagctgatcctgctggcccagctgaagcccgagaaggatagcgacgaagccgtgacatatagcctgggaaagtttgggcagagggccctggatttctacagcattcatgtgaccaaggagtccacccaccccgtgaagcccctggcccagatcgccggaaacagatacgcctccggacctgtgggaaaggccctgagcgacgcatgtatgggcacaatcgcctccttcctgtctaagtaccaggacatcatcatcgaacaccagaaggtggtgaagggcaaccagaagagactggagagcctgcgggagctggccggcaaggaaaacctggaataccctagcgtgaccctgccacctcagcctcacaccaaggagggcgttgatgcctacaacgaagtgatcgcccgggtgcgaatgtgggtgaacctgaacctgtggcagaagctgaagctaagcagagatgatgccaagcctctgctgagactgaagggattcccttcctttcctctggtcgagagacaggccaacgaagtggactggtgggacatggtgtgtaacgtgaagaagctgatcaacgagaaaaaggaggatggcaaggtgttttggcagaatctggctggctacaagagacaggaagccctgagaccatacctgagcagcgaggaagatcggaagaagggaaagaaattcgctcggtaccagctgggcgacctgctgctgcacctggaaaagaagcacggcgaggactggggaaaggtgtacgacgaggcctgggagcggattgacaagaaagtggaaggcctgagcaagcacatcaagctggaagaggaacggagaagcgaggacgcccagagcaaggccgccctgaccgactggctgcgggctaaggccagcttcgtgatcgagggcctgaaggaggccgacaaggacgagttctgcagatgcgagctgaagctgcagaagtggtacggggacctgcggggaaagcccttcgccatcgaagccgagaacagcatcctggacatcagcggcttcagcaagcagtacaactgtgccttcatctggcagaaggacggcgtgaagaagctgaacctgtacctgatcatcaactacttcaagggcggcaagctgcggttcaagaagatcaaacctgaagccttcgaagccaacagattctacaccgtgatcaacaaaaagagcggcgagatcgtgcccatggaggtgaacttcaacttcgacgaccccaacctgatcatcctgcctctggcctttggcaagagacagggcagagaattcatctggaacgacctgctgtccctggaaaccggcagcctgaagctggccaacggaagagtgatcgagaagacactgtacaacagaagaacccggcaggatgagcctgccctgttcgtggccctgaccttcgagcggcgggaggtcctggactcctccaatatcaaaccaatgaacctgatcggcgtggcaagaggcgaaaacatccccgccgtgatcgccctgaccgaccccgagggctgcccactgagccggtttaaggatagcctgggaaacccaacccacatcctgagaatcggcgagagctataaggagaagcagcggaccatccaggccaagaaggaggtggagcagcggagagccggcggctacagccggaagtacgccagcaaagccaagaatctggcagacgatatggtgagaaacaccgctagagatctgctgtactacgccgtgacccaggatgccatgctgatcttcgccaacctgagccggggcttcggccggcagggcaagcggaccttcatggccgagagacagtacacacggatggaggactggctgaccgccaagctggcctacgagggcctgagcaagacctacctgtccaagacactggcccagtacacctccaagacatgcagcaactgtgggtttaccatcaccagcgccgactacgacagggtgctggagaagctgaagaagacagcaacaggctggatgaccacaattaacggcaaggagctgaaggtggagggccagattacctactacaacagatacaagagacagaacgtagtcaaggacctgtccgtcgagctggatagactgagcgaagaatctgtgaacaacgacatctcctcctggacaaagggcagaagcggagaagctctgagcctcctgaagaaaagattctcccatagacccgtgcaggagaagttcgtgtgcctgaactgcggcttcgagacacacgcagccgagcaagccgccctgaacatcgccagatcctggctgttcctgcggagccaggagtacaagaaataccagacaaacaagacaaccggcaacaccgataagagagccttcgtcgagacctggcagtccttttaccggaagaagcttaaggaggtgtggaaacctgccgtgcggtctggcggatctggcggaggctccacaagcatcagggagttcggcggcatgggcgccggcatcgccaacatctggagcttccagggcagcgtgaccttcagggacgtggccatcgacttcagccaggaggagtggaagtggctgcagcccgcccagagggacctgtacaggtgcgtgatgctggagaactacggccacctggtgagcctgggcctgagcatcagcaagcccgacgtggtgagcctgctggagcagggcaaggagccctggctgaccagccccaagaaaaagagaaaagtctaagctgccttctgcggggcttgccttctggccatgcccttcttctctcccttgcacctgtacctcttggtctttgaataaagcctgagtaggaaggctagcaaaaaaaaaaaaaaaaaaaaaaaaaaaaaaaaaaaaaaaaaaaaaaaaaaaaaaaaaaaaaaaaaaaaaaaaaaaaaaaa

SEQ ID NO: 7287 - RNA, 5797 nt, synthetic construct
  source 1..5797: mol_type = other RNA
aggaaataagagagaaaagaagagtaagaagaaatataagagccaccatggcccctaagaagaagcgtaaagtgagccggatggaacgcctcgtctacgaggtgcggcagaagtgcagaaacatcgaggacatctgcatctcctgcggatctctgaacgtgaccctggagcacccactgttcatcggcggcatgtgccagaactgtaaaaactgttttctggagtgtgcctatcaatacgacgatgacggctaccagagctactgcaccatctgttgcggcggaagagaggtgctgatgtgtggaaataacaactgctgccggtgcttctgcgtggaatgcgtggacctgctggtgggccccggcgccgcccaggccgctattaaggaagatccttggaactgctacatgtgcggccacaagggcacatacggcctgctgagacggagagaggactggcctagcagactgcagatgttcttcgccaataaccacgaccaggagttcgacccccctaaggtgtaccctcccgtccccgccgagaagagaaagcccatccgggtcctgagcctgttcgatggcatcgccaccggtctgctggtgctgaaggacctgggcatccaggtggataggtacattgcctccgaggtgtgcgaggactccatcaccgtgggaatggtgcgtcatcagggcaagatcatgtacgtgggcgacgtgcggagcgtgacacagaagcatatccaggagtggggccctttcgacctggtgatcggcggcagcccttgcaatgacctgagcatcgtgaacccagcccggaagggcctgtacgagggaaccggcagactgttcttcgagttttacagactgctgcacgacgcccggcctaaggaaggcgacgaccggcccttcttttggctgttcgagaatgtggtggccatgggagtcagcgacaagcgggatattagccggttcctggagagcaaccccgtgatgatcgatgccaaggaagtgagcgccgcccaccgggccagatacttctggggcaatctgcctggcatgaacagacccctggccagcaccgtgaacgacaagctggagctgcaggagtgcctggagcacggccggatcgccaagttcagcaaggtgagaaccatcaccacccgaagcaacagcatcaaacaaggcaaggaccagcactttcctgtgttcatgaacgagaaggaggacatcctgtggtgtaccgagatggagagagtgttcgggttcccagtccactacacagatgtcagcaacatgtctagactggccagacagagactgctgggaagaagctggtccgtccctgtgatcagacacctgttcgcccctctgaaggagtacttcgcctgcgtgagcagcggcaacagcaacgccaacagccggggccccagcttctctagcggcctggtgccactgtccctgagagggagccacatgggccccatggagatctacaaaaccgtgagcgcctggaagcggcagcctgtgcgcgtgctgagcctgtttcggaatatcgataaagtcctgaaaagcctgggattcctggagagcggctctggctccggcggtggcaccctgaagtacgtggaggatgtgacaaacgtggtcagacgggatgtggagaagtggggccccttcgatctggtgtacggcagcacccaacccctgggcagctcttgtgaccggtgccctggctggtacatgtttcagttccaccggatcctgcagtacgccctgccgagacaggagtcccagcggccattcttttggattttcatggacaacttgctgctgaccgaggatgaccaggaaactaccactcggttcctgcagaccgaagccgtgaccctgcaggacgtgagaggccgggactaccagaacgccatgcgggtgtggtccaacatccctggactgaaaagcaagcacgcacctctgacccctaaagaagaggagtacctgcaggcccaggtgcggagcagaagcaagctggacgcccctaaggtggatctgctggtgaagaattgcctcctgcccctgagagagtacttcaagtatttcagccagaatagtctgcccctgggcggcccaagcagcggcgcccctcctcccagcggcggcagcccagccggctccccaacctctaccgaggagggcacctctgagtccgccacccccgagagcggccctggcacctccaccgagcccagcgagggcagcgcacccggcagccctgccggcagccccacctccacagaggagggaaccagcaccgagcccagcgaaggcagcgccccaggcaccagcaccgagcctagtgagggcggctctggcggcggcagcgcccaggagattaaacggatcaacaagatcagaagaagacttgtgaaagacagcaacaccaagaaggccggcaagacaggccccatgaaaaccctgctggttagagtgatgacacccgatctgagagagcggctggaaaacctgagaaagaagcctgaaaatatcccccagcccatcagcaatacatctagagccaacctgaataagctgctgaccgattacaccgaaatgaagaaggcgatcctgcatgtgtactgggaagagttccagaaggaccctgtgggcctgatgagccgggtggcccagcctgccagcaagaagatcgatcagaacaagctgaaacctgagatggacgagaagggcaacctgaccaccgccggctttgcctgctctcagtgtggccagcccctgttcgtgtacaagctggagcaggtgtctgagaagggcaaggcttacaccaactacttcggacggtgcaatgtggccgagcacgaaaagctgatcctgctggcccagctgaagcccgagaaggatagcgacgaagccgtgacatatagcctgggaaagtttgggcagagggccctggatttctacagcattcatgtgaccaaggagtccacccaccccgtgaagcccctggcccagatcgccggaaacagatacgcctccggacctgtgggaaaggccctgagcgacgcatgtatgggcacaatcgcctccttcctgtctaagtaccaggacatcatcatcgaacaccagaaggtggtgaagggcaaccagaagagactggagagcctgcgggagctggccggcaaggaaaacctggaataccctagcgtgaccctgccacctcagcctcacaccaaggagggcgttgatgcctacaacgaagtgatcgcccgggtgcgaatgtgggtgaacctgaacctgtggcagaagctgaagctaagcagagatgatgccaagcctctgctgagactgaagggattcccttcctttcctctggtcgagagacaggccaacgaagtggactggtgggacatggtgtgtaacgtgaagaagctgatcaacgagaaaaaggaggatggcaaggtgttttggcagaatctggctggctacaagagacaggaagccctgagaccatacctgagcagcgaggaagatcggaagaagggaaagaaattcgctcggtaccagctgggcgacctgctgctgcacctggaaaagaagcacggcgaggactggggaaaggtgtacgacgaggcctgggagcggattgacaagaaagtggaaggcctgagcaagcacatcaagctggaagaggaacggagaagcgaggacgcccagagcaaggccgccctgaccgactggctgcgggctaaggccagcttcgtgatcgagggcctgaaggaggccgacaaggacgagttctgcagatgcgagctgaagctgcagaagtggtacggggacctgcggggaaagcccttcgccatcgaagccgagaacagcatcctggacatcagcggcttcagcaagcagtacaactgtgccttcatctggcagaaggacggcgtgaagaagctgaacctgtacctgatcatcaactacttcaagggcggcaagctgcggttcaagaagatcaaacctgaagccttcgaagccaacagattctacaccgtgatcaacaaaaagagcggcgagatcgtgcccatggaggtgaacttcaacttcgacgaccccaacctgatcatcctgcctctggcctttggcaagagacagggcagagaattcatctggaacgacctgctgtccctggaaaccggcagcctgaagctggccaacggaagagtgatcgagaagacactgtacaacagaagaacccggcaggatgagcctgccctgttcgtggccctgaccttcgagcggcgggaggtcctggactcctccaatatcaaaccaatgaacctgatcggcgtggcaagaggcgaaaacatccccgccgtgatcgccctgaccgaccccgagggctgcccactgagccggtttaaggatagcctgggaaacccaacccacatcctgagaatcggcgagagctataaggagaagcagcggaccatccaggccaagaaggaggtggagcagcggagagccggcggctacagccggaagtacgccagcaaagccaagaatctggcagacgatatggtgagaaacaccgctagagatctgctgtactacgccgtgacccaggatgccatgctgatcttcgccaacctgagccggggcttcggccggcagggcaagcggaccttcatggccgagagacagtacacacggatggaggactggctgaccgccaagctggcctacgagggcctgagcaagacctacctgtccaagacactggcccagtacacctccaagacatgcagcaactgtgggtttaccatcaccagcgccgactacgacagggtgctggagaagctgaagaagacagcaacaggctggatgaccacaattaacggcaaggagctgaaggtggagggccagattacctactacaacagatacaagagacagaacgtagtcaaggacctgtccgtcgagctggatagactgagcgaagaatctgtgaacaacgacatctcctcctggacaaagggcagaagcggagaagctctgagcctcctgaagaaaagattctcccatagacccgtgcaggagaagttcgtgtgcctgaactgcggcttcgagacacacgcagccgagcaagccgccctgaacatcgccagatcctggctgttcctgcggagccaggagtacaagaaataccagacaaacaagacaaccggcaacaccgataagagagccttcgtcgagacctggcagtccttttaccggaagaagcttaaggaggtgtggaaacctgccgtgcggtctggcggatctggcggaggctccacaagcacccagggcctggtgaccttcagggacgtggccatcgagttcagccaggaggagtggaagtgcctggagcccgcccagaaggacctgtacaaggacgtgaccctggagaacttcagcaacctggtgagcctgggcctgagcctgcccaagcccgacgtgatcagcctgctggagcagggcaaggagccctggatggtgatcaacgacatgaccggcccctggtgccccgacctggagagcaggaccagccccaagaaaaagagaaaagtctaagctgccttctgcggggcttgccttctggccatgcccttcttctctcccttgcacctgtacctcttggtctttgaataaagcctgagtaggaaggctagcaaaaaaaaaaaaaaaaaaaaaaaaaaaaaaaaaaaaaaaaaaaaaaaaaaaaaaaaaaaaaaaaaaaaaaaaaaaaaaaa

SEQ ID NO: 7288 - RNA, 5797 nt, synthetic construct
  source 1..5797: mol_type = other RNA
aggaaataagagagaaaagaagagtaagaagaaatataagagccaccatggcccctaagaagaagcgtaaagtgagccggatggaacgcctcgtctacgaggtgcggcagaagtgcagaaacatcgaggacatctgcatctcctgcggatctctgaacgtgaccctggagcacccactgttcatcggcggcatgtgccagaactgtaaaaactgttttctggagtgtgcctatcaatacgacgatgacggctaccagagctactgcaccatctgttgcggcggaagagaggtgctgatgtgtggaaataacaactgctgccggtgcttctgcgtggaatgcgtggacctgctggtgggccccggcgccgcccaggccgctattaaggaagatccttggaactgctacatgtgcggccacaagggcacatacggcctgctgagacggagagaggactggcctagcagactgcagatgttcttcgccaataaccacgaccaggagttcgacccccctaaggtgtaccctcccgtccccgccgagaagagaaagcccatccgggtcctgagcctgttcgatggcatcgccaccggtctgctggtgctgaaggacctgggcatccaggtggataggtacattgcctccgaggtgtgcgaggactccatcaccgtgggaatggtgcgtcatcagggcaagatcatgtacgtgggcgacgtgcggagcgtgacacagaagcatatccaggagtggggccctttcgacctggtgatcggcggcagcccttgcaatgacctgagcatcgtgaacccagcccggaagggcctgtacgagggaaccggcagactgttcttcgagttttacagactgctgcacgacgcccggcctaaggaaggcgacgaccggcccttcttttggctgttcgagaatgtggtggccatgggagtcagcgacaagcgggatattagccggttcctggagagcaaccccgtgatgatcgatgccaaggaagtgagcgccgcccaccgggccagatacttctggggcaatctgcctggcatgaacagacccctggccagcaccgtgaacgacaagctggagctgcaggagtgcctggagcacggccggatcgccaagttcagcaaggtgagaaccatcaccacccgaagcaacagcatcaaacaaggcaaggaccagcactttcctgtgttcatgaacgagaaggaggacatcctgtggtgtaccgagatggagagagtgttcgggttcccagtccactacacagatgtcagcaacatgtctagactggccagacagagactgctgggaagaagctggtccgtccctgtgatcagacacctgttcgcccctctgaaggagtacttcgcctgcgtgagcagcggcaacagcaacgccaacagccggggccccagcttctctagcggcctggtgccactgtccctgagagggagccacatgggccccatggagatctacaaaaccgtgagcgcctggaagcggcagcctgtgcgcgtgctgagcctgtttcggaatatcgataaagtcctgaaaagcctgggattcctggagagcggctctggctccggcggtggcaccctgaagtacgtggaggatgtgacaaacgtggtcagacgggatgtggagaagtggggccccttcgatctggtgtacggcagcacccaacccctgggcagctcttgtgaccggtgccctggctggtacatgtttcagttccaccggatcctgcagtacgccctgccgagacaggagtcccagcggccattcttttggattttcatggacaacttgctgctgaccgaggatgaccaggaaactaccactcggttcctgcagaccgaagccgtgaccctgcaggacgtgagaggccgggactaccagaacgccatgcgggtgtggtccaacatccctggactgaaaagcaagcacgcacctctgacccctaaagaagaggagtacctgcaggcccaggtgcggagcagaagcaagctggacgcccctaaggtggatctgctggtgaagaattgcctcctgcccctgagagagtacttcaagtatttcagccagaatagtctgcccctgggcggcccaagcagcggcgcccctcctcccagcggcggcagcccagccggctccccaacctctaccgaggagggcacctctgagtccgccacccccgagagcggccctggcacctccaccgagcccagcgagggcagcgcacccggcagccctgccggcagccccacctccacagaggagggaaccagcaccgagcccagcgaaggcagcgccccaggcaccagcaccgagcctagtgagggcggctctggcggcggcagcgcccaggagattaaacggatcaacaagatcagaagaagacttgtgaaagacagcaacaccaagaaggccggcaagacaggccccatgaaaaccctgctggttagagtgatgacacccgatctgagagagcggctggaaaacctgagaaagaagcctgaaaatatcccccagcccatcagcaatacatctagagccaacctgaataagctgctgaccgattacaccgaaatgaagaaggcgatcctgcatgtgtactgggaagagttccagaaggaccctgtgggcctgatgagccgggtggcccagcctgccagcaagaagatcgatcagaacaagctgaaacctgagatggacgagaagggcaacctgaccaccgccggctttgcctgctctcagtgtggccagcccctgttcgtgtacaagctggagcaggtgtctgagaagggcaaggcttacaccaactacttcggacggtgcaatgtggccgagcacgaaaagctgatcctgctggcccagctgaagcccgagaaggatagcgacgaagccgtgacatatagcctgggaaagtttgggcagagggccctggatttctacagcattcatgtgaccaaggagtccacccaccccgtgaagcccctggcccagatcgccggaaacagatacgcctccggacctgtgggaaaggccctgagcgacgcatgtatgggcacaatcgcctccttcctgtctaagtaccaggacatcatcatcgaacaccagaaggtggtgaagggcaaccagaagagactggagagcctgcgggagctggccggcaaggaaaacctggaataccctagcgtgaccctgccacctcagcctcacaccaaggagggcgttgatgcctacaacgaagtgatcgcccgggtgcgaatgtgggtgaacctgaacctgtggcagaagctgaagctaagcagagatgatgccaagcctctgctgagactgaagggattcccttcctttcctctggtcgagagacaggccaacgaagtggactggtgggacatggtgtgtaacgtgaagaagctgatcaacgagaaaaaggaggatggcaaggtgttttggcagaatctggctggctacaagagacaggaagccctgagaccatacctgagcagcgaggaagatcggaagaagggaaagaaattcgctcggtaccagctgggcgacctgctgctgcacctggaaaagaagcacggcgaggactggggaaaggtgtacgacgaggcctgggagcggattgacaagaaagtggaaggcctgagcaagcacatcaagctggaagaggaacggagaagcgaggacgcccagagcaaggccgccctgaccgactggctgcgggctaaggccagcttcgtgatcgagggcctgaaggaggccgacaaggacgagttctgcagatgcgagctgaagctgcagaagtggtacggggacctgcggggaaagcccttcgccatcgaagccgagaacagcatcctggacatcagcggcttcagcaagcagtacaactgtgccttcatctggcagaaggacggcgtgaagaagctgaacctgtacctgatcatcaactacttcaagggcggcaagctgcggttcaagaagatcaaacctgaagccttcgaagccaacagattctacaccgtgatcaacaaaaagagcggcgagatcgtgcccatggaggtgaacttcaacttcgacgaccccaacctgatcatcctgcctctggcctttggcaagagacagggcagagaattcatctggaacgacctgctgtccctggaaaccggcagcctgaagctggccaacggaagagtgatcgagaagacactgtacaacagaagaacccggcaggatgagcctgccctgttcgtggccctgaccttcgagcggcgggaggtcctggactcctccaatatcaaaccaatgaacctgatcggcgtggcaagaggcgaaaacatccccgccgtgatcgccctgaccgaccccgagggctgcccactgagccggtttaaggatagcctgggaaacccaacccacatcctgagaatcggcgagagctataaggagaagcagcggaccatccaggccaagaaggaggtggagcagcggagagccggcggctacagccggaagtacgccagcaaagccaagaatctggcagacgatatggtgagaaacaccgctagagatctgctgtactacgccgtgacccaggatgccatgctgatcttcgccaacctgagccggggcttcggccggcagggcaagcggaccttcatggccgagagacagtacacacggatggaggactggctgaccgccaagctggcctacgagggcctgagcaagacctacctgtccaagacactggcccagtacacctccaagacatgcagcaactgtgggtttaccatcaccagcgccgactacgacagggtgctggagaagctgaagaagacagcaacaggctggatgaccacaattaacggcaaggagctgaaggtggagggccagattacctactacaacagatacaagagacagaacgtagtcaaggacctgtccgtcgagctggatagactgagcgaagaatctgtgaacaacgacatctcctcctggacaaagggcagaagcggagaagctctgagcctcctgaagaaaagattctcccatagacccgtgcaggagaagttcgtgtgcctgaactgcggcttcgagacacacgcagccgagcaagccgccctgaacatcgccagatcctggctgttcctgcggagccaggagtacaagaaataccagacaaacaagacaaccggcaacaccgataagagagccttcgtcgagacctggcagtccttttaccggaagaagcttaaggaggtgtggaaacctgccgtgcggtctggcggatctggcggaggctccacaagcggcaggagccccaggaagaccgaccagttctgcaacagcaagaacatggtgcccggcagcgtgaccttcagggacgtggccatcgacttcagccaggaggagtgggagtgcctgcagcccgcccagaggaccctgtacagggacgtgatgctggagaactacagccacctgatcagcctgggcagcagcatcagcaagcccgacgtgatcaccctgctggagcaggagaaggagccctggatgaccagccccaagaaaaagagaaaagtctaagctgccttctgcggggcttgccttctggccatgcccttcttctctcccttgcacctgtacctcttggtctttgaataaagcctgagtaggaaggctagcaaaaaaaaaaaaaaaaaaaaaaaaaaaaaaaaaaaaaaaaaaaaaaaaaaaaaaaaaaaaaaaaaaaaaaaaaaaaaaaa

SEQ ID NO: 7289 - RNA, 5797 nt, synthetic construct
  source 1..5797: mol_type = other RNA
aggaaataagagagaaaagaagagtaagaagaaatataagagccaccatggcccctaagaagaagcgtaaagtgagccggatggaacgcctcgtctacgaggtgcggcagaagtgcagaaacatcgaggacatctgcatctcctgcggatctctgaacgtgaccctggagcacccactgttcatcggcggcatgtgccagaactgtaaaaactgttttctggagtgtgcctatcaatacgacgatgacggctaccagagctactgcaccatctgttgcggcggaagagaggtgctgatgtgtggaaataacaactgctgccggtgcttctgcgtggaatgcgtggacctgctggtgggccccggcgccgcccaggccgctattaaggaagatccttggaactgctacatgtgcggccacaagggcacatacggcctgctgagacggagagaggactggcctagcagactgcagatgttcttcgccaataaccacgaccaggagttcgacccccctaaggtgtaccctcccgtccccgccgagaagagaaagcccatccgggtcctgagcctgttcgatggcatcgccaccggtctgctggtgctgaaggacctgggcatccaggtggataggtacattgcctccgaggtgtgcgaggactccatcaccgtgggaatggtgcgtcatcagggcaagatcatgtacgtgggcgacgtgcggagcgtgacacagaagcatatccaggagtggggccctttcgacctggtgatcggcggcagcccttgcaatgacctgagcatcgtgaacccagcccggaagggcctgtacgagggaaccggcagactgttcttcgagttttacagactgctgcacgacgcccggcctaaggaaggcgacgaccggcccttcttttggctgttcgagaatgtggtggccatgggagtcagcgacaagcgggatattagccggttcctggagagcaaccccgtgatgatcgatgccaaggaagtgagcgccgcccaccgggccagatacttctggggcaatctgcctggcatgaacagacccctggccagcaccgtgaacgacaagctggagctgcaggagtgcctggagcacggccggatcgccaagttcagcaaggtgagaaccatcaccacccgaagcaacagcatcaaacaaggcaaggaccagcactttcctgtgttcatgaacgagaaggaggacatcctgtggtgtaccgagatggagagagtgttcgggttcccagtccactacacagatgtcagcaacatgtctagactggccagacagagactgctgggaagaagctggtccgtccctgtgatcagacacctgttcgcccctctgaaggagtacttcgcctgcgtgagcagcggcaacagcaacgccaacagccggggccccagcttctctagcggcctggtgccactgtccctgagagggagccacatgggccccatggagatctacaaaaccgtgagcgcctggaagcggcagcctgtgcgcgtgctgagcctgtttcggaatatcgataaagtcctgaaaagcctgggattcctggagagcggctctggctccggcggtggcaccctgaagtacgtggaggatgtgacaaacgtggtcagacgggatgtggagaagtggggccccttcgatctggtgtacggcagcacccaacccctgggcagctcttgtgaccggtgccctggctggtacatgtttcagttccaccggatcctgcagtacgccctgccgagacaggagtcccagcggccattcttttggattttcatggacaacttgctgctgaccgaggatgaccaggaaactaccactcggttcctgcagaccgaagccgtgaccctgcaggacgtgagaggccgggactaccagaacgccatgcgggtgtggtccaacatccctggactgaaaagcaagcacgcacctctgacccctaaagaagaggagtacctgcaggcccaggtgcggagcagaagcaagctggacgcccctaaggtggatctgctggtgaagaattgcctcctgcccctgagagagtacttcaagtatttcagccagaatagtctgcccctgggcggcccaagcagcggcgcccctcctcccagcggcggcagcccagccggctccccaacctctaccgaggagggcacctctgagtccgccacccccgagagcggccctggcacctccaccgagcccagcgagggcagcgcacccggcagccctgccggcagccccacctccacagaggagggaaccagcaccgagcccagcgaaggcagcgccccaggcaccagcaccgagcctagtgagggcggctctggcggcggcagcgcccaggagattaaacggatcaacaagatcagaagaagacttgtgaaagacagcaacaccaagaaggccggcaagacaggccccatgaaaaccctgctggttagagtgatgacacccgatctgagagagcggctggaaaacctgagaaagaagcctgaaaatatcccccagcccatcagcaatacatctagagccaacctgaataagctgctgaccgattacaccgaaatgaagaaggcgatcctgcatgtgtactgggaagagttccagaaggaccctgtgggcctgatgagccgggtggcccagcctgccagcaagaagatcgatcagaacaagctgaaacctgagatggacgagaagggcaacctgaccaccgccggctttgcctgctctcagtgtggccagcccctgttcgtgtacaagctggagcaggtgtctgagaagggcaaggcttacaccaactacttcggacggtgcaatgtggccgagcacgaaaagctgatcctgctggcccagctgaagcccgagaaggatagcgacgaagccgtgacatatagcctgggaaagtttgggcagagggccctggatttctacagcattcatgtgaccaaggagtccacccaccccgtgaagcccctggcccagatcgccggaaacagatacgcctccggacctgtgggaaaggccctgagcgacgcatgtatgggcacaatcgcctccttcctgtctaagtaccaggacatcatcatcgaacaccagaaggtggtgaagggcaaccagaagagactggagagcctgcgggagctggccggcaaggaaaacctggaataccctagcgtgaccctgccacctcagcctcacaccaaggagggcgttgatgcctacaacgaagtgatcgcccgggtgcgaatgtgggtgaacctgaacctgtggcagaagctgaagctaagcagagatgatgccaagcctctgctgagactgaagggattcccttcctttcctctggtcgagagacaggccaacgaagtggactggtgggacatggtgtgtaacgtgaagaagctgatcaacgagaaaaaggaggatggcaaggtgttttggcagaatctggctggctacaagagacaggaagccctgagaccatacctgagcagcgaggaagatcggaagaagggaaagaaattcgctcggtaccagctgggcgacctgctgctgcacctggaaaagaagcacggcgaggactggggaaaggtgtacgacgaggcctgggagcggattgacaagaaagtggaaggcctgagcaagcacatcaagctggaagaggaacggagaagcgaggacgcccagagcaaggccgccctgaccgactggctgcgggctaaggccagcttcgtgatcgagggcctgaaggaggccgacaaggacgagttctgcagatgcgagctgaagctgcagaagtggtacggggacctgcggggaaagcccttcgccatcgaagccgagaacagcatcctggacatcagcggcttcagcaagcagtacaactgtgccttcatctggcagaaggacggcgtgaagaagctgaacctgtacctgatcatcaactacttcaagggcggcaagctgcggttcaagaagatcaaacctgaagccttcgaagccaacagattctacaccgtgatcaacaaaaagagcggcgagatcgtgcccatggaggtgaacttcaacttcgacgaccccaacctgatcatcctgcctctggcctttggcaagagacagggcagagaattcatctggaacgacctgctgtccctggaaaccggcagcctgaagctggccaacggaagagtgatcgagaagacactgtacaacagaagaacccggcaggatgagcctgccctgttcgtggccctgaccttcgagcggcgggaggtcctggactcctccaatatcaaaccaatgaacctgatcggcgtggcaagaggcgaaaacatccccgccgtgatcgccctgaccgaccccgagggctgcccactgagccggtttaaggatagcctgggaaacccaacccacatcctgagaatcggcgagagctataaggagaagcagcggaccatccaggccaagaaggaggtggagcagcggagagccggcggctacagccggaagtacgccagcaaagccaagaatctggcagacgatatggtgagaaacaccgctagagatctgctgtactacgccgtgacccaggatgccatgctgatcttcgccaacctgagccggggcttcggccggcagggcaagcggaccttcatggccgagagacagtacacacggatggaggactggctgaccgccaagctggcctacgagggcctgagcaagacctacctgtccaagacactggcccagtacacctccaagacatgcagcaactgtgggtttaccatcaccagcgccgactacgacagggtgctggagaagctgaagaagacagcaacaggctggatgaccacaattaacggcaaggagctgaaggtggagggccagattacctactacaacagatacaagagacagaacgtagtcaaggacctgtccgtcgagctggatagactgagcgaagaatctgtgaacaacgacatctcctcctggacaaagggcagaagcggagaagctctgagcctcctgaagaaaagattctcccatagacccgtgcaggagaagttcgtgtgcctgaactgcggcttcgagacacacgcagccgagcaagccgccctgaacatcgccagatcctggctgttcctgcggagccaggagtacaagaaataccagacaaacaagacaaccggcaacaccgataagagagccttcgtcgagacctggcagtccttttaccggaagaagcttaaggaggtgtggaaacctgccgtgcggtctggcggatctggcggaggctccacaagctgcagccacaggagctgcagggaggaccccggcaccagcgagagcagggagatggaccccgtggccttcgacgacgtggccgtgaacttcacccaggaggagtgggccctgctggacatcagccagaggaagctgtacagggaggtgatgctggagaccttcaggaacctgaccagcatcggcaagaagtggaaggaccagaacatcgagtacgagtaccagaaccccaggaggaacttcaggaccagccccaagaaaaagagaaaagtctaagctgccttctgcggggcttgccttctggccatgcccttcttctctcccttgcacctgtacctcttggtctttgaataaagcctgagtaggaaggctagcaaaaaaaaaaaaaaaaaaaaaaaaaaaaaaaaaaaaaaaaaaaaaaaaaaaaaaaaaaaaaaaaaaaaaaaaaaaaaaaa

SEQ ID NO: 7290 - RNA, 5797 nt, synthetic construct
  source 1..5797: mol_type = other RNA
aggaaataagagagaaaagaagagtaagaagaaatataagagccaccatggcccctaagaagaagcgtaaagtgagccggatggaacgcctcgtctacgaggtgcggcagaagtgcagaaacatcgaggacatctgcatctcctgcggatctctgaacgtgaccctggagcacccactgttcatcggcggcatgtgccagaactgtaaaaactgttttctggagtgtgcctatcaatacgacgatgacggctaccagagctactgcaccatctgttgcggcggaagagaggtgctgatgtgtggaaataacaactgctgccggtgcttctgcgtggaatgcgtggacctgctggtgggccccggcgccgcccaggccgctattaaggaagatccttggaactgctacatgtgcggccacaagggcacatacggcctgctgagacggagagaggactggcctagcagactgcagatgttcttcgccaataaccacgaccaggagttcgacccccctaaggtgtaccctcccgtccccgccgagaagagaaagcccatccgggtcctgagcctgttcgatggcatcgccaccggtctgctggtgctgaaggacctgggcatccaggtggataggtacattgcctccgaggtgtgcgaggactccatcaccgtgggaatggtgcgtcatcagggcaagatcatgtacgtgggcgacgtgcggagcgtgacacagaagcatatccaggagtggggccctttcgacctggtgatcggcggcagcccttgcaatgacctgagcatcgtgaacccagcccggaagggcctgtacgagggaaccggcagactgttcttcgagttttacagactgctgcacgacgcccggcctaaggaaggcgacgaccggcccttcttttggctgttcgagaatgtggtggccatgggagtcagcgacaagcgggatattagccggttcctggagagcaaccccgtgatgatcgatgccaaggaagtgagcgccgcccaccgggccagatacttctggggcaatctgcctggcatgaacagacccctggccagcaccgtgaacgacaagctggagctgcaggagtgcctggagcacggccggatcgccaagttcagcaaggtgagaaccatcaccacccgaagcaacagcatcaaacaaggcaaggaccagcactttcctgtgttcatgaacgagaaggaggacatcctgtggtgtaccgagatggagagagtgttcgggttcccagtccactacacagatgtcagcaacatgtctagactggccagacagagactgctgggaagaagctggtccgtccctgtgatcagacacctgttcgcccctctgaaggagtacttcgcctgcgtgagcagcggcaacagcaacgccaacagccggggccccagcttctctagcggcctggtgccactgtccctgagagggagccacatgggccccatggagatctacaaaaccgtgagcgcctggaagcggcagcctgtgcgcgtgctgagcctgtttcggaatatcgataaagtcctgaaaagcctgggattcctggagagcggctctggctccggcggtggcaccctgaagtacgtggaggatgtgacaaacgtggtcagacgggatgtggagaagtggggccccttcgatctggtgtacggcagcacccaacccctgggcagctcttgtgaccggtgccctggctggtacatgtttcagttccaccggatcctgcagtacgccctgccgagacaggagtcccagcggccattcttttggattttcatggacaacttgctgctgaccgaggatgaccaggaaactaccactcggttcctgcagaccgaagccgtgaccctgcaggacgtgagaggccgggactaccagaacgccatgcgggtgtggtccaacatccctggactgaaaagcaagcacgcacctctgacccctaaagaagaggagtacctgcaggcccaggtgcggagcagaagcaagctggacgcccctaaggtggatctgctggtgaagaattgcctcctgcccctgagagagtacttcaagtatttcagccagaatagtctgcccctgggcggcccaagcagcggcgcccctcctcccagcggcggcagcccagccggctccccaacctctaccgaggagggcacctctgagtccgccacccccgagagcggccctggcacctccaccgagcccagcgagggcagcgcacccggcagccctgccggcagccccacctccacagaggagggaaccagcaccgagcccagcgaaggcagcgccccaggcaccagcaccgagcctagtgagggcggctctggcggcggcagcgcccaggagattaaacggatcaacaagatcagaagaagacttgtgaaagacagcaacaccaagaaggccggcaagacaggccccatgaaaaccctgctggttagagtgatgacacccgatctgagagagcggctggaaaacctgagaaagaagcctgaaaatatcccccagcccatcagcaatacatctagagccaacctgaataagctgctgaccgattacaccgaaatgaagaaggcgatcctgcatgtgtactgggaagagttccagaaggaccctgtgggcctgatgagccgggtggcccagcctgccagcaagaagatcgatcagaacaagctgaaacctgagatggacgagaagggcaacctgaccaccgccggctttgcctgctctcagtgtggccagcccctgttcgtgtacaagctggagcaggtgtctgagaagggcaaggcttacaccaactacttcggacggtgcaatgtggccgagcacgaaaagctgatcctgctggcccagctgaagcccgagaaggatagcgacgaagccgtgacatatagcctgggaaagtttgggcagagggccctggatttctacagcattcatgtgaccaaggagtccacccaccccgtgaagcccctggcccagatcgccggaaacagatacgcctccggacctgtgggaaaggccctgagcgacgcatgtatgggcacaatcgcctccttcctgtctaagtaccaggacatcatcatcgaacaccagaaggtggtgaagggcaaccagaagagactggagagcctgcgggagctggccggcaaggaaaacctggaataccctagcgtgaccctgccacctcagcctcacaccaaggagggcgttgatgcctacaacgaagtgatcgcccgggtgcgaatgtgggtgaacctgaacctgtggcagaagctgaagctaagcagagatgatgccaagcctctgctgagactgaagggattcccttcctttcctctggtcgagagacaggccaacgaagtggactggtgggacatggtgtgtaacgtgaagaagctgatcaacgagaaaaaggaggatggcaaggtgttttggcagaatctggctggctacaagagacaggaagccctgagaccatacctgagcagcgaggaagatcggaagaagggaaagaaattcgctcggtaccagctgggcgacctgctgctgcacctggaaaagaagcacggcgaggactggggaaaggtgtacgacgaggcctgggagcggattgacaagaaagtggaaggcctgagcaagcacatcaagctggaagaggaacggagaagcgaggacgcccagagcaaggccgccctgaccgactggctgcgggctaaggccagcttcgtgatcgagggcctgaaggaggccgacaaggacgagttctgcagatgcgagctgaagctgcagaagtggtacggggacctgcggggaaagcccttcgccatcgaagccgagaacagcatcctggacatcagcggcttcagcaagcagtacaactgtgccttcatctggcagaaggacggcgtgaagaagctgaacctgtacctgatcatcaactacttcaagggcggcaagctgcggttcaagaagatcaaacctgaagccttcgaagccaacagattctacaccgtgatcaacaaaaagagcggcgagatcgtgcccatggaggtgaacttcaacttcgacgaccccaacctgatcatcctgcctctggcctttggcaagagacagggcagagaattcatctggaacgacctgctgtccctggaaaccggcagcctgaagctggccaacggaagagtgatcgagaagacactgtacaacagaagaacccggcaggatgagcctgccctgttcgtggccctgaccttcgagcggcgggaggtcctggactcctccaatatcaaaccaatgaacctgatcggcgtggcaagaggcgaaaacatccccgccgtgatcgccctgaccgaccccgagggctgcccactgagccggtttaaggatagcctgggaaacccaacccacatcctgagaatcggcgagagctataaggagaagcagcggaccatccaggccaagaaggaggtggagcagcggagagccggcggctacagccggaagtacgccagcaaagccaagaatctggcagacgatatggtgagaaacaccgctagagatctgctgtactacgccgtgacccaggatgccatgctgatcttcgccaacctgagccggggcttcggccggcagggcaagcggaccttcatggccgagagacagtacacacggatggaggactggctgaccgccaagctggcctacgagggcctgagcaagacctacctgtccaagacactggcccagtacacctccaagacatgcagcaactgtgggtttaccatcaccagcgccgactacgacagggtgctggagaagctgaagaagacagcaacaggctggatgaccacaattaacggcaaggagctgaaggtggagggccagattacctactacaacagatacaagagacagaacgtagtcaaggacctgtccgtcgagctggatagactgagcgaagaatctgtgaacaacgacatctcctcctggacaaagggcagaagcggagaagctctgagcctcctgaagaaaagattctcccatagacccgtgcaggagaagttcgtgtgcctgaactgcggcttcgagacacacgcagccgagcaagccgccctgaacatcgccagatcctggctgttcctgcggagccaggagtacaagaaataccagacaaacaagacaaccggcaacaccgataagagagccttcgtcgagacctggcagtccttttaccggaagaagcttaaggaggtgtggaaacctgccgtgcggtctggcggatctggcggaggctccacaagcgcccagaggtgggaggccttcgaggacgtggccctgtacttcacccagaaggagtgggagctgctgagggacggcgacaaggtgctgtaccaggagcagatgctgaggaactaccaggccctggtgagcctgggctaccagggccccacccccgacctgatctgcaggatccagaggggcgacatggagctgtgggtgtgcgacgacgaggaccccaaggagagcatgtggagcgagggcctgaccagccccaagaaaaagagaaaagtctaagctgccttctgcggggcttgccttctggccatgcccttcttctctcccttgcacctgtacctcttggtctttgaataaagcctgagtaggaaggctagcaaaaaaaaaaaaaaaaaaaaaaaaaaaaaaaaaaaaaaaaaaaaaaaaaaaaaaaaaaaaaaaaaaaaaaaaaaaaaaaa

SEQ ID NO: 7291 - RNA, 5797 nt, synthetic construct
  source 1..5797: mol_type = other RNA
aggaaataagagagaaaagaagagtaagaagaaatataagagccaccatggcccctaagaagaagcgtaaagtgagccggatggaacgcctcgtctacgaggtgcggcagaagtgcagaaacatcgaggacatctgcatctcctgcggatctctgaacgtgaccctggagcacccactgttcatcggcggcatgtgccagaactgtaaaaactgttttctggagtgtgcctatcaatacgacgatgacggctaccagagctactgcaccatctgttgcggcggaagagaggtgctgatgtgtggaaataacaactgctgccggtgcttctgcgtggaatgcgtggacctgctggtgggccccggcgccgcccaggccgctattaaggaagatccttggaactgctacatgtgcggccacaagggcacatacggcctgctgagacggagagaggactggcctagcagactgcagatgttcttcgccaataaccacgaccaggagttcgacccccctaaggtgtaccctcccgtccccgccgagaagagaaagcccatccgggtcctgagcctgttcgatggcatcgccaccggtctgctggtgctgaaggacctgggcatccaggtggataggtacattgcctccgaggtgtgcgaggactccatcaccgtgggaatggtgcgtcatcagggcaagatcatgtacgtgggcgacgtgcggagcgtgacacagaagcatatccaggagtggggccctttcgacctggtgatcggcggcagcccttgcaatgacctgagcatcgtgaacccagcccggaagggcctgtacgagggaaccggcagactgttcttcgagttttacagactgctgcacgacgcccggcctaaggaaggcgacgaccggcccttcttttggctgttcgagaatgtggtggccatgggagtcagcgacaagcgggatattagccggttcctggagagcaaccccgtgatgatcgatgccaaggaagtgagcgccgcccaccgggccagatacttctggggcaatctgcctggcatgaacagacccctggccagcaccgtgaacgacaagctggagctgcaggagtgcctggagcacggccggatcgccaagttcagcaaggtgagaaccatcaccacccgaagcaacagcatcaaacaaggcaaggaccagcactttcctgtgttcatgaacgagaaggaggacatcctgtggtgtaccgagatggagagagtgttcgggttcccagtccactacacagatgtcagcaacatgtctagactggccagacagagactgctgggaagaagctggtccgtccctgtgatcagacacctgttcgcccctctgaaggagtacttcgcctgcgtgagcagcggcaacagcaacgccaacagccggggccccagcttctctagcggcctggtgccactgtccctgagagggagccacatgggccccatggagatctacaaaaccgtgagcgcctggaagcggcagcctgtgcgcgtgctgagcctgtttcggaatatcgataaagtcctgaaaagcctgggattcctggagagcggctctggctccggcggtggcaccctgaagtacgtggaggatgtgacaaacgtggtcagacgggatgtggagaagtggggccccttcgatctggtgtacggcagcacccaacccctgggcagctcttgtgaccggtgccctggctggtacatgtttcagttccaccggatcctgcagtacgccctgccgagacaggagtcccagcggccattcttttggattttcatggacaacttgctgctgaccgaggatgaccaggaaactaccactcggttcctgcagaccgaagccgtgaccctgcaggacgtgagaggccgggactaccagaacgccatgcgggtgtggtccaacatccctggactgaaaagcaagcacgcacctctgacccctaaagaagaggagtacctgcaggcccaggtgcggagcagaagcaagctggacgcccctaaggtggatctgctggtgaagaattgcctcctgcccctgagagagtacttcaagtatttcagccagaatagtctgcccctgggcggcccaagcagcggcgcccctcctcccagcggcggcagcccagccggctccccaacctctaccgaggagggcacctctgagtccgccacccccgagagcggccctggcacctccaccgagcccagcgagggcagcgcacccggcagccctgccggcagccccacctccacagaggagggaaccagcaccgagcccagcgaaggcagcgccccaggcaccagcaccgagcctagtgagggcggctctggcggcggcagcgcccaggagattaaacggatcaacaagatcagaagaagacttgtgaaagacagcaacaccaagaaggccggcaagacaggccccatgaaaaccctgctggttagagtgatgacacccgatctgagagagcggctggaaaacctgagaaagaagcctgaaaatatcccccagcccatcagcaatacatctagagccaacctgaataagctgctgaccgattacaccgaaatgaagaaggcgatcctgcatgtgtactgggaagagttccagaaggaccctgtgggcctgatgagccgggtggcccagcctgccagcaagaagatcgatcagaacaagctgaaacctgagatggacgagaagggcaacctgaccaccgccggctttgcctgctctcagtgtggccagcccctgttcgtgtacaagctggagcaggtgtctgagaagggcaaggcttacaccaactacttcggacggtgcaatgtggccgagcacgaaaagctgatcctgctggcccagctgaagcccgagaaggatagcgacgaagccgtgacatatagcctgggaaagtttgggcagagggccctggatttctacagcattcatgtgaccaaggagtccacccaccccgtgaagcccctggcccagatcgccggaaacagatacgcctccggacctgtgggaaaggccctgagcgacgcatgtatgggcacaatcgcctccttcctgtctaagtaccaggacatcatcatcgaacaccagaaggtggtgaagggcaaccagaagagactggagagcctgcgggagctggccggcaaggaaaacctggaataccctagcgtgaccctgccacctcagcctcacaccaaggagggcgttgatgcctacaacgaagtgatcgcccgggtgcgaatgtgggtgaacctgaacctgtggcagaagctgaagctaagcagagatgatgccaagcctctgctgagactgaagggattcccttcctttcctctggtcgagagacaggccaacgaagtggactggtgggacatggtgtgtaacgtgaagaagctgatcaacgagaaaaaggaggatggcaaggtgttttggcagaatctggctggctacaagagacaggaagccctgagaccatacctgagcagcgaggaagatcggaagaagggaaagaaattcgctcggtaccagctgggcgacctgctgctgcacctggaaaagaagcacggcgaggactggggaaaggtgtacgacgaggcctgggagcggattgacaagaaagtggaaggcctgagcaagcacatcaagctggaagaggaacggagaagcgaggacgcccagagcaaggccgccctgaccgactggctgcgggctaaggccagcttcgtgatcgagggcctgaaggaggccgacaaggacgagttctgcagatgcgagctgaagctgcagaagtggtacggggacctgcggggaaagcccttcgccatcgaagccgagaacagcatcctggacatcagcggcttcagcaagcagtacaactgtgccttcatctggcagaaggacggcgtgaagaagctgaacctgtacctgatcatcaactacttcaagggcggcaagctgcggttcaagaagatcaaacctgaagccttcgaagccaacagattctacaccgtgatcaacaaaaagagcggcgagatcgtgcccatggaggtgaacttcaacttcgacgaccccaacctgatcatcctgcctctggcctttggcaagagacagggcagagaattcatctggaacgacctgctgtccctggaaaccggcagcctgaagctggccaacggaagagtgatcgagaagacactgtacaacagaagaacccggcaggatgagcctgccctgttcgtggccctgaccttcgagcggcgggaggtcctggactcctccaatatcaaaccaatgaacctgatcggcgtggcaagaggcgaaaacatccccgccgtgatcgccctgaccgaccccgagggctgcccactgagccggtttaaggatagcctgggaaacccaacccacatcctgagaatcggcgagagctataaggagaagcagcggaccatccaggccaagaaggaggtggagcagcggagagccggcggctacagccggaagtacgccagcaaagccaagaatctggcagacgatatggtgagaaacaccgctagagatctgctgtactacgccgtgacccaggatgccatgctgatcttcgccaacctgagccggggcttcggccggcagggcaagcggaccttcatggccgagagacagtacacacggatggaggactggctgaccgccaagctggcctacgagggcctgagcaagacctacctgtccaagacactggcccagtacacctccaagacatgcagcaactgtgggtttaccatcaccagcgccgactacgacagggtgctggagaagctgaagaagacagcaacaggctggatgaccacaattaacggcaaggagctgaaggtggagggccagattacctactacaacagatacaagagacagaacgtagtcaaggacctgtccgtcgagctggatagactgagcgaagaatctgtgaacaacgacatctcctcctggacaaagggcagaagcggagaagctctgagcctcctgaagaaaagattctcccatagacccgtgcaggagaagttcgtgtgcctgaactgcggcttcgagacacacgcagccgagcaagccgccctgaacatcgccagatcctggctgttcctgcggagccaggagtacaagaaataccagacaaacaagacaaccggcaacaccgataagagagccttcgtcgagacctggcagtccttttaccggaagaagcttaaggaggtgtggaaacctgccgtgcggtctggcggatctggcggaggctccacaagccccaaggtgcccgtgagcttcgaggacgtggccatgtacttcaccaagaccgagtggaagctgctggacctgaagcagaggatcctgtacaagcaggtgatgctggagaactacggccacctggtgagcctgggcttcgccttcagcaagcccaggctggtgagccagctggagaggggcgagggcccctgggtggccgacagcctgaggggccaggccgaggccgagagccacgccggcgagaccagccccaagaaaaagagaaaagtctaagctgccttctgcggggcttgccttctggccatgcccttcttctctcccttgcacctgtacctcttggtctttgaataaagcctgagtaggaaggctagcaaaaaaaaaaaaaaaaaaaaaaaaaaaaaaaaaaaaaaaaaaaaaaaaaaaaaaaaaaaaaaaaaaaaaaaaaaaaaaaa

SEQ ID NO: 7292 - RNA, 5797 nt, synthetic construct
  source 1..5797: mol_type = other RNA
aggaaataagagagaaaagaagagtaagaagaaatataagagccaccatggcccctaagaagaagcgtaaagtgagccggatggaacgcctcgtctacgaggtgcggcagaagtgcagaaacatcgaggacatctgcatctcctgcggatctctgaacgtgaccctggagcacccactgttcatcggcggcatgtgccagaactgtaaaaactgttttctggagtgtgcctatcaatacgacgatgacggctaccagagctactgcaccatctgttgcggcggaagagaggtgctgatgtgtggaaataacaactgctgccggtgcttctgcgtggaatgcgtggacctgctggtgggccccggcgccgcccaggccgctattaaggaagatccttggaactgctacatgtgcggccacaagggcacatacggcctgctgagacggagagaggactggcctagcagactgcagatgttcttcgccaataaccacgaccaggagttcgacccccctaaggtgtaccctcccgtccccgccgagaagagaaagcccatccgggtcctgagcctgttcgatggcatcgccaccggtctgctggtgctgaaggacctgggcatccaggtggataggtacattgcctccgaggtgtgcgaggactccatcaccgtgggaatggtgcgtcatcagggcaagatcatgtacgtgggcgacgtgcggagcgtgacacagaagcatatccaggagtggggccctttcgacctggtgatcggcggcagcccttgcaatgacctgagcatcgtgaacccagcccggaagggcctgtacgagggaaccggcagactgttcttcgagttttacagactgctgcacgacgcccggcctaaggaaggcgacgaccggcccttcttttggctgttcgagaatgtggtggccatgggagtcagcgacaagcgggatattagccggttcctggagagcaaccccgtgatgatcgatgccaaggaagtgagcgccgcccaccgggccagatacttctggggcaatctgcctggcatgaacagacccctggccagcaccgtgaacgacaagctggagctgcaggagtgcctggagcacggccggatcgccaagttcagcaaggtgagaaccatcaccacccgaagcaacagcatcaaacaaggcaaggaccagcactttcctgtgttcatgaacgagaaggaggacatcctgtggtgtaccgagatggagagagtgttcgggttcccagtccactacacagatgtcagcaacatgtctagactggccagacagagactgctgggaagaagctggtccgtccctgtgatcagacacctgttcgcccctctgaaggagtacttcgcctgcgtgagcagcggcaacagcaacgccaacagccggggccccagcttctctagcggcctggtgccactgtccctgagagggagccacatgggccccatggagatctacaaaaccgtgagcgcctggaagcggcagcctgtgcgcgtgctgagcctgtttcggaatatcgataaagtcctgaaaagcctgggattcctggagagcggctctggctccggcggtggcaccctgaagtacgtggaggatgtgacaaacgtggtcagacgggatgtggagaagtggggccccttcgatctggtgtacggcagcacccaacccctgggcagctcttgtgaccggtgccctggctggtacatgtttcagttccaccggatcctgcagtacgccctgccgagacaggagtcccagcggccattcttttggattttcatggacaacttgctgctgaccgaggatgaccaggaaactaccactcggttcctgcagaccgaagccgtgaccctgcaggacgtgagaggccgggactaccagaacgccatgcgggtgtggtccaacatccctggactgaaaagcaagcacgcacctctgacccctaaagaagaggagtacctgcaggcccaggtgcggagcagaagcaagctggacgcccctaaggtggatctgctggtgaagaattgcctcctgcccctgagagagtacttcaagtatttcagccagaatagtctgcccctgggcggcccaagcagcggcgcccctcctcccagcggcggcagcccagccggctccccaacctctaccgaggagggcacctctgagtccgccacccccgagagcggccctggcacctccaccgagcccagcgagggcagcgcacccggcagccctgccggcagccccacctccacagaggagggaaccagcaccgagcccagcgaaggcagcgccccaggcaccagcaccgagcctagtgagggcggctctggcggcggcagcgcccaggagattaaacggatcaacaagatcagaagaagacttgtgaaagacagcaacaccaagaaggccggcaagacaggccccatgaaaaccctgctggttagagtgatgacacccgatctgagagagcggctggaaaacctgagaaagaagcctgaaaatatcccccagcccatcagcaatacatctagagccaacctgaataagctgctgaccgattacaccgaaatgaagaaggcgatcctgcatgtgtactgggaagagttccagaaggaccctgtgggcctgatgagccgggtggcccagcctgccagcaagaagatcgatcagaacaagctgaaacctgagatggacgagaagggcaacctgaccaccgccggctttgcctgctctcagtgtggccagcccctgttcgtgtacaagctggagcaggtgtctgagaagggcaaggcttacaccaactacttcggacggtgcaatgtggccgagcacgaaaagctgatcctgctggcccagctgaagcccgagaaggatagcgacgaagccgtgacatatagcctgggaaagtttgggcagagggccctggatttctacagcattcatgtgaccaaggagtccacccaccccgtgaagcccctggcccagatcgccggaaacagatacgcctccggacctgtgggaaaggccctgagcgacgcatgtatgggcacaatcgcctccttcctgtctaagtaccaggacatcatcatcgaacaccagaaggtggtgaagggcaaccagaagagactggagagcctgcgggagctggccggcaaggaaaacctggaataccctagcgtgaccctgccacctcagcctcacaccaaggagggcgttgatgcctacaacgaagtgatcgcccgggtgcgaatgtgggtgaacctgaacctgtggcagaagctgaagctaagcagagatgatgccaagcctctgctgagactgaagggattcccttcctttcctctggtcgagagacaggccaacgaagtggactggtgggacatggtgtgtaacgtgaagaagctgatcaacgagaaaaaggaggatggcaaggtgttttggcagaatctggctggctacaagagacaggaagccctgagaccatacctgagcagcgaggaagatcggaagaagggaaagaaattcgctcggtaccagctgggcgacctgctgctgcacctggaaaagaagcacggcgaggactggggaaaggtgtacgacgaggcctgggagcggattgacaagaaagtggaaggcctgagcaagcacatcaagctggaagaggaacggagaagcgaggacgcccagagcaaggccgccctgaccgactggctgcgggctaaggccagcttcgtgatcgagggcctgaaggaggccgacaaggacgagttctgcagatgcgagctgaagctgcagaagtggtacggggacctgcggggaaagcccttcgccatcgaagccgagaacagcatcctggacatcagcggcttcagcaagcagtacaactgtgccttcatctggcagaaggacggcgtgaagaagctgaacctgtacctgatcatcaactacttcaagggcggcaagctgcggttcaagaagatcaaacctgaagccttcgaagccaacagattctacaccgtgatcaacaaaaagagcggcgagatcgtgcccatggaggtgaacttcaacttcgacgaccccaacctgatcatcctgcctctggcctttggcaagagacagggcagagaattcatctggaacgacctgctgtccctggaaaccggcagcctgaagctggccaacggaagagtgatcgagaagacactgtacaacagaagaacccggcaggatgagcctgccctgttcgtggccctgaccttcgagcggcgggaggtcctggactcctccaatatcaaaccaatgaacctgatcggcgtggcaagaggcgaaaacatccccgccgtgatcgccctgaccgaccccgagggctgcccactgagccggtttaaggatagcctgggaaacccaacccacatcctgagaatcggcgagagctataaggagaagcagcggaccatccaggccaagaaggaggtggagcagcggagagccggcggctacagccggaagtacgccagcaaagccaagaatctggcagacgatatggtgagaaacaccgctagagatctgctgtactacgccgtgacccaggatgccatgctgatcttcgccaacctgagccggggcttcggccggcagggcaagcggaccttcatggccgagagacagtacacacggatggaggactggctgaccgccaagctggcctacgagggcctgagcaagacctacctgtccaagacactggcccagtacacctccaagacatgcagcaactgtgggtttaccatcaccagcgccgactacgacagggtgctggagaagctgaagaagacagcaacaggctggatgaccacaattaacggcaaggagctgaaggtggagggccagattacctactacaacagatacaagagacagaacgtagtcaaggacctgtccgtcgagctggatagactgagcgaagaatctgtgaacaacgacatctcctcctggacaaagggcagaagcggagaagctctgagcctcctgaagaaaagattctcccatagacccgtgcaggagaagttcgtgtgcctgaactgcggcttcgagacacacgcagccgagcaagccgccctgaacatcgccagatcctggctgttcctgcggagccaggagtacaagaaataccagacaaacaagacaaccggcaacaccgataagagagccttcgtcgagacctggcagtccttttaccggaagaagcttaaggaggtgtggaaacctgccgtgcggtctggcggatctggcggaggctccacaagcagccagggcagcgtgagcttcaaggacgtgaccgtgggcttcacccaggaggagtggcagcacctggaccccagccagaagagcctgtacagggacgtgatgctggagaactacagccacctggtgagcgtgggctactgcgtgaccaagcccgagctgatcttcaggctggagcagggcgaggagccctgggtgctggaggaggagttccccaggcccggcttcctggagttctggaagaccaccagccccaagaaaaagagaaaagtctaagctgccttctgcggggcttgccttctggccatgcccttcttctctcccttgcacctgtacctcttggtctttgaataaagcctgagtaggaaggctagcaaaaaaaaaaaaaaaaaaaaaaaaaaaaaaaaaaaaaaaaaaaaaaaaaaaaaaaaaaaaaaaaaaaaaaaaaaaaaaaa

SEQ ID NO: 7293 - RNA, 5797 nt, synthetic construct
  source 1..5797: mol_type = other RNA
aggaaataagagagaaaagaagagtaagaagaaatataagagccaccatggcccctaagaagaagcgtaaagtgagccggatggaacgcctcgtctacgaggtgcggcagaagtgcagaaacatcgaggacatctgcatctcctgcggatctctgaacgtgaccctggagcacccactgttcatcggcggcatgtgccagaactgtaaaaactgttttctggagtgtgcctatcaatacgacgatgacggctaccagagctactgcaccatctgttgcggcggaagagaggtgctgatgtgtggaaataacaactgctgccggtgcttctgcgtggaatgcgtggacctgctggtgggccccggcgccgcccaggccgctattaaggaagatccttggaactgctacatgtgcggccacaagggcacatacggcctgctgagacggagagaggactggcctagcagactgcagatgttcttcgccaataaccacgaccaggagttcgacccccctaaggtgtaccctcccgtccccgccgagaagagaaagcccatccgggtcctgagcctgttcgatggcatcgccaccggtctgctggtgctgaaggacctgggcatccaggtggataggtacattgcctccgaggtgtgcgaggactccatcaccgtgggaatggtgcgtcatcagggcaagatcatgtacgtgggcgacgtgcggagcgtgacacagaagcatatccaggagtggggccctttcgacctggtgatcggcggcagcccttgcaatgacctgagcatcgtgaacccagcccggaagggcctgtacgagggaaccggcagactgttcttcgagttttacagactgctgcacgacgcccggcctaaggaaggcgacgaccggcccttcttttggctgttcgagaatgtggtggccatgggagtcagcgacaagcgggatattagccggttcctggagagcaaccccgtgatgatcgatgccaaggaagtgagcgccgcccaccgggccagatacttctggggcaatctgcctggcatgaacagacccctggccagcaccgtgaacgacaagctggagctgcaggagtgcctggagcacggccggatcgccaagttcagcaaggtgagaaccatcaccacccgaagcaacagcatcaaacaaggcaaggaccagcactttcctgtgttcatgaacgagaaggaggacatcctgtggtgtaccgagatggagagagtgttcgggttcccagtccactacacagatgtcagcaacatgtctagactggccagacagagactgctgggaagaagctggtccgtccctgtgatcagacacctgttcgcccctctgaaggagtacttcgcctgcgtgagcagcggcaacagcaacgccaacagccggggccccagcttctctagcggcctggtgccactgtccctgagagggagccacatgggccccatggagatctacaaaaccgtgagcgcctggaagcggcagcctgtgcgcgtgctgagcctgtttcggaatatcgataaagtcctgaaaagcctgggattcctggagagcggctctggctccggcggtggcaccctgaagtacgtggaggatgtgacaaacgtggtcagacgggatgtggagaagtggggccccttcgatctggtgtacggcagcacccaacccctgggcagctcttgtgaccggtgccctggctggtacatgtttcagttccaccggatcctgcagtacgccctgccgagacaggagtcccagcggccattcttttggattttcatggacaacttgctgctgaccgaggatgaccaggaaactaccactcggttcctgcagaccgaagccgtgaccctgcaggacgtgagaggccgggactaccagaacgccatgcgggtgtggtccaacatccctggactgaaaagcaagcacgcacctctgacccctaaagaagaggagtacctgcaggcccaggtgcggagcagaagcaagctggacgcccctaaggtggatctgctggtgaagaattgcctcctgcccctgagagagtacttcaagtatttcagccagaatagtctgcccctgggcggcccaagcagcggcgcccctcctcccagcggcggcagcccagccggctccccaacctctaccgaggagggcacctctgagtccgccacccccgagagcggccctggcacctccaccgagcccagcgagggcagcgcacccggcagccctgccggcagccccacctccacagaggagggaaccagcaccgagcccagcgaaggcagcgccccaggcaccagcaccgagcctagtgagggcggctctggcggcggcagcgcccaggagattaaacggatcaacaagatcagaagaagacttgtgaaagacagcaacaccaagaaggccggcaagacaggccccatgaaaaccctgctggttagagtgatgacacccgatctgagagagcggctggaaaacctgagaaagaagcctgaaaatatcccccagcccatcagcaatacatctagagccaacctgaataagctgctgaccgattacaccgaaatgaagaaggcgatcctgcatgtgtactgggaagagttccagaaggaccctgtgggcctgatgagccgggtggcccagcctgccagcaagaagatcgatcagaacaagctgaaacctgagatggacgagaagggcaacctgaccaccgccggctttgcctgctctcagtgtggccagcccctgttcgtgtacaagctggagcaggtgtctgagaagggcaaggcttacaccaactacttcggacggtgcaatgtggccgagcacgaaaagctgatcctgctggcccagctgaagcccgagaaggatagcgacgaagccgtgacatatagcctgggaaagtttgggcagagggccctggatttctacagcattcatgtgaccaaggagtccacccaccccgtgaagcccctggcccagatcgccggaaacagatacgcctccggacctgtgggaaaggccctgagcgacgcatgtatgggcacaatcgcctccttcctgtctaagtaccaggacatcatcatcgaacaccagaaggtggtgaagggcaaccagaagagactggagagcctgcgggagctggccggcaaggaaaacctggaataccctagcgtgaccctgccacctcagcctcacaccaaggagggcgttgatgcctacaacgaagtgatcgcccgggtgcgaatgtgggtgaacctgaacctgtggcagaagctgaagctaagcagagatgatgccaagcctctgctgagactgaagggattcccttcctttcctctggtcgagagacaggccaacgaagtggactggtgggacatggtgtgtaacgtgaagaagctgatcaacgagaaaaaggaggatggcaaggtgttttggcagaatctggctggctacaagagacaggaagccctgagaccatacctgagcagcgaggaagatcggaagaagggaaagaaattcgctcggtaccagctgggcgacctgctgctgcacctggaaaagaagcacggcgaggactggggaaaggtgtacgacgaggcctgggagcggattgacaagaaagtggaaggcctgagcaagcacatcaagctggaagaggaacggagaagcgaggacgcccagagcaaggccgccctgaccgactggctgcgggctaaggccagcttcgtgatcgagggcctgaaggaggccgacaaggacgagttctgcagatgcgagctgaagctgcagaagtggtacggggacctgcggggaaagcccttcgccatcgaagccgagaacagcatcctggacatcagcggcttcagcaagcagtacaactgtgccttcatctggcagaaggacggcgtgaagaagctgaacctgtacctgatcatcaactacttcaagggcggcaagctgcggttcaagaagatcaaacctgaagccttcgaagccaacagattctacaccgtgatcaacaaaaagagcggcgagatcgtgcccatggaggtgaacttcaacttcgacgaccccaacctgatcatcctgcctctggcctttggcaagagacagggcagagaattcatctggaacgacctgctgtccctggaaaccggcagcctgaagctggccaacggaagagtgatcgagaagacactgtacaacagaagaacccggcaggatgagcctgccctgttcgtggccctgaccttcgagcggcgggaggtcctggactcctccaatatcaaaccaatgaacctgatcggcgtggcaagaggcgaaaacatccccgccgtgatcgccctgaccgaccccgagggctgcccactgagccggtttaaggatagcctgggaaacccaacccacatcctgagaatcggcgagagctataaggagaagcagcggaccatccaggccaagaaggaggtggagcagcggagagccggcggctacagccggaagtacgccagcaaagccaagaatctggcagacgatatggtgagaaacaccgctagagatctgctgtactacgccgtgacccaggatgccatgctgatcttcgccaacctgagccggggcttcggccggcagggcaagcggaccttcatggccgagagacagtacacacggatggaggactggctgaccgccaagctggcctacgagggcctgagcaagacctacctgtccaagacactggcccagtacacctccaagacatgcagcaactgtgggtttaccatcaccagcgccgactacgacagggtgctggagaagctgaagaagacagcaacaggctggatgaccacaattaacggcaaggagctgaaggtggagggccagattacctactacaacagatacaagagacagaacgtagtcaaggacctgtccgtcgagctggatagactgagcgaagaatctgtgaacaacgacatctcctcctggacaaagggcagaagcggagaagctctgagcctcctgaagaaaagattctcccatagacccgtgcaggagaagttcgtgtgcctgaactgcggcttcgagacacacgcagccgagcaagccgccctgaacatcgccagatcctggctgttcctgcggagccaggagtacaagaaataccagacaaacaagacaaccggcaacaccgataagagagccttcgtcgagacctggcagtccttttaccggaagaagcttaaggaggtgtggaaacctgccgtgcggtctggcggatctggcggaggctccacaagcatgggcctgctgaccttcagggacgtggccatcgagttcagcctggaggagtggcagtgcctggacaccgcccagcagaacctgtacaggaacgtgatgctggagaactacaggaacctggccttcctgggcatcgccgtgagcaagcccgacctgatcacctgcctggagcagggcaaggagccctggaacatgaagaggcacgagatggtggacgagccccccggcgtgtgcccccacttcaccagccccaagaaaaagagaaaagtctaagctgccttctgcggggcttgccttctggccatgcccttcttctctcccttgcacctgtacctcttggtctttgaataaagcctgagtaggaaggctagcaaaaaaaaaaaaaaaaaaaaaaaaaaaaaaaaaaaaaaaaaaaaaaaaaaaaaaaaaaaaaaaaaaaaaaaaaaaaaaaa

SEQ ID NO: 7294 - RNA, 5797 nt, synthetic construct
  source 1..5797: mol_type = other RNA
aggaaataagagagaaaagaagagtaagaagaaatataagagccaccatggcccctaagaagaagcgtaaagtgagccggatggaacgcctcgtctacgaggtgcggcagaagtgcagaaacatcgaggacatctgcatctcctgcggatctctgaacgtgaccctggagcacccactgttcatcggcggcatgtgccagaactgtaaaaactgttttctggagtgtgcctatcaatacgacgatgacggctaccagagctactgcaccatctgttgcggcggaagagaggtgctgatgtgtggaaataacaactgctgccggtgcttctgcgtggaatgcgtggacctgctggtgggccccggcgccgcccaggccgctattaaggaagatccttggaactgctacatgtgcggccacaagggcacatacggcctgctgagacggagagaggactggcctagcagactgcagatgttcttcgccaataaccacgaccaggagttcgacccccctaaggtgtaccctcccgtccccgccgagaagagaaagcccatccgggtcctgagcctgttcgatggcatcgccaccggtctgctggtgctgaaggacctgggcatccaggtggataggtacattgcctccgaggtgtgcgaggactccatcaccgtgggaatggtgcgtcatcagggcaagatcatgtacgtgggcgacgtgcggagcgtgacacagaagcatatccaggagtggggccctttcgacctggtgatcggcggcagcccttgcaatgacctgagcatcgtgaacccagcccggaagggcctgtacgagggaaccggcagactgttcttcgagttttacagactgctgcacgacgcccggcctaaggaaggcgacgaccggcccttcttttggctgttcgagaatgtggtggccatgggagtcagcgacaagcgggatattagccggttcctggagagcaaccccgtgatgatcgatgccaaggaagtgagcgccgcccaccgggccagatacttctggggcaatctgcctggcatgaacagacccctggccagcaccgtgaacgacaagctggagctgcaggagtgcctggagcacggccggatcgccaagttcagcaaggtgagaaccatcaccacccgaagcaacagcatcaaacaaggcaaggaccagcactttcctgtgttcatgaacgagaaggaggacatcctgtggtgtaccgagatggagagagtgttcgggttcccagtccactacacagatgtcagcaacatgtctagactggccagacagagactgctgggaagaagctggtccgtccctgtgatcagacacctgttcgcccctctgaaggagtacttcgcctgcgtgagcagcggcaacagcaacgccaacagccggggccccagcttctctagcggcctggtgccactgtccctgagagggagccacatgggccccatggagatctacaaaaccgtgagcgcctggaagcggcagcctgtgcgcgtgctgagcctgtttcggaatatcgataaagtcctgaaaagcctgggattcctggagagcggctctggctccggcggtggcaccctgaagtacgtggaggatgtgacaaacgtggtcagacgggatgtggagaagtggggccccttcgatctggtgtacggcagcacccaacccctgggcagctcttgtgaccggtgccctggctggtacatgtttcagttccaccggatcctgcagtacgccctgccgagacaggagtcccagcggccattcttttggattttcatggacaacttgctgctgaccgaggatgaccaggaaactaccactcggttcctgcagaccgaagccgtgaccctgcaggacgtgagaggccgggactaccagaacgccatgcgggtgtggtccaacatccctggactgaaaagcaagcacgcacctctgacccctaaagaagaggagtacctgcaggcccaggtgcggagcagaagcaagctggacgcccctaaggtggatctgctggtgaagaattgcctcctgcccctgagagagtacttcaagtatttcagccagaatagtctgcccctgggcggcccaagcagcggcgcccctcctcccagcggcggcagcccagccggctccccaacctctaccgaggagggcacctctgagtccgccacccccgagagcggccctggcacctccaccgagcccagcgagggcagcgcacccggcagccctgccggcagccccacctccacagaggagggaaccagcaccgagcccagcgaaggcagcgccccaggcaccagcaccgagcctagtgagggcggctctggcggcggcagcgcccaggagattaaacggatcaacaagatcagaagaagacttgtgaaagacagcaacaccaagaaggccggcaagacaggccccatgaaaaccctgctggttagagtgatgacacccgatctgagagagcggctggaaaacctgagaaagaagcctgaaaatatcccccagcccatcagcaatacatctagagccaacctgaataagctgctgaccgattacaccgaaatgaagaaggcgatcctgcatgtgtactgggaagagttccagaaggaccctgtgggcctgatgagccgggtggcccagcctgccagcaagaagatcgatcagaacaagctgaaacctgagatggacgagaagggcaacctgaccaccgccggctttgcctgctctcagtgtggccagcccctgttcgtgtacaagctggagcaggtgtctgagaagggcaaggcttacaccaactacttcggacggtgcaatgtggccgagcacgaaaagctgatcctgctggcccagctgaagcccgagaaggatagcgacgaagccgtgacatatagcctgggaaagtttgggcagagggccctggatttctacagcattcatgtgaccaaggagtccacccaccccgtgaagcccctggcccagatcgccggaaacagatacgcctccggacctgtgggaaaggccctgagcgacgcatgtatgggcacaatcgcctccttcctgtctaagtaccaggacatcatcatcgaacaccagaaggtggtgaagggcaaccagaagagactggagagcctgcgggagctggccggcaaggaaaacctggaataccctagcgtgaccctgccacctcagcctcacaccaaggagggcgttgatgcctacaacgaagtgatcgcccgggtgcgaatgtgggtgaacctgaacctgtggcagaagctgaagctaagcagagatgatgccaagcctctgctgagactgaagggattcccttcctttcctctggtcgagagacaggccaacgaagtggactggtgggacatggtgtgtaacgtgaagaagctgatcaacgagaaaaaggaggatggcaaggtgttttggcagaatctggctggctacaagagacaggaagccctgagaccatacctgagcagcgaggaagatcggaagaagggaaagaaattcgctcggtaccagctgggcgacctgctgctgcacctggaaaagaagcacggcgaggactggggaaaggtgtacgacgaggcctgggagcggattgacaagaaagtggaaggcctgagcaagcacatcaagctggaagaggaacggagaagcgaggacgcccagagcaaggccgccctgaccgactggctgcgggctaaggccagcttcgtgatcgagggcctgaaggaggccgacaaggacgagttctgcagatgcgagctgaagctgcagaagtggtacggggacctgcggggaaagcccttcgccatcgaagccgagaacagcatcctggacatcagcggcttcagcaagcagtacaactgtgccttcatctggcagaaggacggcgtgaagaagctgaacctgtacctgatcatcaactacttcaagggcggcaagctgcggttcaagaagatcaaacctgaagccttcgaagccaacagattctacaccgtgatcaacaaaaagagcggcgagatcgtgcccatggaggtgaacttcaacttcgacgaccccaacctgatcatcctgcctctggcctttggcaagagacagggcagagaattcatctggaacgacctgctgtccctggaaaccggcagcctgaagctggccaacggaagagtgatcgagaagacactgtacaacagaagaacccggcaggatgagcctgccctgttcgtggccctgaccttcgagcggcgggaggtcctggactcctccaatatcaaaccaatgaacctgatcggcgtggcaagaggcgaaaacatccccgccgtgatcgccctgaccgaccccgagggctgcccactgagccggtttaaggatagcctgggaaacccaacccacatcctgagaatcggcgagagctataaggagaagcagcggaccatccaggccaagaaggaggtggagcagcggagagccggcggctacagccggaagtacgccagcaaagccaagaatctggcagacgatatggtgagaaacaccgctagagatctgctgtactacgccgtgacccaggatgccatgctgatcttcgccaacctgagccggggcttcggccggcagggcaagcggaccttcatggccgagagacagtacacacggatggaggactggctgaccgccaagctggcctacgagggcctgagcaagacctacctgtccaagacactggcccagtacacctccaagacatgcagcaactgtgggtttaccatcaccagcgccgactacgacagggtgctggagaagctgaagaagacagcaacaggctggatgaccacaattaacggcaaggagctgaaggtggagggccagattacctactacaacagatacaagagacagaacgtagtcaaggacctgtccgtcgagctggatagactgagcgaagaatctgtgaacaacgacatctcctcctggacaaagggcagaagcggagaagctctgagcctcctgaagaaaagattctcccatagacccgtgcaggagaagttcgtgtgcctgaactgcggcttcgagacacacgcagccgagcaagccgccctgaacatcgccagatcctggctgttcctgcggagccaggagtacaagaaataccagacaaacaagacaaccggcaacaccgataagagagccttcgtcgagacctggcagtccttttaccggaagaagcttaaggaggtgtggaaacctgccgtgcggtctggcggatctggcggaggctccacaagcagcaaggtgcccgtgaccttcggcgacctggccatctacttcagccaggaggagtgggagtggctgagccccatccagaaggacctgtacgaggacgtgatgctggagaactaccagaacctggtgagcctgggcctgagcttcaggaggcccaacgtgatcaccctgctggagaagggcagggccccctggatggtggagcccgtgaggaagaggagggtgctggacagcaggagcaagtacaccagccccaagaaaaagagaaaagtctaagctgccttctgcggggcttgccttctggccatgcccttcttctctcccttgcacctgtacctcttggtctttgaataaagcctgagtaggaaggctagcaaaaaaaaaaaaaaaaaaaaaaaaaaaaaaaaaaaaaaaaaaaaaaaaaaaaaaaaaaaaaaaaaaaaaaaaaaaaaaaa

SEQ ID NO: 7295 - RNA, 5797 nt, synthetic construct
  source 1..5797: mol_type = other RNA
aggaaataagagagaaaagaagagtaagaagaaatataagagccaccatggcccctaagaagaagcgtaaagtgagccggatggaacgcctcgtctacgaggtgcggcagaagtgcagaaacatcgaggacatctgcatctcctgcggatctctgaacgtgaccctggagcacccactgttcatcggcggcatgtgccagaactgtaaaaactgttttctggagtgtgcctatcaatacgacgatgacggctaccagagctactgcaccatctgttgcggcggaagagaggtgctgatgtgtggaaataacaactgctgccggtgcttctgcgtggaatgcgtggacctgctggtgggccccggcgccgcccaggccgctattaaggaagatccttggaactgctacatgtgcggccacaagggcacatacggcctgctgagacggagagaggactggcctagcagactgcagatgttcttcgccaataaccacgaccaggagttcgacccccctaaggtgtaccctcccgtccccgccgagaagagaaagcccatccgggtcctgagcctgttcgatggcatcgccaccggtctgctggtgctgaaggacctgggcatccaggtggataggtacattgcctccgaggtgtgcgaggactccatcaccgtgggaatggtgcgtcatcagggcaagatcatgtacgtgggcgacgtgcggagcgtgacacagaagcatatccaggagtggggccctttcgacctggtgatcggcggcagcccttgcaatgacctgagcatcgtgaacccagcccggaagggcctgtacgagggaaccggcagactgttcttcgagttttacagactgctgcacgacgcccggcctaaggaaggcgacgaccggcccttcttttggctgttcgagaatgtggtggccatgggagtcagcgacaagcgggatattagccggttcctggagagcaaccccgtgatgatcgatgccaaggaagtgagcgccgcccaccgggccagatacttctggggcaatctgcctggcatgaacagacccctggccagcaccgtgaacgacaagctggagctgcaggagtgcctggagcacggccggatcgccaagttcagcaaggtgagaaccatcaccacccgaagcaacagcatcaaacaaggcaaggaccagcactttcctgtgttcatgaacgagaaggaggacatcctgtggtgtaccgagatggagagagtgttcgggttcccagtccactacacagatgtcagcaacatgtctagactggccagacagagactgctgggaagaagctggtccgtccctgtgatcagacacctgttcgcccctctgaaggagtacttcgcctgcgtgagcagcggcaacagcaacgccaacagccggggccccagcttctctagcggcctggtgccactgtccctgagagggagccacatgggccccatggagatctacaaaaccgtgagcgcctggaagcggcagcctgtgcgcgtgctgagcctgtttcggaatatcgataaagtcctgaaaagcctgggattcctggagagcggctctggctccggcggtggcaccctgaagtacgtggaggatgtgacaaacgtggtcagacgggatgtggagaagtggggccccttcgatctggtgtacggcagcacccaacccctgggcagctcttgtgaccggtgccctggctggtacatgtttcagttccaccggatcctgcagtacgccctgccgagacaggagtcccagcggccattcttttggattttcatggacaacttgctgctgaccgaggatgaccaggaaactaccactcggttcctgcagaccgaagccgtgaccctgcaggacgtgagaggccgggactaccagaacgccatgcgggtgtggtccaacatccctggactgaaaagcaagcacgcacctctgacccctaaagaagaggagtacctgcaggcccaggtgcggagcagaagcaagctggacgcccctaaggtggatctgctggtgaagaattgcctcctgcccctgagagagtacttcaagtatttcagccagaatagtctgcccctgggcggcccaagcagcggcgcccctcctcccagcggcggcagcccagccggctccccaacctctaccgaggagggcacctctgagtccgccacccccgagagcggccctggcacctccaccgagcccagcgagggcagcgcacccggcagccctgccggcagccccacctccacagaggagggaaccagcaccgagcccagcgaaggcagcgccccaggcaccagcaccgagcctagtgagggcggctctggcggcggcagcgcccaggagattaaacggatcaacaagatcagaagaagacttgtgaaagacagcaacaccaagaaggccggcaagacaggccccatgaaaaccctgctggttagagtgatgacacccgatctgagagagcggctggaaaacctgagaaagaagcctgaaaatatcccccagcccatcagcaatacatctagagccaacctgaataagctgctgaccgattacaccgaaatgaagaaggcgatcctgcatgtgtactgggaagagttccagaaggaccctgtgggcctgatgagccgggtggcccagcctgccagcaagaagatcgatcagaacaagctgaaacctgagatggacgagaagggcaacctgaccaccgccggctttgcctgctctcagtgtggccagcccctgttcgtgtacaagctggagcaggtgtctgagaagggcaaggcttacaccaactacttcggacggtgcaatgtggccgagcacgaaaagctgatcctgctggcccagctgaagcccgagaaggatagcgacgaagccgtgacatatagcctgggaaagtttgggcagagggccctggatttctacagcattcatgtgaccaaggagtccacccaccccgtgaagcccctggcccagatcgccggaaacagatacgcctccggacctgtgggaaaggccctgagcgacgcatgtatgggcacaatcgcctccttcctgtctaagtaccaggacatcatcatcgaacaccagaaggtggtgaagggcaaccagaagagactggagagcctgcgggagctggccggcaaggaaaacctggaataccctagcgtgaccctgccacctcagcctcacaccaaggagggcgttgatgcctacaacgaagtgatcgcccgggtgcgaatgtgggtgaacctgaacctgtggcagaagctgaagctaagcagagatgatgccaagcctctgctgagactgaagggattcccttcctttcctctggtcgagagacaggccaacgaagtggactggtgggacatggtgtgtaacgtgaagaagctgatcaacgagaaaaaggaggatggcaaggtgttttggcagaatctggctggctacaagagacaggaagccctgagaccatacctgagcagcgaggaagatcggaagaagggaaagaaattcgctcggtaccagctgggcgacctgctgctgcacctggaaaagaagcacggcgaggactggggaaaggtgtacgacgaggcctgggagcggattgacaagaaagtggaaggcctgagcaagcacatcaagctggaagaggaacggagaagcgaggacgcccagagcaaggccgccctgaccgactggctgcgggctaaggccagcttcgtgatcgagggcctgaaggaggccgacaaggacgagttctgcagatgcgagctgaagctgcagaagtggtacggggacctgcggggaaagcccttcgccatcgaagccgagaacagcatcctggacatcagcggcttcagcaagcagtacaactgtgccttcatctggcagaaggacggcgtgaagaagctgaacctgtacctgatcatcaactacttcaagggcggcaagctgcggttcaagaagatcaaacctgaagccttcgaagccaacagattctacaccgtgatcaacaaaaagagcggcgagatcgtgcccatggaggtgaacttcaacttcgacgaccccaacctgatcatcctgcctctggcctttggcaagagacagggcagagaattcatctggaacgacctgctgtccctggaaaccggcagcctgaagctggccaacggaagagtgatcgagaagacactgtacaacagaagaacccggcaggatgagcctgccctgttcgtggccctgaccttcgagcggcgggaggtcctggactcctccaatatcaaaccaatgaacctgatcggcgtggcaagaggcgaaaacatccccgccgtgatcgccctgaccgaccccgagggctgcccactgagccggtttaaggatagcctgggaaacccaacccacatcctgagaatcggcgagagctataaggagaagcagcggaccatccaggccaagaaggaggtggagcagcggagagccggcggctacagccggaagtacgccagcaaagccaagaatctggcagacgatatggtgagaaacaccgctagagatctgctgtactacgccgtgacccaggatgccatgctgatcttcgccaacctgagccggggcttcggccggcagggcaagcggaccttcatggccgagagacagtacacacggatggaggactggctgaccgccaagctggcctacgagggcctgagcaagacctacctgtccaagacactggcccagtacacctccaagacatgcagcaactgtgggtttaccatcaccagcgccgactacgacagggtgctggagaagctgaagaagacagcaacaggctggatgaccacaattaacggcaaggagctgaaggtggagggccagattacctactacaacagatacaagagacagaacgtagtcaaggacctgtccgtcgagctggatagactgagcgaagaatctgtgaacaacgacatctcctcctggacaaagggcagaagcggagaagctctgagcctcctgaagaaaagattctcccatagacccgtgcaggagaagttcgtgtgcctgaactgcggcttcgagacacacgcagccgagcaagccgccctgaacatcgccagatcctggctgttcctgcggagccaggagtacaagaaataccagacaaacaagacaaccggcaacaccgataagagagccttcgtcgagacctggcagtccttttaccggaagaagcttaaggaggtgtggaaacctgccgtgcggtctggcggatctggcggaggctccacaagcgcccccctgcccctgaccttcgaggacgtggccgtgtacttcagcgagcaggagtggaggaacctggaggcctggcagaaggagctgtacaagcaggtgatgaggaccaactacgagatcctggtgagcctggacgacggcctgcccaagcccgagctgatcagctggctggagcagggcagggagctgttcaagaactggggcgagagccagaagagcggcaacatcatctgcttcagcgccaccagccccaagaaaaagagaaaagtctaagctgccttctgcggggcttgccttctggccatgcccttcttctctcccttgcacctgtacctcttggtctttgaataaagcctgagtaggaaggctagcaaaaaaaaaaaaaaaaaaaaaaaaaaaaaaaaaaaaaaaaaaaaaaaaaaaaaaaaaaaaaaaaaaaaaaaaaaaaaaaa

SEQ ID NO: 7296 - RNA, 5797 nt, synthetic construct
  source 1..5797: mol_type = other RNA
aggaaataagagagaaaagaagagtaagaagaaatataagagccaccatggcccctaagaagaagcgtaaagtgagccggatggaacgcctcgtctacgaggtgcggcagaagtgcagaaacatcgaggacatctgcatctcctgcggatctctgaacgtgaccctggagcacccactgttcatcggcggcatgtgccagaactgtaaaaactgttttctggagtgtgcctatcaatacgacgatgacggctaccagagctactgcaccatctgttgcggcggaagagaggtgctgatgtgtggaaataacaactgctgccggtgcttctgcgtggaatgcgtggacctgctggtgggccccggcgccgcccaggccgctattaaggaagatccttggaactgctacatgtgcggccacaagggcacatacggcctgctgagacggagagaggactggcctagcagactgcagatgttcttcgccaataaccacgaccaggagttcgacccccctaaggtgtaccctcccgtccccgccgagaagagaaagcccatccgggtcctgagcctgttcgatggcatcgccaccggtctgctggtgctgaaggacctgggcatccaggtggataggtacattgcctccgaggtgtgcgaggactccatcaccgtgggaatggtgcgtcatcagggcaagatcatgtacgtgggcgacgtgcggagcgtgacacagaagcatatccaggagtggggccctttcgacctggtgatcggcggcagcccttgcaatgacctgagcatcgtgaacccagcccggaagggcctgtacgagggaaccggcagactgttcttcgagttttacagactgctgcacgacgcccggcctaaggaaggcgacgaccggcccttcttttggctgttcgagaatgtggtggccatgggagtcagcgacaagcgggatattagccggttcctggagagcaaccccgtgatgatcgatgccaaggaagtgagcgccgcccaccgggccagatacttctggggcaatctgcctggcatgaacagacccctggccagcaccgtgaacgacaagctggagctgcaggagtgcctggagcacggccggatcgccaagttcagcaaggtgagaaccatcaccacccgaagcaacagcatcaaacaaggcaaggaccagcactttcctgtgttcatgaacgagaaggaggacatcctgtggtgtaccgagatggagagagtgttcgggttcccagtccactacacagatgtcagcaacatgtctagactggccagacagagactgctgggaagaagctggtccgtccctgtgatcagacacctgttcgcccctctgaaggagtacttcgcctgcgtgagcagcggcaacagcaacgccaacagccggggccccagcttctctagcggcctggtgccactgtccctgagagggagccacatgggccccatggagatctacaaaaccgtgagcgcctggaagcggcagcctgtgcgcgtgctgagcctgtttcggaatatcgataaagtcctgaaaagcctgggattcctggagagcggctctggctccggcggtggcaccctgaagtacgtggaggatgtgacaaacgtggtcagacgggatgtggagaagtggggccccttcgatctggtgtacggcagcacccaacccctgggcagctcttgtgaccggtgccctggctggtacatgtttcagttccaccggatcctgcagtacgccctgccgagacaggagtcccagcggccattcttttggattttcatggacaacttgctgctgaccgaggatgaccaggaaactaccactcggttcctgcagaccgaagccgtgaccctgcaggacgtgagaggccgggactaccagaacgccatgcgggtgtggtccaacatccctggactgaaaagcaagcacgcacctctgacccctaaagaagaggagtacctgcaggcccaggtgcggagcagaagcaagctggacgcccctaaggtggatctgctggtgaagaattgcctcctgcccctgagagagtacttcaagtatttcagccagaatagtctgcccctgggcggcccaagcagcggcgcccctcctcccagcggcggcagcccagccggctccccaacctctaccgaggagggcacctctgagtccgccacccccgagagcggccctggcacctccaccgagcccagcgagggcagcgcacccggcagccctgccggcagccccacctccacagaggagggaaccagcaccgagcccagcgaaggcagcgccccaggcaccagcaccgagcctagtgagggcggctctggcggcggcagcgcccaggagattaaacggatcaacaagatcagaagaagacttgtgaaagacagcaacaccaagaaggccggcaagacaggccccatgaaaaccctgctggttagagtgatgacacccgatctgagagagcggctggaaaacctgagaaagaagcctgaaaatatcccccagcccatcagcaatacatctagagccaacctgaataagctgctgaccgattacaccgaaatgaagaaggcgatcctgcatgtgtactgggaagagttccagaaggaccctgtgggcctgatgagccgggtggcccagcctgccagcaagaagatcgatcagaacaagctgaaacctgagatggacgagaagggcaacctgaccaccgccggctttgcctgctctcagtgtggccagcccctgttcgtgtacaagctggagcaggtgtctgagaagggcaaggcttacaccaactacttcggacggtgcaatgtggccgagcacgaaaagctgatcctgctggcccagctgaagcccgagaaggatagcgacgaagccgtgacatatagcctgggaaagtttgggcagagggccctggatttctacagcattcatgtgaccaaggagtccacccaccccgtgaagcccctggcccagatcgccggaaacagatacgcctccggacctgtgggaaaggccctgagcgacgcatgtatgggcacaatcgcctccttcctgtctaagtaccaggacatcatcatcgaacaccagaaggtggtgaagggcaaccagaagagactggagagcctgcgggagctggccggcaaggaaaacctggaataccctagcgtgaccctgccacctcagcctcacaccaaggagggcgttgatgcctacaacgaagtgatcgcccgggtgcgaatgtgggtgaacctgaacctgtggcagaagctgaagctaagcagagatgatgccaagcctctgctgagactgaagggattcccttcctttcctctggtcgagagacaggccaacgaagtggactggtgggacatggtgtgtaacgtgaagaagctgatcaacgagaaaaaggaggatggcaaggtgttttggcagaatctggctggctacaagagacaggaagccctgagaccatacctgagcagcgaggaagatcggaagaagggaaagaaattcgctcggtaccagctgggcgacctgctgctgcacctggaaaagaagcacggcgaggactggggaaaggtgtacgacgaggcctgggagcggattgacaagaaagtggaaggcctgagcaagcacatcaagctggaagaggaacggagaagcgaggacgcccagagcaaggccgccctgaccgactggctgcgggctaaggccagcttcgtgatcgagggcctgaaggaggccgacaaggacgagttctgcagatgcgagctgaagctgcagaagtggtacggggacctgcggggaaagcccttcgccatcgaagccgagaacagcatcctggacatcagcggcttcagcaagcagtacaactgtgccttcatctggcagaaggacggcgtgaagaagctgaacctgtacctgatcatcaactacttcaagggcggcaagctgcggttcaagaagatcaaacctgaagccttcgaagccaacagattctacaccgtgatcaacaaaaagagcggcgagatcgtgcccatggaggtgaacttcaacttcgacgaccccaacctgatcatcctgcctctggcctttggcaagagacagggcagagaattcatctggaacgacctgctgtccctggaaaccggcagcctgaagctggccaacggaagagtgatcgagaagacactgtacaacagaagaacccggcaggatgagcctgccctgttcgtggccctgaccttcgagcggcgggaggtcctggactcctccaatatcaaaccaatgaacctgatcggcgtggcaagaggcgaaaacatccccgccgtgatcgccctgaccgaccccgagggctgcccactgagccggtttaaggatagcctgggaaacccaacccacatcctgagaatcggcgagagctataaggagaagcagcggaccatccaggccaagaaggaggtggagcagcggagagccggcggctacagccggaagtacgccagcaaagccaagaatctggcagacgatatggtgagaaacaccgctagagatctgctgtactacgccgtgacccaggatgccatgctgatcttcgccaacctgagccggggcttcggccggcagggcaagcggaccttcatggccgagagacagtacacacggatggaggactggctgaccgccaagctggcctacgagggcctgagcaagacctacctgtccaagacactggcccagtacacctccaagacatgcagcaactgtgggtttaccatcaccagcgccgactacgacagggtgctggagaagctgaagaagacagcaacaggctggatgaccacaattaacggcaaggagctgaaggtggagggccagattacctactacaacagatacaagagacagaacgtagtcaaggacctgtccgtcgagctggatagactgagcgaagaatctgtgaacaacgacatctcctcctggacaaagggcagaagcggagaagctctgagcctcctgaagaaaagattctcccatagacccgtgcaggagaagttcgtgtgcctgaactgcggcttcgagacacacgcagccgagcaagccgccctgaacatcgccagatcctggctgttcctgcggagccaggagtacaagaaataccagacaaacaagacaaccggcaacaccgataagagagccttcgtcgagacctggcagtccttttaccggaagaagcttaaggaggtgtggaaacctgccgtgcggtctggcggatctggcggaggctccacaagcagctacggcagcttcagcttcgaggacgtgaccgtgggcttcacccaggaggagtggcagcacctgggccccgcccagaggatcctgtacagggacgtgatgctggagaactacagccacctggtgagcgtgggctgctgcatccccaagcccgaggtgatcctgaagctggagcagggcgagcagccctggatcctggaggaggagagccccagccagagctaccccggcctgcccaccgacaccagccccaagaaaaagagaaaagtctaagctgccttctgcggggcttgccttctggccatgcccttcttctctcccttgcacctgtacctcttggtctttgaataaagcctgagtaggaaggctagcaaaaaaaaaaaaaaaaaaaaaaaaaaaaaaaaaaaaaaaaaaaaaaaaaaaaaaaaaaaaaaaaaaaaaaaaaaaaaaaa

SEQ ID NO: 7297 - RNA, 5797 nt, synthetic construct
  source 1..5797: mol_type = other RNA
aggaaataagagagaaaagaagagtaagaagaaatataagagccaccatggcccctaagaagaagcgtaaagtgagccggatggaacgcctcgtctacgaggtgcggcagaagtgcagaaacatcgaggacatctgcatctcctgcggatctctgaacgtgaccctggagcacccactgttcatcggcggcatgtgccagaactgtaaaaactgttttctggagtgtgcctatcaatacgacgatgacggctaccagagctactgcaccatctgttgcggcggaagagaggtgctgatgtgtggaaataacaactgctgccggtgcttctgcgtggaatgcgtggacctgctggtgggccccggcgccgcccaggccgctattaaggaagatccttggaactgctacatgtgcggccacaagggcacatacggcctgctgagacggagagaggactggcctagcagactgcagatgttcttcgccaataaccacgaccaggagttcgacccccctaaggtgtaccctcccgtccccgccgagaagagaaagcccatccgggtcctgagcctgttcgatggcatcgccaccggtctgctggtgctgaaggacctgggcatccaggtggataggtacattgcctccgaggtgtgcgaggactccatcaccgtgggaatggtgcgtcatcagggcaagatcatgtacgtgggcgacgtgcggagcgtgacacagaagcatatccaggagtggggccctttcgacctggtgatcggcggcagcccttgcaatgacctgagcatcgtgaacccagcccggaagggcctgtacgagggaaccggcagactgttcttcgagttttacagactgctgcacgacgcccggcctaaggaaggcgacgaccggcccttcttttggctgttcgagaatgtggtggccatgggagtcagcgacaagcgggatattagccggttcctggagagcaaccccgtgatgatcgatgccaaggaagtgagcgccgcccaccgggccagatacttctggggcaatctgcctggcatgaacagacccctggccagcaccgtgaacgacaagctggagctgcaggagtgcctggagcacggccggatcgccaagttcagcaaggtgagaaccatcaccacccgaagcaacagcatcaaacaaggcaaggaccagcactttcctgtgttcatgaacgagaaggaggacatcctgtggtgtaccgagatggagagagtgttcgggttcccagtccactacacagatgtcagcaacatgtctagactggccagacagagactgctgggaagaagctggtccgtccctgtgatcagacacctgttcgcccctctgaaggagtacttcgcctgcgtgagcagcggcaacagcaacgccaacagccggggccccagcttctctagcggcctggtgccactgtccctgagagggagccacatgggccccatggagatctacaaaaccgtgagcgcctggaagcggcagcctgtgcgcgtgctgagcctgtttcggaatatcgataaagtcctgaaaagcctgggattcctggagagcggctctggctccggcggtggcaccctgaagtacgtggaggatgtgacaaacgtggtcagacgggatgtggagaagtggggccccttcgatctggtgtacggcagcacccaacccctgggcagctcttgtgaccggtgccctggctggtacatgtttcagttccaccggatcctgcagtacgccctgccgagacaggagtcccagcggccattcttttggattttcatggacaacttgctgctgaccgaggatgaccaggaaactaccactcggttcctgcagaccgaagccgtgaccctgcaggacgtgagaggccgggactaccagaacgccatgcgggtgtggtccaacatccctggactgaaaagcaagcacgcacctctgacccctaaagaagaggagtacctgcaggcccaggtgcggagcagaagcaagctggacgcccctaaggtggatctgctggtgaagaattgcctcctgcccctgagagagtacttcaagtatttcagccagaatagtctgcccctgggcggcccaagcagcggcgcccctcctcccagcggcggcagcccagccggctccccaacctctaccgaggagggcacctctgagtccgccacccccgagagcggccctggcacctccaccgagcccagcgagggcagcgcacccggcagccctgccggcagccccacctccacagaggagggaaccagcaccgagcccagcgaaggcagcgccccaggcaccagcaccgagcctagtgagggcggctctggcggcggcagcgcccaggagattaaacggatcaacaagatcagaagaagacttgtgaaagacagcaacaccaagaaggccggcaagacaggccccatgaaaaccctgctggttagagtgatgacacccgatctgagagagcggctggaaaacctgagaaagaagcctgaaaatatcccccagcccatcagcaatacatctagagccaacctgaataagctgctgaccgattacaccgaaatgaagaaggcgatcctgcatgtgtactgggaagagttccagaaggaccctgtgggcctgatgagccgggtggcccagcctgccagcaagaagatcgatcagaacaagctgaaacctgagatggacgagaagggcaacctgaccaccgccggctttgcctgctctcagtgtggccagcccctgttcgtgtacaagctggagcaggtgtctgagaagggcaaggcttacaccaactacttcggacggtgcaatgtggccgagcacgaaaagctgatcctgctggcccagctgaagcccgagaaggatagcgacgaagccgtgacatatagcctgggaaagtttgggcagagggccctggatttctacagcattcatgtgaccaaggagtccacccaccccgtgaagcccctggcccagatcgccggaaacagatacgcctccggacctgtgggaaaggccctgagcgacgcatgtatgggcacaatcgcctccttcctgtctaagtaccaggacatcatcatcgaacaccagaaggtggtgaagggcaaccagaagagactggagagcctgcgggagctggccggcaaggaaaacctggaataccctagcgtgaccctgccacctcagcctcacaccaaggagggcgttgatgcctacaacgaagtgatcgcccgggtgcgaatgtgggtgaacctgaacctgtggcagaagctgaagctaagcagagatgatgccaagcctctgctgagactgaagggattcccttcctttcctctggtcgagagacaggccaacgaagtggactggtgggacatggtgtgtaacgtgaagaagctgatcaacgagaaaaaggaggatggcaaggtgttttggcagaatctggctggctacaagagacaggaagccctgagaccatacctgagcagcgaggaagatcggaagaagggaaagaaattcgctcggtaccagctgggcgacctgctgctgcacctggaaaagaagcacggcgaggactggggaaaggtgtacgacgaggcctgggagcggattgacaagaaagtggaaggcctgagcaagcacatcaagctggaagaggaacggagaagcgaggacgcccagagcaaggccgccctgaccgactggctgcgggctaaggccagcttcgtgatcgagggcctgaaggaggccgacaaggacgagttctgcagatgcgagctgaagctgcagaagtggtacggggacctgcggggaaagcccttcgccatcgaagccgagaacagcatcctggacatcagcggcttcagcaagcagtacaactgtgccttcatctggcagaaggacggcgtgaagaagctgaacctgtacctgatcatcaactacttcaagggcggcaagctgcggttcaagaagatcaaacctgaagccttcgaagccaacagattctacaccgtgatcaacaaaaagagcggcgagatcgtgcccatggaggtgaacttcaacttcgacgaccccaacctgatcatcctgcctctggcctttggcaagagacagggcagagaattcatctggaacgacctgctgtccctggaaaccggcagcctgaagctggccaacggaagagtgatcgagaagacactgtacaacagaagaacccggcaggatgagcctgccctgttcgtggccctgaccttcgagcggcgggaggtcctggactcctccaatatcaaaccaatgaacctgatcggcgtggcaagaggcgaaaacatccccgccgtgatcgccctgaccgaccccgagggctgcccactgagccggtttaaggatagcctgggaaacccaacccacatcctgagaatcggcgagagctataaggagaagcagcggaccatccaggccaagaaggaggtggagcagcggagagccggcggctacagccggaagtacgccagcaaagccaagaatctggcagacgatatggtgagaaacaccgctagagatctgctgtactacgccgtgacccaggatgccatgctgatcttcgccaacctgagccggggcttcggccggcagggcaagcggaccttcatggccgagagacagtacacacggatggaggactggctgaccgccaagctggcctacgagggcctgagcaagacctacctgtccaagacactggcccagtacacctccaagacatgcagcaactgtgggtttaccatcaccagcgccgactacgacagggtgctggagaagctgaagaagacagcaacaggctggatgaccacaattaacggcaaggagctgaaggtggagggccagattacctactacaacagatacaagagacagaacgtagtcaaggacctgtccgtcgagctggatagactgagcgaagaatctgtgaacaacgacatctcctcctggacaaagggcagaagcggagaagctctgagcctcctgaagaaaagattctcccatagacccgtgcaggagaagttcgtgtgcctgaactgcggcttcgagacacacgcagccgagcaagccgccctgaacatcgccagatcctggctgttcctgcggagccaggagtacaagaaataccagacaaacaagacaaccggcaacaccgataagagagccttcgtcgagacctggcagtccttttaccggaagaagcttaaggaggtgtggaaacctgccgtgcggtctggcggatctggcggaggctccacaagccccagcggcctggtgaccttcgaggaggtggccgtgtacttcaccagggaggagggcgccctgctggaccccacccagagggccctgtacagggacgtgatgcaggagaactacgagaccgtggtgctgctgggcttccccgtgagcaagcccgacgtgatcagccagctggagaggggcgaggagccctgggtgcccgacctgcagggcagcgagaaggaggtgctgcccagggccgcctgcaccagccccaagaaaaagagaaaagtctaagctgccttctgcggggcttgccttctggccatgcccttcttctctcccttgcacctgtacctcttggtctttgaataaagcctgagtaggaaggctagcaaaaaaaaaaaaaaaaaaaaaaaaaaaaaaaaaaaaaaaaaaaaaaaaaaaaaaaaaaaaaaaaaaaaaaaaaaaaaaaa

SEQ ID NO: 7298 - RNA, 5797 nt, synthetic construct
  source 1..5797: mol_type = other RNA
aggaaataagagagaaaagaagagtaagaagaaatataagagccaccatggcccctaagaagaagcgtaaagtgagccggatggaacgcctcgtctacgaggtgcggcagaagtgcagaaacatcgaggacatctgcatctcctgcggatctctgaacgtgaccctggagcacccactgttcatcggcggcatgtgccagaactgtaaaaactgttttctggagtgtgcctatcaatacgacgatgacggctaccagagctactgcaccatctgttgcggcggaagagaggtgctgatgtgtggaaataacaactgctgccggtgcttctgcgtggaatgcgtggacctgctggtgggccccggcgccgcccaggccgctattaaggaagatccttggaactgctacatgtgcggccacaagggcacatacggcctgctgagacggagagaggactggcctagcagactgcagatgttcttcgccaataaccacgaccaggagttcgacccccctaaggtgtaccctcccgtccccgccgagaagagaaagcccatccgggtcctgagcctgttcgatggcatcgccaccggtctgctggtgctgaaggacctgggcatccaggtggataggtacattgcctccgaggtgtgcgaggactccatcaccgtgggaatggtgcgtcatcagggcaagatcatgtacgtgggcgacgtgcggagcgtgacacagaagcatatccaggagtggggccctttcgacctggtgatcggcggcagcccttgcaatgacctgagcatcgtgaacccagcccggaagggcctgtacgagggaaccggcagactgttcttcgagttttacagactgctgcacgacgcccggcctaaggaaggcgacgaccggcccttcttttggctgttcgagaatgtggtggccatgggagtcagcgacaagcgggatattagccggttcctggagagcaaccccgtgatgatcgatgccaaggaagtgagcgccgcccaccgggccagatacttctggggcaatctgcctggcatgaacagacccctggccagcaccgtgaacgacaagctggagctgcaggagtgcctggagcacggccggatcgccaagttcagcaaggtgagaaccatcaccacccgaagcaacagcatcaaacaaggcaaggaccagcactttcctgtgttcatgaacgagaaggaggacatcctgtggtgtaccgagatggagagagtgttcgggttcccagtccactacacagatgtcagcaacatgtctagactggccagacagagactgctgggaagaagctggtccgtccctgtgatcagacacctgttcgcccctctgaaggagtacttcgcctgcgtgagcagcggcaacagcaacgccaacagccggggccccagcttctctagcggcctggtgccactgtccctgagagggagccacatgggccccatggagatctacaaaaccgtgagcgcctggaagcggcagcctgtgcgcgtgctgagcctgtttcggaatatcgataaagtcctgaaaagcctgggattcctggagagcggctctggctccggcggtggcaccctgaagtacgtggaggatgtgacaaacgtggtcagacgggatgtggagaagtggggccccttcgatctggtgtacggcagcacccaacccctgggcagctcttgtgaccggtgccctggctggtacatgtttcagttccaccggatcctgcagtacgccctgccgagacaggagtcccagcggccattcttttggattttcatggacaacttgctgctgaccgaggatgaccaggaaactaccactcggttcctgcagaccgaagccgtgaccctgcaggacgtgagaggccgggactaccagaacgccatgcgggtgtggtccaacatccctggactgaaaagcaagcacgcacctctgacccctaaagaagaggagtacctgcaggcccaggtgcggagcagaagcaagctggacgcccctaaggtggatctgctggtgaagaattgcctcctgcccctgagagagtacttcaagtatttcagccagaatagtctgcccctgggcggcccaagcagcggcgcccctcctcccagcggcggcagcccagccggctccccaacctctaccgaggagggcacctctgagtccgccacccccgagagcggccctggcacctccaccgagcccagcgagggcagcgcacccggcagccctgccggcagccccacctccacagaggagggaaccagcaccgagcccagcgaaggcagcgccccaggcaccagcaccgagcctagtgagggcggctctggcggcggcagcgcccaggagattaaacggatcaacaagatcagaagaagacttgtgaaagacagcaacaccaagaaggccggcaagacaggccccatgaaaaccctgctggttagagtgatgacacccgatctgagagagcggctggaaaacctgagaaagaagcctgaaaatatcccccagcccatcagcaatacatctagagccaacctgaataagctgctgaccgattacaccgaaatgaagaaggcgatcctgcatgtgtactgggaagagttccagaaggaccctgtgggcctgatgagccgggtggcccagcctgccagcaagaagatcgatcagaacaagctgaaacctgagatggacgagaagggcaacctgaccaccgccggctttgcctgctctcagtgtggccagcccctgttcgtgtacaagctggagcaggtgtctgagaagggcaaggcttacaccaactacttcggacggtgcaatgtggccgagcacgaaaagctgatcctgctggcccagctgaagcccgagaaggatagcgacgaagccgtgacatatagcctgggaaagtttgggcagagggccctggatttctacagcattcatgtgaccaaggagtccacccaccccgtgaagcccctggcccagatcgccggaaacagatacgcctccggacctgtgggaaaggccctgagcgacgcatgtatgggcacaatcgcctccttcctgtctaagtaccaggacatcatcatcgaacaccagaaggtggtgaagggcaaccagaagagactggagagcctgcgggagctggccggcaaggaaaacctggaataccctagcgtgaccctgccacctcagcctcacaccaaggagggcgttgatgcctacaacgaagtgatcgcccgggtgcgaatgtgggtgaacctgaacctgtggcagaagctgaagctaagcagagatgatgccaagcctctgctgagactgaagggattcccttcctttcctctggtcgagagacaggccaacgaagtggactggtgggacatggtgtgtaacgtgaagaagctgatcaacgagaaaaaggaggatggcaaggtgttttggcagaatctggctggctacaagagacaggaagccctgagaccatacctgagcagcgaggaagatcggaagaagggaaagaaattcgctcggtaccagctgggcgacctgctgctgcacctggaaaagaagcacggcgaggactggggaaaggtgtacgacgaggcctgggagcggattgacaagaaagtggaaggcctgagcaagcacatcaagctggaagaggaacggagaagcgaggacgcccagagcaaggccgccctgaccgactggctgcgggctaaggccagcttcgtgatcgagggcctgaaggaggccgacaaggacgagttctgcagatgcgagctgaagctgcagaagtggtacggggacctgcggggaaagcccttcgccatcgaagccgagaacagcatcctggacatcagcggcttcagcaagcagtacaactgtgccttcatctggcagaaggacggcgtgaagaagctgaacctgtacctgatcatcaactacttcaagggcggcaagctgcggttcaagaagatcaaacctgaagccttcgaagccaacagattctacaccgtgatcaacaaaaagagcggcgagatcgtgcccatggaggtgaacttcaacttcgacgaccccaacctgatcatcctgcctctggcctttggcaagagacagggcagagaattcatctggaacgacctgctgtccctggaaaccggcagcctgaagctggccaacggaagagtgatcgagaagacactgtacaacagaagaacccggcaggatgagcctgccctgttcgtggccctgaccttcgagcggcgggaggtcctggactcctccaatatcaaaccaatgaacctgatcggcgtggcaagaggcgaaaacatccccgccgtgatcgccctgaccgaccccgagggctgcccactgagccggtttaaggatagcctgggaaacccaacccacatcctgagaatcggcgagagctataaggagaagcagcggaccatccaggccaagaaggaggtggagcagcggagagccggcggctacagccggaagtacgccagcaaagccaagaatctggcagacgatatggtgagaaacaccgctagagatctgctgtactacgccgtgacccaggatgccatgctgatcttcgccaacctgagccggggcttcggccggcagggcaagcggaccttcatggccgagagacagtacacacggatggaggactggctgaccgccaagctggcctacgagggcctgagcaagacctacctgtccaagacactggcccagtacacctccaagacatgcagcaactgtgggtttaccatcaccagcgccgactacgacagggtgctggagaagctgaagaagacagcaacaggctggatgaccacaattaacggcaaggagctgaaggtggagggccagattacctactacaacagatacaagagacagaacgtagtcaaggacctgtccgtcgagctggatagactgagcgaagaatctgtgaacaacgacatctcctcctggacaaagggcagaagcggagaagctctgagcctcctgaagaaaagattctcccatagacccgtgcaggagaagttcgtgtgcctgaactgcggcttcgagacacacgcagccgagcaagccgccctgaacatcgccagatcctggctgttcctgcggagccaggagtacaagaaataccagacaaacaagacaaccggcaacaccgataagagagccttcgtcgagacctggcagtccttttaccggaagaagcttaaggaggtgtggaaacctgccgtgcggtctggcggatctggcggaggctccacaagcatggccttcagggacgtggccgtggacttcacccaggaggagtggatgctgctgagccccgcccagaggagcctgtacagggaggtgatgctggagaactacagcaacctggtgagcctgggcatccccttcagcaagcccaagctgatcacccagctggagcagggcaaggagacctggagggaggagaggaagtgcccccccgccaacggcccccccgagcccaagcccgagctgcacctgaccagccccaagaaaaagagaaaagtctaagctgccttctgcggggcttgccttctggccatgcccttcttctctcccttgcacctgtacctcttggtctttgaataaagcctgagtaggaaggctagcaaaaaaaaaaaaaaaaaaaaaaaaaaaaaaaaaaaaaaaaaaaaaaaaaaaaaaaaaaaaaaaaaaaaaaaaaaaaaaaa

SEQ ID NO: 7299 - RNA, 5797 nt, synthetic construct
  source 1..5797: mol_type = other RNA
aggaaataagagagaaaagaagagtaagaagaaatataagagccaccatggcccctaagaagaagcgtaaagtgagccggatggaacgcctcgtctacgaggtgcggcagaagtgcagaaacatcgaggacatctgcatctcctgcggatctctgaacgtgaccctggagcacccactgttcatcggcggcatgtgccagaactgtaaaaactgttttctggagtgtgcctatcaatacgacgatgacggctaccagagctactgcaccatctgttgcggcggaagagaggtgctgatgtgtggaaataacaactgctgccggtgcttctgcgtggaatgcgtggacctgctggtgggccccggcgccgcccaggccgctattaaggaagatccttggaactgctacatgtgcggccacaagggcacatacggcctgctgagacggagagaggactggcctagcagactgcagatgttcttcgccaataaccacgaccaggagttcgacccccctaaggtgtaccctcccgtccccgccgagaagagaaagcccatccgggtcctgagcctgttcgatggcatcgccaccggtctgctggtgctgaaggacctgggcatccaggtggataggtacattgcctccgaggtgtgcgaggactccatcaccgtgggaatggtgcgtcatcagggcaagatcatgtacgtgggcgacgtgcggagcgtgacacagaagcatatccaggagtggggccctttcgacctggtgatcggcggcagcccttgcaatgacctgagcatcgtgaacccagcccggaagggcctgtacgagggaaccggcagactgttcttcgagttttacagactgctgcacgacgcccggcctaaggaaggcgacgaccggcccttcttttggctgttcgagaatgtggtggccatgggagtcagcgacaagcgggatattagccggttcctggagagcaaccccgtgatgatcgatgccaaggaagtgagcgccgcccaccgggccagatacttctggggcaatctgcctggcatgaacagacccctggccagcaccgtgaacgacaagctggagctgcaggagtgcctggagcacggccggatcgccaagttcagcaaggtgagaaccatcaccacccgaagcaacagcatcaaacaaggcaaggaccagcactttcctgtgttcatgaacgagaaggaggacatcctgtggtgtaccgagatggagagagtgttcgggttcccagtccactacacagatgtcagcaacatgtctagactggccagacagagactgctgggaagaagctggtccgtccctgtgatcagacacctgttcgcccctctgaaggagtacttcgcctgcgtgagcagcggcaacagcaacgccaacagccggggccccagcttctctagcggcctggtgccactgtccctgagagggagccacatgggccccatggagatctacaaaaccgtgagcgcctggaagcggcagcctgtgcgcgtgctgagcctgtttcggaatatcgataaagtcctgaaaagcctgggattcctggagagcggctctggctccggcggtggcaccctgaagtacgtggaggatgtgacaaacgtggtcagacgggatgtggagaagtggggccccttcgatctggtgtacggcagcacccaacccctgggcagctcttgtgaccggtgccctggctggtacatgtttcagttccaccggatcctgcagtacgccctgccgagacaggagtcccagcggccattcttttggattttcatggacaacttgctgctgaccgaggatgaccaggaaactaccactcggttcctgcagaccgaagccgtgaccctgcaggacgtgagaggccgggactaccagaacgccatgcgggtgtggtccaacatccctggactgaaaagcaagcacgcacctctgacccctaaagaagaggagtacctgcaggcccaggtgcggagcagaagcaagctggacgcccctaaggtggatctgctggtgaagaattgcctcctgcccctgagagagtacttcaagtatttcagccagaatagtctgcccctgggcggcccaagcagcggcgcccctcctcccagcggcggcagcccagccggctccccaacctctaccgaggagggcacctctgagtccgccacccccgagagcggccctggcacctccaccgagcccagcgagggcagcgcacccggcagccctgccggcagccccacctccacagaggagggaaccagcaccgagcccagcgaaggcagcgccccaggcaccagcaccgagcctagtgagggcggctctggcggcggcagcgcccaggagattaaacggatcaacaagatcagaagaagacttgtgaaagacagcaacaccaagaaggccggcaagacaggccccatgaaaaccctgctggttagagtgatgacacccgatctgagagagcggctggaaaacctgagaaagaagcctgaaaatatcccccagcccatcagcaatacatctagagccaacctgaataagctgctgaccgattacaccgaaatgaagaaggcgatcctgcatgtgtactgggaagagttccagaaggaccctgtgggcctgatgagccgggtggcccagcctgccagcaagaagatcgatcagaacaagctgaaacctgagatggacgagaagggcaacctgaccaccgccggctttgcctgctctcagtgtggccagcccctgttcgtgtacaagctggagcaggtgtctgagaagggcaaggcttacaccaactacttcggacggtgcaatgtggccgagcacgaaaagctgatcctgctggcccagctgaagcccgagaaggatagcgacgaagccgtgacatatagcctgggaaagtttgggcagagggccctggatttctacagcattcatgtgaccaaggagtccacccaccccgtgaagcccctggcccagatcgccggaaacagatacgcctccggacctgtgggaaaggccctgagcgacgcatgtatgggcacaatcgcctccttcctgtctaagtaccaggacatcatcatcgaacaccagaaggtggtgaagggcaaccagaagagactggagagcctgcgggagctggccggcaaggaaaacctggaataccctagcgtgaccctgccacctcagcctcacaccaaggagggcgttgatgcctacaacgaagtgatcgcccgggtgcgaatgtgggtgaacctgaacctgtggcagaagctgaagctaagcagagatgatgccaagcctctgctgagactgaagggattcccttcctttcctctggtcgagagacaggccaacgaagtggactggtgggacatggtgtgtaacgtgaagaagctgatcaacgagaaaaaggaggatggcaaggtgttttggcagaatctggctggctacaagagacaggaagccctgagaccatacctgagcagcgaggaagatcggaagaagggaaagaaattcgctcggtaccagctgggcgacctgctgctgcacctggaaaagaagcacggcgaggactggggaaaggtgtacgacgaggcctgggagcggattgacaagaaagtggaaggcctgagcaagcacatcaagctggaagaggaacggagaagcgaggacgcccagagcaaggccgccctgaccgactggctgcgggctaaggccagcttcgtgatcgagggcctgaaggaggccgacaaggacgagttctgcagatgcgagctgaagctgcagaagtggtacggggacctgcggggaaagcccttcgccatcgaagccgagaacagcatcctggacatcagcggcttcagcaagcagtacaactgtgccttcatctggcagaaggacggcgtgaagaagctgaacctgtacctgatcatcaactacttcaagggcggcaagctgcggttcaagaagatcaaacctgaagccttcgaagccaacagattctacaccgtgatcaacaaaaagagcggcgagatcgtgcccatggaggtgaacttcaacttcgacgaccccaacctgatcatcctgcctctggcctttggcaagagacagggcagagaattcatctggaacgacctgctgtccctggaaaccggcagcctgaagctggccaacggaagagtgatcgagaagacactgtacaacagaagaacccggcaggatgagcctgccctgttcgtggccctgaccttcgagcggcgggaggtcctggactcctccaatatcaaaccaatgaacctgatcggcgtggcaagaggcgaaaacatccccgccgtgatcgccctgaccgaccccgagggctgcccactgagccggtttaaggatagcctgggaaacccaacccacatcctgagaatcggcgagagctataaggagaagcagcggaccatccaggccaagaaggaggtggagcagcggagagccggcggctacagccggaagtacgccagcaaagccaagaatctggcagacgatatggtgagaaacaccgctagagatctgctgtactacgccgtgacccaggatgccatgctgatcttcgccaacctgagccggggcttcggccggcagggcaagcggaccttcatggccgagagacagtacacacggatggaggactggctgaccgccaagctggcctacgagggcctgagcaagacctacctgtccaagacactggcccagtacacctccaagacatgcagcaactgtgggtttaccatcaccagcgccgactacgacagggtgctggagaagctgaagaagacagcaacaggctggatgaccacaattaacggcaaggagctgaaggtggagggccagattacctactacaacagatacaagagacagaacgtagtcaaggacctgtccgtcgagctggatagactgagcgaagaatctgtgaacaacgacatctcctcctggacaaagggcagaagcggagaagctctgagcctcctgaagaaaagattctcccatagacccgtgcaggagaagttcgtgtgcctgaactgcggcttcgagacacacgcagccgagcaagccgccctgaacatcgccagatcctggctgttcctgcggagccaggagtacaagaaataccagacaaacaagacaaccggcaacaccgataagagagccttcgtcgagacctggcagtccttttaccggaagaagcttaaggaggtgtggaaacctgccgtgcggtctggcggatctggcggaggctccacaagcatgggcctgctgaccttccaggacgtgaccgtggacttcacccaggaggagtgggagtgcctggacctgggccagaggggcctgtacagggacgtgatgctggagaactacggcaacctggcctgcctgggcctggtggtgagcaagcccgacctggtgaccttcctggagcagatgaaggacccctggaacgtgaggaggatcgagaccgccatctaccccggcatgtgcctgctgaacatcaccagccccaagaaaaagagaaaagtctaagctgccttctgcggggcttgccttctggccatgcccttcttctctcccttgcacctgtacctcttggtctttgaataaagcctgagtaggaaggctagcaaaaaaaaaaaaaaaaaaaaaaaaaaaaaaaaaaaaaaaaaaaaaaaaaaaaaaaaaaaaaaaaaaaaaaaaaaaaaaaa

SEQ ID NO: 7300 - RNA, 5797 nt, synthetic construct
  source 1..5797: mol_type = other RNA
aggaaataagagagaaaagaagagtaagaagaaatataagagccaccatggcccctaagaagaagcgtaaagtgagccggatggaacgcctcgtctacgaggtgcggcagaagtgcagaaacatcgaggacatctgcatctcctgcggatctctgaacgtgaccctggagcacccactgttcatcggcggcatgtgccagaactgtaaaaactgttttctggagtgtgcctatcaatacgacgatgacggctaccagagctactgcaccatctgttgcggcggaagagaggtgctgatgtgtggaaataacaactgctgccggtgcttctgcgtggaatgcgtggacctgctggtgggccccggcgccgcccaggccgctattaaggaagatccttggaactgctacatgtgcggccacaagggcacatacggcctgctgagacggagagaggactggcctagcagactgcagatgttcttcgccaataaccacgaccaggagttcgacccccctaaggtgtaccctcccgtccccgccgagaagagaaagcccatccgggtcctgagcctgttcgatggcatcgccaccggtctgctggtgctgaaggacctgggcatccaggtggataggtacattgcctccgaggtgtgcgaggactccatcaccgtgggaatggtgcgtcatcagggcaagatcatgtacgtgggcgacgtgcggagcgtgacacagaagcatatccaggagtggggccctttcgacctggtgatcggcggcagcccttgcaatgacctgagcatcgtgaacccagcccggaagggcctgtacgagggaaccggcagactgttcttcgagttttacagactgctgcacgacgcccggcctaaggaaggcgacgaccggcccttcttttggctgttcgagaatgtggtggccatgggagtcagcgacaagcgggatattagccggttcctggagagcaaccccgtgatgatcgatgccaaggaagtgagcgccgcccaccgggccagatacttctggggcaatctgcctggcatgaacagacccctggccagcaccgtgaacgacaagctggagctgcaggagtgcctggagcacggccggatcgccaagttcagcaaggtgagaaccatcaccacccgaagcaacagcatcaaacaaggcaaggaccagcactttcctgtgttcatgaacgagaaggaggacatcctgtggtgtaccgagatggagagagtgttcgggttcccagtccactacacagatgtcagcaacatgtctagactggccagacagagactgctgggaagaagctggtccgtccctgtgatcagacacctgttcgcccctctgaaggagtacttcgcctgcgtgagcagcggcaacagcaacgccaacagccggggccccagcttctctagcggcctggtgccactgtccctgagagggagccacatgggccccatggagatctacaaaaccgtgagcgcctggaagcggcagcctgtgcgcgtgctgagcctgtttcggaatatcgataaagtcctgaaaagcctgggattcctggagagcggctctggctccggcggtggcaccctgaagtacgtggaggatgtgacaaacgtggtcagacgggatgtggagaagtggggccccttcgatctggtgtacggcagcacccaacccctgggcagctcttgtgaccggtgccctggctggtacatgtttcagttccaccggatcctgcagtacgccctgccgagacaggagtcccagcggccattcttttggattttcatggacaacttgctgctgaccgaggatgaccaggaaactaccactcggttcctgcagaccgaagccgtgaccctgcaggacgtgagaggccgggactaccagaacgccatgcgggtgtggtccaacatccctggactgaaaagcaagcacgcacctctgacccctaaagaagaggagtacctgcaggcccaggtgcggagcagaagcaagctggacgcccctaaggtggatctgctggtgaagaattgcctcctgcccctgagagagtacttcaagtatttcagccagaatagtctgcccctgggcggcccaagcagcggcgcccctcctcccagcggcggcagcccagccggctccccaacctctaccgaggagggcacctctgagtccgccacccccgagagcggccctggcacctccaccgagcccagcgagggcagcgcacccggcagccctgccggcagccccacctccacagaggagggaaccagcaccgagcccagcgaaggcagcgccccaggcaccagcaccgagcctagtgagggcggctctggcggcggcagcgcccaggagattaaacggatcaacaagatcagaagaagacttgtgaaagacagcaacaccaagaaggccggcaagacaggccccatgaaaaccctgctggttagagtgatgacacccgatctgagagagcggctggaaaacctgagaaagaagcctgaaaatatcccccagcccatcagcaatacatctagagccaacctgaataagctgctgaccgattacaccgaaatgaagaaggcgatcctgcatgtgtactgggaagagttccagaaggaccctgtgggcctgatgagccgggtggcccagcctgccagcaagaagatcgatcagaacaagctgaaacctgagatggacgagaagggcaacctgaccaccgccggctttgcctgctctcagtgtggccagcccctgttcgtgtacaagctggagcaggtgtctgagaagggcaaggcttacaccaactacttcggacggtgcaatgtggccgagcacgaaaagctgatcctgctggcccagctgaagcccgagaaggatagcgacgaagccgtgacatatagcctgggaaagtttgggcagagggccctggatttctacagcattcatgtgaccaaggagtccacccaccccgtgaagcccctggcccagatcgccggaaacagatacgcctccggacctgtgggaaaggccctgagcgacgcatgtatgggcacaatcgcctccttcctgtctaagtaccaggacatcatcatcgaacaccagaaggtggtgaagggcaaccagaagagactggagagcctgcgggagctggccggcaaggaaaacctggaataccctagcgtgaccctgccacctcagcctcacaccaaggagggcgttgatgcctacaacgaagtgatcgcccgggtgcgaatgtgggtgaacctgaacctgtggcagaagctgaagctaagcagagatgatgccaagcctctgctgagactgaagggattcccttcctttcctctggtcgagagacaggccaacgaagtggactggtgggacatggtgtgtaacgtgaagaagctgatcaacgagaaaaaggaggatggcaaggtgttttggcagaatctggctggctacaagagacaggaagccctgagaccatacctgagcagcgaggaagatcggaagaagggaaagaaattcgctcggtaccagctgggcgacctgctgctgcacctggaaaagaagcacggcgaggactggggaaaggtgtacgacgaggcctgggagcggattgacaagaaagtggaaggcctgagcaagcacatcaagctggaagaggaacggagaagcgaggacgcccagagcaaggccgccctgaccgactggctgcgggctaaggccagcttcgtgatcgagggcctgaaggaggccgacaaggacgagttctgcagatgcgagctgaagctgcagaagtggtacggggacctgcggggaaagcccttcgccatcgaagccgagaacagcatcctggacatcagcggcttcagcaagcagtacaactgtgccttcatctggcagaaggacggcgtgaagaagctgaacctgtacctgatcatcaactacttcaagggcggcaagctgcggttcaagaagatcaaacctgaagccttcgaagccaacagattctacaccgtgatcaacaaaaagagcggcgagatcgtgcccatggaggtgaacttcaacttcgacgaccccaacctgatcatcctgcctctggcctttggcaagagacagggcagagaattcatctggaacgacctgctgtccctggaaaccggcagcctgaagctggccaacggaagagtgatcgagaagacactgtacaacagaagaacccggcaggatgagcctgccctgttcgtggccctgaccttcgagcggcgggaggtcctggactcctccaatatcaaaccaatgaacctgatcggcgtggcaagaggcgaaaacatccccgccgtgatcgccctgaccgaccccgagggctgcccactgagccggtttaaggatagcctgggaaacccaacccacatcctgagaatcggcgagagctataaggagaagcagcggaccatccaggccaagaaggaggtggagcagcggagagccggcggctacagccggaagtacgccagcaaagccaagaatctggcagacgatatggtgagaaacaccgctagagatctgctgtactacgccgtgacccaggatgccatgctgatcttcgccaacctgagccggggcttcggccggcagggcaagcggaccttcatggccgagagacagtacacacggatggaggactggctgaccgccaagctggcctacgagggcctgagcaagacctacctgtccaagacactggcccagtacacctccaagacatgcagcaactgtgggtttaccatcaccagcgccgactacgacagggtgctggagaagctgaagaagacagcaacaggctggatgaccacaattaacggcaaggagctgaaggtggagggccagattacctactacaacagatacaagagacagaacgtagtcaaggacctgtccgtcgagctggatagactgagcgaagaatctgtgaacaacgacatctcctcctggacaaagggcagaagcggagaagctctgagcctcctgaagaaaagattctcccatagacccgtgcaggagaagttcgtgtgcctgaactgcggcttcgagacacacgcagccgagcaagccgccctgaacatcgccagatcctggctgttcctgcggagccaggagtacaagaaataccagacaaacaagacaaccggcaacaccgataagagagccttcgtcgagacctggcagtccttttaccggaagaagcttaaggaggtgtggaaacctgccgtgcggtctggcggatctggcggaggctccacaagcatccagggcctgctgaccttcggcgacgtggccgtggccttcaccaggatcgagtggaggcacctggacgccgcccagagggccctgtacagggacgtgatgctggagaactacggcaacctggtgagcgtgggcctgctgagcagcaagcccaagctgatcgcccagctggagcagggcgccgagccctggatggaggtgagggaggcccccagcggcaccagggccgtgcccgactactggaccagccccaagaaaaagagaaaagtctaagctgccttctgcggggcttgccttctggccatgcccttcttctctcccttgcacctgtacctcttggtctttgaataaagcctgagtaggaaggctagcaaaaaaaaaaaaaaaaaaaaaaaaaaaaaaaaaaaaaaaaaaaaaaaaaaaaaaaaaaaaaaaaaaaaaaaaaaaaaaaa

SEQ ID NO: 7301 - RNA, 5797 nt, synthetic construct
  source 1..5797: mol_type = other RNA
aggaaataagagagaaaagaagagtaagaagaaatataagagccaccatggcccctaagaagaagcgtaaagtgagccggatggaacgcctcgtctacgaggtgcggcagaagtgcagaaacatcgaggacatctgcatctcctgcggatctctgaacgtgaccctggagcacccactgttcatcggcggcatgtgccagaactgtaaaaactgttttctggagtgtgcctatcaatacgacgatgacggctaccagagctactgcaccatctgttgcggcggaagagaggtgctgatgtgtggaaataacaactgctgccggtgcttctgcgtggaatgcgtggacctgctggtgggccccggcgccgcccaggccgctattaaggaagatccttggaactgctacatgtgcggccacaagggcacatacggcctgctgagacggagagaggactggcctagcagactgcagatgttcttcgccaataaccacgaccaggagttcgacccccctaaggtgtaccctcccgtccccgccgagaagagaaagcccatccgggtcctgagcctgttcgatggcatcgccaccggtctgctggtgctgaaggacctgggcatccaggtggataggtacattgcctccgaggtgtgcgaggactccatcaccgtgggaatggtgcgtcatcagggcaagatcatgtacgtgggcgacgtgcggagcgtgacacagaagcatatccaggagtggggccctttcgacctggtgatcggcggcagcccttgcaatgacctgagcatcgtgaacccagcccggaagggcctgtacgagggaaccggcagactgttcttcgagttttacagactgctgcacgacgcccggcctaaggaaggcgacgaccggcccttcttttggctgttcgagaatgtggtggccatgggagtcagcgacaagcgggatattagccggttcctggagagcaaccccgtgatgatcgatgccaaggaagtgagcgccgcccaccgggccagatacttctggggcaatctgcctggcatgaacagacccctggccagcaccgtgaacgacaagctggagctgcaggagtgcctggagcacggccggatcgccaagttcagcaaggtgagaaccatcaccacccgaagcaacagcatcaaacaaggcaaggaccagcactttcctgtgttcatgaacgagaaggaggacatcctgtggtgtaccgagatggagagagtgttcgggttcccagtccactacacagatgtcagcaacatgtctagactggccagacagagactgctgggaagaagctggtccgtccctgtgatcagacacctgttcgcccctctgaaggagtacttcgcctgcgtgagcagcggcaacagcaacgccaacagccggggccccagcttctctagcggcctggtgccactgtccctgagagggagccacatgggccccatggagatctacaaaaccgtgagcgcctggaagcggcagcctgtgcgcgtgctgagcctgtttcggaatatcgataaagtcctgaaaagcctgggattcctggagagcggctctggctccggcggtggcaccctgaagtacgtggaggatgtgacaaacgtggtcagacgggatgtggagaagtggggccccttcgatctggtgtacggcagcacccaacccctgggcagctcttgtgaccggtgccctggctggtacatgtttcagttccaccggatcctgcagtacgccctgccgagacaggagtcccagcggccattcttttggattttcatggacaacttgctgctgaccgaggatgaccaggaaactaccactcggttcctgcagaccgaagccgtgaccctgcaggacgtgagaggccgggactaccagaacgccatgcgggtgtggtccaacatccctggactgaaaagcaagcacgcacctctgacccctaaagaagaggagtacctgcaggcccaggtgcggagcagaagcaagctggacgcccctaaggtggatctgctggtgaagaattgcctcctgcccctgagagagtacttcaagtatttcagccagaatagtctgcccctgggcggcccaagcagcggcgcccctcctcccagcggcggcagcccagccggctccccaacctctaccgaggagggcacctctgagtccgccacccccgagagcggccctggcacctccaccgagcccagcgagggcagcgcacccggcagccctgccggcagccccacctccacagaggagggaaccagcaccgagcccagcgaaggcagcgccccaggcaccagcaccgagcctagtgagggcggctctggcggcggcagcgcccaggagattaaacggatcaacaagatcagaagaagacttgtgaaagacagcaacaccaagaaggccggcaagacaggccccatgaaaaccctgctggttagagtgatgacacccgatctgagagagcggctggaaaacctgagaaagaagcctgaaaatatcccccagcccatcagcaatacatctagagccaacctgaataagctgctgaccgattacaccgaaatgaagaaggcgatcctgcatgtgtactgggaagagttccagaaggaccctgtgggcctgatgagccgggtggcccagcctgccagcaagaagatcgatcagaacaagctgaaacctgagatggacgagaagggcaacctgaccaccgccggctttgcctgctctcagtgtggccagcccctgttcgtgtacaagctggagcaggtgtctgagaagggcaaggcttacaccaactacttcggacggtgcaatgtggccgagcacgaaaagctgatcctgctggcccagctgaagcccgagaaggatagcgacgaagccgtgacatatagcctgggaaagtttgggcagagggccctggatttctacagcattcatgtgaccaaggagtccacccaccccgtgaagcccctggcccagatcgccggaaacagatacgcctccggacctgtgggaaaggccctgagcgacgcatgtatgggcacaatcgcctccttcctgtctaagtaccaggacatcatcatcgaacaccagaaggtggtgaagggcaaccagaagagactggagagcctgcgggagctggccggcaaggaaaacctggaataccctagcgtgaccctgccacctcagcctcacaccaaggagggcgttgatgcctacaacgaagtgatcgcccgggtgcgaatgtgggtgaacctgaacctgtggcagaagctgaagctaagcagagatgatgccaagcctctgctgagactgaagggattcccttcctttcctctggtcgagagacaggccaacgaagtggactggtgggacatggtgtgtaacgtgaagaagctgatcaacgagaaaaaggaggatggcaaggtgttttggcagaatctggctggctacaagagacaggaagccctgagaccatacctgagcagcgaggaagatcggaagaagggaaagaaattcgctcggtaccagctgggcgacctgctgctgcacctggaaaagaagcacggcgaggactggggaaaggtgtacgacgaggcctgggagcggattgacaagaaagtggaaggcctgagcaagcacatcaagctggaagaggaacggagaagcgaggacgcccagagcaaggccgccctgaccgactggctgcgggctaaggccagcttcgtgatcgagggcctgaaggaggccgacaaggacgagttctgcagatgcgagctgaagctgcagaagtggtacggggacctgcggggaaagcccttcgccatcgaagccgagaacagcatcctggacatcagcggcttcagcaagcagtacaactgtgccttcatctggcagaaggacggcgtgaagaagctgaacctgtacctgatcatcaactacttcaagggcggcaagctgcggttcaagaagatcaaacctgaagccttcgaagccaacagattctacaccgtgatcaacaaaaagagcggcgagatcgtgcccatggaggtgaacttcaacttcgacgaccccaacctgatcatcctgcctctggcctttggcaagagacagggcagagaattcatctggaacgacctgctgtccctggaaaccggcagcctgaagctggccaacggaagagtgatcgagaagacactgtacaacagaagaacccggcaggatgagcctgccctgttcgtggccctgaccttcgagcggcgggaggtcctggactcctccaatatcaaaccaatgaacctgatcggcgtggcaagaggcgaaaacatccccgccgtgatcgccctgaccgaccccgagggctgcccactgagccggtttaaggatagcctgggaaacccaacccacatcctgagaatcggcgagagctataaggagaagcagcggaccatccaggccaagaaggaggtggagcagcggagagccggcggctacagccggaagtacgccagcaaagccaagaatctggcagacgatatggtgagaaacaccgctagagatctgctgtactacgccgtgacccaggatgccatgctgatcttcgccaacctgagccggggcttcggccggcagggcaagcggaccttcatggccgagagacagtacacacggatggaggactggctgaccgccaagctggcctacgagggcctgagcaagacctacctgtccaagacactggcccagtacacctccaagacatgcagcaactgtgggtttaccatcaccagcgccgactacgacagggtgctggagaagctgaagaagacagcaacaggctggatgaccacaattaacggcaaggagctgaaggtggagggccagattacctactacaacagatacaagagacagaacgtagtcaaggacctgtccgtcgagctggatagactgagcgaagaatctgtgaacaacgacatctcctcctggacaaagggcagaagcggagaagctctgagcctcctgaagaaaagattctcccatagacccgtgcaggagaagttcgtgtgcctgaactgcggcttcgagacacacgcagccgagcaagccgccctgaacatcgccagatcctggctgttcctgcggagccaggagtacaagaaataccagacaaacaagacaaccggcaacaccgataagagagccttcgtcgagacctggcagtccttttaccggaagaagcttaaggaggtgtggaaacctgccgtgcggtctggcggatctggcggaggctccacaagcctgctgaccttcgaggacgtggccctgttcttcaccgaggaggagtggcagctgctggaccccgcccagaagatcctgtactacaacgtgatgcaggagaactacgagaccgtgaccagcctgggcctgaagctgaagaacgacaccggcaacgaccagcccatcagcctgagcaccctggagatccaggccagcggctgcaaggtgctgaggaaggccaggatgaaggtggcccagaagaccaccagccccaagaaaaagagaaaagtctaagctgccttctgcggggcttgccttctggccatgcccttcttctctcccttgcacctgtacctcttggtctttgaataaagcctgagtaggaaggctagcaaaaaaaaaaaaaaaaaaaaaaaaaaaaaaaaaaaaaaaaaaaaaaaaaaaaaaaaaaaaaaaaaaaaaaaaaaaaaaaa

SEQ ID NO: 7302 - RNA, 5797 nt, synthetic construct
  source 1..5797: mol_type = other RNA
aggaaataagagagaaaagaagagtaagaagaaatataagagccaccatggcccctaagaagaagcgtaaagtgagccggatggaacgcctcgtctacgaggtgcggcagaagtgcagaaacatcgaggacatctgcatctcctgcggatctctgaacgtgaccctggagcacccactgttcatcggcggcatgtgccagaactgtaaaaactgttttctggagtgtgcctatcaatacgacgatgacggctaccagagctactgcaccatctgttgcggcggaagagaggtgctgatgtgtggaaataacaactgctgccggtgcttctgcgtggaatgcgtggacctgctggtgggccccggcgccgcccaggccgctattaaggaagatccttggaactgctacatgtgcggccacaagggcacatacggcctgctgagacggagagaggactggcctagcagactgcagatgttcttcgccaataaccacgaccaggagttcgacccccctaaggtgtaccctcccgtccccgccgagaagagaaagcccatccgggtcctgagcctgttcgatggcatcgccaccggtctgctggtgctgaaggacctgggcatccaggtggataggtacattgcctccgaggtgtgcgaggactccatcaccgtgggaatggtgcgtcatcagggcaagatcatgtacgtgggcgacgtgcggagcgtgacacagaagcatatccaggagtggggccctttcgacctggtgatcggcggcagcccttgcaatgacctgagcatcgtgaacccagcccggaagggcctgtacgagggaaccggcagactgttcttcgagttttacagactgctgcacgacgcccggcctaaggaaggcgacgaccggcccttcttttggctgttcgagaatgtggtggccatgggagtcagcgacaagcgggatattagccggttcctggagagcaaccccgtgatgatcgatgccaaggaagtgagcgccgcccaccgggccagatacttctggggcaatctgcctggcatgaacagacccctggccagcaccgtgaacgacaagctggagctgcaggagtgcctggagcacggccggatcgccaagttcagcaaggtgagaaccatcaccacccgaagcaacagcatcaaacaaggcaaggaccagcactttcctgtgttcatgaacgagaaggaggacatcctgtggtgtaccgagatggagagagtgttcgggttcccagtccactacacagatgtcagcaacatgtctagactggccagacagagactgctgggaagaagctggtccgtccctgtgatcagacacctgttcgcccctctgaaggagtacttcgcctgcgtgagcagcggcaacagcaacgccaacagccggggccccagcttctctagcggcctggtgccactgtccctgagagggagccacatgggccccatggagatctacaaaaccgtgagcgcctggaagcggcagcctgtgcgcgtgctgagcctgtttcggaatatcgataaagtcctgaaaagcctgggattcctggagagcggctctggctccggcggtggcaccctgaagtacgtggaggatgtgacaaacgtggtcagacgggatgtggagaagtggggccccttcgatctggtgtacggcagcacccaacccctgggcagctcttgtgaccggtgccctggctggtacatgtttcagttccaccggatcctgcagtacgccctgccgagacaggagtcccagcggccattcttttggattttcatggacaacttgctgctgaccgaggatgaccaggaaactaccactcggttcctgcagaccgaagccgtgaccctgcaggacgtgagaggccgggactaccagaacgccatgcgggtgtggtccaacatccctggactgaaaagcaagcacgcacctctgacccctaaagaagaggagtacctgcaggcccaggtgcggagcagaagcaagctggacgcccctaaggtggatctgctggtgaagaattgcctcctgcccctgagagagtacttcaagtatttcagccagaatagtctgcccctgggcggcccaagcagcggcgcccctcctcccagcggcggcagcccagccggctccccaacctctaccgaggagggcacctctgagtccgccacccccgagagcggccctggcacctccaccgagcccagcgagggcagcgcacccggcagccctgccggcagccccacctccacagaggagggaaccagcaccgagcccagcgaaggcagcgccccaggcaccagcaccgagcctagtgagggcggctctggcggcggcagcgcccaggagattaaacggatcaacaagatcagaagaagacttgtgaaagacagcaacaccaagaaggccggcaagacaggccccatgaaaaccctgctggttagagtgatgacacccgatctgagagagcggctggaaaacctgagaaagaagcctgaaaatatcccccagcccatcagcaatacatctagagccaacctgaataagctgctgaccgattacaccgaaatgaagaaggcgatcctgcatgtgtactgggaagagttccagaaggaccctgtgggcctgatgagccgggtggcccagcctgccagcaagaagatcgatcagaacaagctgaaacctgagatggacgagaagggcaacctgaccaccgccggctttgcctgctctcagtgtggccagcccctgttcgtgtacaagctggagcaggtgtctgagaagggcaaggcttacaccaactacttcggacggtgcaatgtggccgagcacgaaaagctgatcctgctggcccagctgaagcccgagaaggatagcgacgaagccgtgacatatagcctgggaaagtttgggcagagggccctggatttctacagcattcatgtgaccaaggagtccacccaccccgtgaagcccctggcccagatcgccggaaacagatacgcctccggacctgtgggaaaggccctgagcgacgcatgtatgggcacaatcgcctccttcctgtctaagtaccaggacatcatcatcgaacaccagaaggtggtgaagggcaaccagaagagactggagagcctgcgggagctggccggcaaggaaaacctggaataccctagcgtgaccctgccacctcagcctcacaccaaggagggcgttgatgcctacaacgaagtgatcgcccgggtgcgaatgtgggtgaacctgaacctgtggcagaagctgaagctaagcagagatgatgccaagcctctgctgagactgaagggattcccttcctttcctctggtcgagagacaggccaacgaagtggactggtgggacatggtgtgtaacgtgaagaagctgatcaacgagaaaaaggaggatggcaaggtgttttggcagaatctggctggctacaagagacaggaagccctgagaccatacctgagcagcgaggaagatcggaagaagggaaagaaattcgctcggtaccagctgggcgacctgctgctgcacctggaaaagaagcacggcgaggactggggaaaggtgtacgacgaggcctgggagcggattgacaagaaagtggaaggcctgagcaagcacatcaagctggaagaggaacggagaagcgaggacgcccagagcaaggccgccctgaccgactggctgcgggctaaggccagcttcgtgatcgagggcctgaaggaggccgacaaggacgagttctgcagatgcgagctgaagctgcagaagtggtacggggacctgcggggaaagcccttcgccatcgaagccgagaacagcatcctggacatcagcggcttcagcaagcagtacaactgtgccttcatctggcagaaggacggcgtgaagaagctgaacctgtacctgatcatcaactacttcaagggcggcaagctgcggttcaagaagatcaaacctgaagccttcgaagccaacagattctacaccgtgatcaacaaaaagagcggcgagatcgtgcccatggaggtgaacttcaacttcgacgaccccaacctgatcatcctgcctctggcctttggcaagagacagggcagagaattcatctggaacgacctgctgtccctggaaaccggcagcctgaagctggccaacggaagagtgatcgagaagacactgtacaacagaagaacccggcaggatgagcctgccctgttcgtggccctgaccttcgagcggcgggaggtcctggactcctccaatatcaaaccaatgaacctgatcggcgtggcaagaggcgaaaacatccccgccgtgatcgccctgaccgaccccgagggctgcccactgagccggtttaaggatagcctgggaaacccaacccacatcctgagaatcggcgagagctataaggagaagcagcggaccatccaggccaagaaggaggtggagcagcggagagccggcggctacagccggaagtacgccagcaaagccaagaatctggcagacgatatggtgagaaacaccgctagagatctgctgtactacgccgtgacccaggatgccatgctgatcttcgccaacctgagccggggcttcggccggcagggcaagcggaccttcatggccgagagacagtacacacggatggaggactggctgaccgccaagctggcctacgagggcctgagcaagacctacctgtccaagacactggcccagtacacctccaagacatgcagcaactgtgggtttaccatcaccagcgccgactacgacagggtgctggagaagctgaagaagacagcaacaggctggatgaccacaattaacggcaaggagctgaaggtggagggccagattacctactacaacagatacaagagacagaacgtagtcaaggacctgtccgtcgagctggatagactgagcgaagaatctgtgaacaacgacatctcctcctggacaaagggcagaagcggagaagctctgagcctcctgaagaaaagattctcccatagacccgtgcaggagaagttcgtgtgcctgaactgcggcttcgagacacacgcagccgagcaagccgccctgaacatcgccagatcctggctgttcctgcggagccaggagtacaagaaataccagacaaacaagacaaccggcaacaccgataagagagccttcgtcgagacctggcagtccttttaccggaagaagcttaaggaggtgtggaaacctgccgtgcggtctggcggatctggcggaggctccacaagcatccaggagctggtgaccttcaaggacgtggccgtggacttcacccaggaggagtggggcctgctgaacaacccccagaaggagctgtacaaggaggtgatgctggagaacgcccagaacatgctgagcctgggcctgcccgtgcccagggaggacctgttcagctacttcgaggagagggaggccccctggctgctggagcaggagggcctgaggagctgctgcgccgagagggagatcaggaccagccccaagaaaaagagaaaagtctaagctgccttctgcggggcttgccttctggccatgcccttcttctctcccttgcacctgtacctcttggtctttgaataaagcctgagtaggaaggctagcaaaaaaaaaaaaaaaaaaaaaaaaaaaaaaaaaaaaaaaaaaaaaaaaaaaaaaaaaaaaaaaaaaaaaaaaaaaaaaaa

SEQ ID NO: 7303 - RNA, 5797 nt, synthetic construct
  source 1..5797: mol_type = other RNA
aggaaataagagagaaaagaagagtaagaagaaatataagagccaccatggcccctaagaagaagcgtaaagtgagccggatggaacgcctcgtctacgaggtgcggcagaagtgcagaaacatcgaggacatctgcatctcctgcggatctctgaacgtgaccctggagcacccactgttcatcggcggcatgtgccagaactgtaaaaactgttttctggagtgtgcctatcaatacgacgatgacggctaccagagctactgcaccatctgttgcggcggaagagaggtgctgatgtgtggaaataacaactgctgccggtgcttctgcgtggaatgcgtggacctgctggtgggccccggcgccgcccaggccgctattaaggaagatccttggaactgctacatgtgcggccacaagggcacatacggcctgctgagacggagagaggactggcctagcagactgcagatgttcttcgccaataaccacgaccaggagttcgacccccctaaggtgtaccctcccgtccccgccgagaagagaaagcccatccgggtcctgagcctgttcgatggcatcgccaccggtctgctggtgctgaaggacctgggcatccaggtggataggtacattgcctccgaggtgtgcgaggactccatcaccgtgggaatggtgcgtcatcagggcaagatcatgtacgtgggcgacgtgcggagcgtgacacagaagcatatccaggagtggggccctttcgacctggtgatcggcggcagcccttgcaatgacctgagcatcgtgaacccagcccggaagggcctgtacgagggaaccggcagactgttcttcgagttttacagactgctgcacgacgcccggcctaaggaaggcgacgaccggcccttcttttggctgttcgagaatgtggtggccatgggagtcagcgacaagcgggatattagccggttcctggagagcaaccccgtgatgatcgatgccaaggaagtgagcgccgcccaccgggccagatacttctggggcaatctgcctggcatgaacagacccctggccagcaccgtgaacgacaagctggagctgcaggagtgcctggagcacggccggatcgccaagttcagcaaggtgagaaccatcaccacccgaagcaacagcatcaaacaaggcaaggaccagcactttcctgtgttcatgaacgagaaggaggacatcctgtggtgtaccgagatggagagagtgttcgggttcccagtccactacacagatgtcagcaacatgtctagactggccagacagagactgctgggaagaagctggtccgtccctgtgatcagacacctgttcgcccctctgaaggagtacttcgcctgcgtgagcagcggcaacagcaacgccaacagccggggccccagcttctctagcggcctggtgccactgtccctgagagggagccacatgggccccatggagatctacaaaaccgtgagcgcctggaagcggcagcctgtgcgcgtgctgagcctgtttcggaatatcgataaagtcctgaaaagcctgggattcctggagagcggctctggctccggcggtggcaccctgaagtacgtggaggatgtgacaaacgtggtcagacgggatgtggagaagtggggccccttcgatctggtgtacggcagcacccaacccctgggcagctcttgtgaccggtgccctggctggtacatgtttcagttccaccggatcctgcagtacgccctgccgagacaggagtcccagcggccattcttttggattttcatggacaacttgctgctgaccgaggatgaccaggaaactaccactcggttcctgcagaccgaagccgtgaccctgcaggacgtgagaggccgggactaccagaacgccatgcgggtgtggtccaacatccctggactgaaaagcaagcacgcacctctgacccctaaagaagaggagtacctgcaggcccaggtgcggagcagaagcaagctggacgcccctaaggtggatctgctggtgaagaattgcctcctgcccctgagagagtacttcaagtatttcagccagaatagtctgcccctgggcggcccaagcagcggcgcccctcctcccagcggcggcagcccagccggctccccaacctctaccgaggagggcacctctgagtccgccacccccgagagcggccctggcacctccaccgagcccagcgagggcagcgcacccggcagccctgccggcagccccacctccacagaggagggaaccagcaccgagcccagcgaaggcagcgccccaggcaccagcaccgagcctagtgagggcggctctggcggcggcagcgcccaggagattaaacggatcaacaagatcagaagaagacttgtgaaagacagcaacaccaagaaggccggcaagacaggccccatgaaaaccctgctggttagagtgatgacacccgatctgagagagcggctggaaaacctgagaaagaagcctgaaaatatcccccagcccatcagcaatacatctagagccaacctgaataagctgctgaccgattacaccgaaatgaagaaggcgatcctgcatgtgtactgggaagagttccagaaggaccctgtgggcctgatgagccgggtggcccagcctgccagcaagaagatcgatcagaacaagctgaaacctgagatggacgagaagggcaacctgaccaccgccggctttgcctgctctcagtgtggccagcccctgttcgtgtacaagctggagcaggtgtctgagaagggcaaggcttacaccaactacttcggacggtgcaatgtggccgagcacgaaaagctgatcctgctggcccagctgaagcccgagaaggatagcgacgaagccgtgacatatagcctgggaaagtttgggcagagggccctggatttctacagcattcatgtgaccaaggagtccacccaccccgtgaagcccctggcccagatcgccggaaacagatacgcctccggacctgtgggaaaggccctgagcgacgcatgtatgggcacaatcgcctccttcctgtctaagtaccaggacatcatcatcgaacaccagaaggtggtgaagggcaaccagaagagactggagagcctgcgggagctggccggcaaggaaaacctggaataccctagcgtgaccctgccacctcagcctcacaccaaggagggcgttgatgcctacaacgaagtgatcgcccgggtgcgaatgtgggtgaacctgaacctgtggcagaagctgaagctaagcagagatgatgccaagcctctgctgagactgaagggattcccttcctttcctctggtcgagagacaggccaacgaagtggactggtgggacatggtgtgtaacgtgaagaagctgatcaacgagaaaaaggaggatggcaaggtgttttggcagaatctggctggctacaagagacaggaagccctgagaccatacctgagcagcgaggaagatcggaagaagggaaagaaattcgctcggtaccagctgggcgacctgctgctgcacctggaaaagaagcacggcgaggactggggaaaggtgtacgacgaggcctgggagcggattgacaagaaagtggaaggcctgagcaagcacatcaagctggaagaggaacggagaagcgaggacgcccagagcaaggccgccctgaccgactggctgcgggctaaggccagcttcgtgatcgagggcctgaaggaggccgacaaggacgagttctgcagatgcgagctgaagctgcagaagtggtacggggacctgcggggaaagcccttcgccatcgaagccgagaacagcatcctggacatcagcggcttcagcaagcagtacaactgtgccttcatctggcagaaggacggcgtgaagaagctgaacctgtacctgatcatcaactacttcaagggcggcaagctgcggttcaagaagatcaaacctgaagccttcgaagccaacagattctacaccgtgatcaacaaaaagagcggcgagatcgtgcccatggaggtgaacttcaacttcgacgaccccaacctgatcatcctgcctctggcctttggcaagagacagggcagagaattcatctggaacgacctgctgtccctggaaaccggcagcctgaagctggccaacggaagagtgatcgagaagacactgtacaacagaagaacccggcaggatgagcctgccctgttcgtggccctgaccttcgagcggcgggaggtcctggactcctccaatatcaaaccaatgaacctgatcggcgtggcaagaggcgaaaacatccccgccgtgatcgccctgaccgaccccgagggctgcccactgagccggtttaaggatagcctgggaaacccaacccacatcctgagaatcggcgagagctataaggagaagcagcggaccatccaggccaagaaggaggtggagcagcggagagccggcggctacagccggaagtacgccagcaaagccaagaatctggcagacgatatggtgagaaacaccgctagagatctgctgtactacgccgtgacccaggatgccatgctgatcttcgccaacctgagccggggcttcggccggcagggcaagcggaccttcatggccgagagacagtacacacggatggaggactggctgaccgccaagctggcctacgagggcctgagcaagacctacctgtccaagacactggcccagtacacctccaagacatgcagcaactgtgggtttaccatcaccagcgccgactacgacagggtgctggagaagctgaagaagacagcaacaggctggatgaccacaattaacggcaaggagctgaaggtggagggccagattacctactacaacagatacaagagacagaacgtagtcaaggacctgtccgtcgagctggatagactgagcgaagaatctgtgaacaacgacatctcctcctggacaaagggcagaagcggagaagctctgagcctcctgaagaaaagattctcccatagacccgtgcaggagaagttcgtgtgcctgaactgcggcttcgagacacacgcagccgagcaagccgccctgaacatcgccagatcctggctgttcctgcggagccaggagtacaagaaataccagacaaacaagacaaccggcaacaccgataagagagccttcgtcgagacctggcagtccttttaccggaagaagcttaaggaggtgtggaaacctgccgtgcggtctggcggatctggcggaggctccacaagcaggcccagggccgtgaagttcgccgacgtggccgtgtacttcagccccgaggagtgggagtgcctgaggcccgcccagagggccctgtacagggacgtgatgcaggagacctacggccacctgggcgccctgggctgcgccggccccaagcccgccctgatcagctggctggagaggaacaccaacgactgggagctggccgccctggacccccaggagtgccccaggcagatgaccgtgcagaccagccccaagaaaaagagaaaagtctaagctgccttctgcggggcttgccttctggccatgcccttcttctctcccttgcacctgtacctcttggtctttgaataaagcctgagtaggaaggctagcaaaaaaaaaaaaaaaaaaaaaaaaaaaaaaaaaaaaaaaaaaaaaaaaaaaaaaaaaaaaaaaaaaaaaaaaaaaaaaaa

SEQ ID NO: 7304 - RNA, 5797 nt, synthetic construct
  source 1..5797: mol_type = other RNA
aggaaataagagagaaaagaagagtaagaagaaatataagagccaccatggcccctaagaagaagcgtaaagtgagccggatggaacgcctcgtctacgaggtgcggcagaagtgcagaaacatcgaggacatctgcatctcctgcggatctctgaacgtgaccctggagcacccactgttcatcggcggcatgtgccagaactgtaaaaactgttttctggagtgtgcctatcaatacgacgatgacggctaccagagctactgcaccatctgttgcggcggaagagaggtgctgatgtgtggaaataacaactgctgccggtgcttctgcgtggaatgcgtggacctgctggtgggccccggcgccgcccaggccgctattaaggaagatccttggaactgctacatgtgcggccacaagggcacatacggcctgctgagacggagagaggactggcctagcagactgcagatgttcttcgccaataaccacgaccaggagttcgacccccctaaggtgtaccctcccgtccccgccgagaagagaaagcccatccgggtcctgagcctgttcgatggcatcgccaccggtctgctggtgctgaaggacctgggcatccaggtggataggtacattgcctccgaggtgtgcgaggactccatcaccgtgggaatggtgcgtcatcagggcaagatcatgtacgtgggcgacgtgcggagcgtgacacagaagcatatccaggagtggggccctttcgacctggtgatcggcggcagcccttgcaatgacctgagcatcgtgaacccagcccggaagggcctgtacgagggaaccggcagactgttcttcgagttttacagactgctgcacgacgcccggcctaaggaaggcgacgaccggcccttcttttggctgttcgagaatgtggtggccatgggagtcagcgacaagcgggatattagccggttcctggagagcaaccccgtgatgatcgatgccaaggaagtgagcgccgcccaccgggccagatacttctggggcaatctgcctggcatgaacagacccctggccagcaccgtgaacgacaagctggagctgcaggagtgcctggagcacggccggatcgccaagttcagcaaggtgagaaccatcaccacccgaagcaacagcatcaaacaaggcaaggaccagcactttcctgtgttcatgaacgagaaggaggacatcctgtggtgtaccgagatggagagagtgttcgggttcccagtccactacacagatgtcagcaacatgtctagactggccagacagagactgctgggaagaagctggtccgtccctgtgatcagacacctgttcgcccctctgaaggagtacttcgcctgcgtgagcagcggcaacagcaacgccaacagccggggccccagcttctctagcggcctggtgccactgtccctgagagggagccacatgggccccatggagatctacaaaaccgtgagcgcctggaagcggcagcctgtgcgcgtgctgagcctgtttcggaatatcgataaagtcctgaaaagcctgggattcctggagagcggctctggctccggcggtggcaccctgaagtacgtggaggatgtgacaaacgtggtcagacgggatgtggagaagtggggccccttcgatctggtgtacggcagcacccaacccctgggcagctcttgtgaccggtgccctggctggtacatgtttcagttccaccggatcctgcagtacgccctgccgagacaggagtcccagcggccattcttttggattttcatggacaacttgctgctgaccgaggatgaccaggaaactaccactcggttcctgcagaccgaagccgtgaccctgcaggacgtgagaggccgggactaccagaacgccatgcgggtgtggtccaacatccctggactgaaaagcaagcacgcacctctgacccctaaagaagaggagtacctgcaggcccaggtgcggagcagaagcaagctggacgcccctaaggtggatctgctggtgaagaattgcctcctgcccctgagagagtacttcaagtatttcagccagaatagtctgcccctgggcggcccaagcagcggcgcccctcctcccagcggcggcagcccagccggctccccaacctctaccgaggagggcacctctgagtccgccacccccgagagcggccctggcacctccaccgagcccagcgagggcagcgcacccggcagccctgccggcagccccacctccacagaggagggaaccagcaccgagcccagcgaaggcagcgccccaggcaccagcaccgagcctagtgagggcggctctggcggcggcagcgcccaggagattaaacggatcaacaagatcagaagaagacttgtgaaagacagcaacaccaagaaggccggcaagacaggccccatgaaaaccctgctggttagagtgatgacacccgatctgagagagcggctggaaaacctgagaaagaagcctgaaaatatcccccagcccatcagcaatacatctagagccaacctgaataagctgctgaccgattacaccgaaatgaagaaggcgatcctgcatgtgtactgggaagagttccagaaggaccctgtgggcctgatgagccgggtggcccagcctgccagcaagaagatcgatcagaacaagctgaaacctgagatggacgagaagggcaacctgaccaccgccggctttgcctgctctcagtgtggccagcccctgttcgtgtacaagctggagcaggtgtctgagaagggcaaggcttacaccaactacttcggacggtgcaatgtggccgagcacgaaaagctgatcctgctggcccagctgaagcccgagaaggatagcgacgaagccgtgacatatagcctgggaaagtttgggcagagggccctggatttctacagcattcatgtgaccaaggagtccacccaccccgtgaagcccctggcccagatcgccggaaacagatacgcctccggacctgtgggaaaggccctgagcgacgcatgtatgggcacaatcgcctccttcctgtctaagtaccaggacatcatcatcgaacaccagaaggtggtgaagggcaaccagaagagactggagagcctgcgggagctggccggcaaggaaaacctggaataccctagcgtgaccctgccacctcagcctcacaccaaggagggcgttgatgcctacaacgaagtgatcgcccgggtgcgaatgtgggtgaacctgaacctgtggcagaagctgaagctaagcagagatgatgccaagcctctgctgagactgaagggattcccttcctttcctctggtcgagagacaggccaacgaagtggactggtgggacatggtgtgtaacgtgaagaagctgatcaacgagaaaaaggaggatggcaaggtgttttggcagaatctggctggctacaagagacaggaagccctgagaccatacctgagcagcgaggaagatcggaagaagggaaagaaattcgctcggtaccagctgggcgacctgctgctgcacctggaaaagaagcacggcgaggactggggaaaggtgtacgacgaggcctgggagcggattgacaagaaagtggaaggcctgagcaagcacatcaagctggaagaggaacggagaagcgaggacgcccagagcaaggccgccctgaccgactggctgcgggctaaggccagcttcgtgatcgagggcctgaaggaggccgacaaggacgagttctgcagatgcgagctgaagctgcagaagtggtacggggacctgcggggaaagcccttcgccatcgaagccgagaacagcatcctggacatcagcggcttcagcaagcagtacaactgtgccttcatctggcagaaggacggcgtgaagaagctgaacctgtacctgatcatcaactacttcaagggcggcaagctgcggttcaagaagatcaaacctgaagccttcgaagccaacagattctacaccgtgatcaacaaaaagagcggcgagatcgtgcccatggaggtgaacttcaacttcgacgaccccaacctgatcatcctgcctctggcctttggcaagagacagggcagagaattcatctggaacgacctgctgtccctggaaaccggcagcctgaagctggccaacggaagagtgatcgagaagacactgtacaacagaagaacccggcaggatgagcctgccctgttcgtggccctgaccttcgagcggcgggaggtcctggactcctccaatatcaaaccaatgaacctgatcggcgtggcaagaggcgaaaacatccccgccgtgatcgccctgaccgaccccgagggctgcccactgagccggtttaaggatagcctgggaaacccaacccacatcctgagaatcggcgagagctataaggagaagcagcggaccatccaggccaagaaggaggtggagcagcggagagccggcggctacagccggaagtacgccagcaaagccaagaatctggcagacgatatggtgagaaacaccgctagagatctgctgtactacgccgtgacccaggatgccatgctgatcttcgccaacctgagccggggcttcggccggcagggcaagcggaccttcatggccgagagacagtacacacggatggaggactggctgaccgccaagctggcctacgagggcctgagcaagacctacctgtccaagacactggcccagtacacctccaagacatgcagcaactgtgggtttaccatcaccagcgccgactacgacagggtgctggagaagctgaagaagacagcaacaggctggatgaccacaattaacggcaaggagctgaaggtggagggccagattacctactacaacagatacaagagacagaacgtagtcaaggacctgtccgtcgagctggatagactgagcgaagaatctgtgaacaacgacatctcctcctggacaaagggcagaagcggagaagctctgagcctcctgaagaaaagattctcccatagacccgtgcaggagaagttcgtgtgcctgaactgcggcttcgagacacacgcagccgagcaagccgccctgaacatcgccagatcctggctgttcctgcggagccaggagtacaagaaataccagacaaacaagacaaccggcaacaccgataagagagccttcgtcgagacctggcagtccttttaccggaagaagcttaaggaggtgtggaaacctgccgtgcggtctggcggatctggcggaggctccacaagcatgcccgtgaccttcgaggacgtggccgtgaccttcacccaggaggagtggggccagctggaccccgcccagaggaccctgtaccaggaggtgatgctggagacctgcggcctgctggtgagcctgggctgccccctgcccaagcccgagctgttctaccccctggaccacagccccgagctgcacaccctgaagaggggcctgagccccaacagctgccccggcgacagcaccaagcccggcaccagccccaagaaaaagagaaaagtctaagctgccttctgcggggcttgccttctggccatgcccttcttctctcccttgcacctgtacctcttggtctttgaataaagcctgagtaggaaggctagcaaaaaaaaaaaaaaaaaaaaaaaaaaaaaaaaaaaaaaaaaaaaaaaaaaaaaaaaaaaaaaaaaaaaaaaaaaaaaaaa

SEQ ID NO: 7305 - RNA, 5815 nt, synthetic construct
  source 1..5815: mol_type = other RNA
aggaaataagagagaaaagaagagtaagaagaaatataagagccaccatggcccctaagaagaagcgtaaagtgagccggatggaacgcctcgtctacgaggtgcggcagaagtgcagaaacatcgaggacatctgcatctcctgcggatctctgaacgtgaccctggagcacccactgttcatcggcggcatgtgccagaactgtaaaaactgttttctggagtgtgcctatcaatacgacgatgacggctaccagagctactgcaccatctgttgcggcggaagagaggtgctgatgtgtggaaataacaactgctgccggtgcttctgcgtggaatgcgtggacctgctggtgggccccggcgccgcccaggccgctattaaggaagatccttggaactgctacatgtgcggccacaagggcacatacggcctgctgagacggagagaggactggcctagcagactgcagatgttcttcgccaataaccacgaccaggagttcgacccccctaaggtgtaccctcccgtccccgccgagaagagaaagcccatccgggtcctgagcctgttcgatggcatcgccaccggtctgctggtgctgaaggacctgggcatccaggtggataggtacattgcctccgaggtgtgcgaggactccatcaccgtgggaatggtgcgtcatcagggcaagatcatgtacgtgggcgacgtgcggagcgtgacacagaagcatatccaggagtggggccctttcgacctggtgatcggcggcagcccttgcaatgacctgagcatcgtgaacccagcccggaagggcctgtacgagggaaccggcagactgttcttcgagttttacagactgctgcacgacgcccggcctaaggaaggcgacgaccggcccttcttttggctgttcgagaatgtggtggccatgggagtcagcgacaagcgggatattagccggttcctggagagcaaccccgtgatgatcgatgccaaggaagtgagcgccgcccaccgggccagatacttctggggcaatctgcctggcatgaacagacccctggccagcaccgtgaacgacaagctggagctgcaggagtgcctggagcacggccggatcgccaagttcagcaaggtgagaaccatcaccacccgaagcaacagcatcaaacaaggcaaggaccagcactttcctgtgttcatgaacgagaaggaggacatcctgtggtgtaccgagatggagagagtgttcgggttcccagtccactacacagatgtcagcaacatgtctagactggccagacagagactgctgggaagaagctggtccgtccctgtgatcagacacctgttcgcccctctgaaggagtacttcgcctgcgtgagcagcggcaacagcaacgccaacagccggggccccagcttctctagcggcctggtgccactgtccctgagagggagccacatgggccccatggagatctacaaaaccgtgagcgcctggaagcggcagcctgtgcgcgtgctgagcctgtttcggaatatcgataaagtcctgaaaagcctgggattcctggagagcggctctggctccggcggtggcaccctgaagtacgtggaggatgtgacaaacgtggtcagacgggatgtggagaagtggggccccttcgatctggtgtacggcagcacccaacccctgggcagctcttgtgaccggtgccctggctggtacatgtttcagttccaccggatcctgcagtacgccctgccgagacaggagtcccagcggccattcttttggattttcatggacaacttgctgctgaccgaggatgaccaggaaactaccactcggttcctgcagaccgaagccgtgaccctgcaggacgtgagaggccgggactaccagaacgccatgcgggtgtggtccaacatccctggactgaaaagcaagcacgcacctctgacccctaaagaagaggagtacctgcaggcccaggtgcggagcagaagcaagctggacgcccctaaggtggatctgctggtgaagaattgcctcctgcccctgagagagtacttcaagtatttcagccagaatagtctgcccctgggcggcccaagcagcggcgcccctcctcccagcggcggcagcccagccggctccccaacctctaccgaggagggcacctctgagtccgccacccccgagagcggccctggcacctccaccgagcccagcgagggcagcgcacccggcagccctgccggcagccccacctccacagaggagggaaccagcaccgagcccagcgaaggcagcgccccaggcaccagcaccgagcctagtgagggcggctctggcggcggcagcgcccaggagattaaacggatcaacaagatcagaagaagacttgtgaaagacagcaacaccaagaaggccggcaagacaggccccatgaaaaccctgctggttagagtgatgacacccgatctgagagagcggctggaaaacctgagaaagaagcctgaaaatatcccccagcccatcagcaatacatctagagccaacctgaataagctgctgaccgattacaccgaaatgaagaaggcgatcctgcatgtgtactgggaagagttccagaaggaccctgtgggcctgatgagccgggtggcccagcctgccagcaagaagatcgatcagaacaagctgaaacctgagatggacgagaagggcaacctgaccaccgccggctttgcctgctctcagtgtggccagcccctgttcgtgtacaagctggagcaggtgtctgagaagggcaaggcttacaccaactacttcggacggtgcaatgtggccgagcacgaaaagctgatcctgctggcccagctgaagcccgagaaggatagcgacgaagccgtgacatatagcctgggaaagtttgggcagagggccctggatttctacagcattcatgtgaccaaggagtccacccaccccgtgaagcccctggcccagatcgccggaaacagatacgcctccggacctgtgggaaaggccctgagcgacgcatgtatgggcacaatcgcctccttcctgtctaagtaccaggacatcatcatcgaacaccagaaggtggtgaagggcaaccagaagagactggagagcctgcgggagctggccggcaaggaaaacctggaataccctagcgtgaccctgccacctcagcctcacaccaaggagggcgttgatgcctacaacgaagtgatcgcccgggtgcgaatgtgggtgaacctgaacctgtggcagaagctgaagctaagcagagatgatgccaagcctctgctgagactgaagggattcccttcctttcctctggtcgagagacaggccaacgaagtggactggtgggacatggtgtgtaacgtgaagaagctgatcaacgagaaaaaggaggatggcaaggtgttttggcagaatctggctggctacaagagacaggaagccctgagaccatacctgagcagcgaggaagatcggaagaagggaaagaaattcgctcggtaccagctgggcgacctgctgctgcacctggaaaagaagcacggcgaggactggggaaaggtgtacgacgaggcctgggagcggattgacaagaaagtggaaggcctgagcaagcacatcaagctggaagaggaacggagaagcgaggacgcccagagcaaggccgccctgaccgactggctgcgggctaaggccagcttcgtgatcgagggcctgaaggaggccgacaaggacgagttctgcagatgcgagctgaagctgcagaagtggtacggggacctgcggggaaagcccttcgccatcgaagccgagaacagcatcctggacatcagcggcttcagcaagcagtacaactgtgccttcatctggcagaaggacggcgtgaagaagctgaacctgtacctgatcatcaactacttcaagggcggcaagctgcggttcaagaagatcaaacctgaagccttcgaagccaacagattctacaccgtgatcaacaaaaagagcggcgagatcgtgcccatggaggtgaacttcaacttcgacgaccccaacctgatcatcctgcctctggcctttggcaagagacagggcagagaattcatctggaacgacctgctgtccctggaaaccggcagcctgaagctggccaacggaagagtgatcgagaagacactgtacaacagaagaacccggcaggatgagcctgccctgttcgtggccctgaccttcgagcggcgggaggtcctggactcctccaatatcaaaccaatgaacctgatcggcgtggcaagaggcgaaaacatccccgccgtgatcgccctgaccgaccccgagggctgcccactgagccggtttaaggatagcctgggaaacccaacccacatcctgagaatcggcgagagctataaggagaagcagcggaccatccaggccaagaaggaggtggagcagcggagagccggcggctacagccggaagtacgccagcaaagccaagaatctggcagacgatatggtgagaaacaccgctagagatctgctgtactacgccgtgacccaggatgccatgctgatcttcgccaacctgagccggggcttcggccggcagggcaagcggaccttcatggccgagagacagtacacacggatggaggactggctgaccgccaagctggcctacgagggcctgagcaagacctacctgtccaagacactggcccagtacacctccaagacatgcagcaactgtgggtttaccatcaccagcgccgactacgacagggtgctggagaagctgaagaagacagcaacaggctggatgaccacaattaacggcaaggagctgaaggtggagggccagattacctactacaacagatacaagagacagaacgtagtcaaggacctgtccgtcgagctggatagactgagcgaagaatctgtgaacaacgacatctcctcctggacaaagggcagaagcggagaagctctgagcctcctgaagaaaagattctcccatagacccgtgcaggagaagttcgtgtgcctgaactgcggcttcgagacacacgcagccgagcaagccgccctgaacatcgccagatcctggctgttcctgcggagccaggagtacaagaaataccagacaaacaagacaaccggcaacaccgataagagagccttcgtcgagacctggcagtccttttaccggaagaagcttaaggaggtgtggaaacctgccgtgcggtctggcggatctggcggaggctccacaagcgtggccttcgaggacgtggccgtgaacttcacccaggaggagtgggccctgctgaacagcagccagaagaacctgtacagggaggtgatgcaggagacctgcaggaacctggccagcgtgggcagcaagtggaaggaccagaacatcgaggaccacttcgagaagcccggcaagaacatcaggaagcacatggtgcagaagctgtgcgagagcaaggagggcagccagtacggcgaggtggtgagccagatccccaacctgaccagccccaagaaaaagagaaaagtctaagctgccttctgcggggcttgccttctggccatgcccttcttctctcccttgcacctgtacctcttggtctttgaataaagcctgagtaggaaggctagcaaaaaaaaaaaaaaaaaaaaaaaaaaaaaaaaaaaaaaaaaaaaaaaaaaaaaaaaaaaaaaaaaaaaaaaaaaaaaaaa

SEQ ID NO: 7306 - RNA, 5806 nt, synthetic construct
  source 1..5806: mol_type = other RNA
aggaaataagagagaaaagaagagtaagaagaaatataagagccaccatggcccctaagaagaagcgtaaagtgagccggatggaacgcctcgtctacgaggtgcggcagaagtgcagaaacatcgaggacatctgcatctcctgcggatctctgaacgtgaccctggagcacccactgttcatcggcggcatgtgccagaactgtaaaaactgttttctggagtgtgcctatcaatacgacgatgacggctaccagagctactgcaccatctgttgcggcggaagagaggtgctgatgtgtggaaataacaactgctgccggtgcttctgcgtggaatgcgtggacctgctggtgggccccggcgccgcccaggccgctattaaggaagatccttggaactgctacatgtgcggccacaagggcacatacggcctgctgagacggagagaggactggcctagcagactgcagatgttcttcgccaataaccacgaccaggagttcgacccccctaaggtgtaccctcccgtccccgccgagaagagaaagcccatccgggtcctgagcctgttcgatggcatcgccaccggtctgctggtgctgaaggacctgggcatccaggtggataggtacattgcctccgaggtgtgcgaggactccatcaccgtgggaatggtgcgtcatcagggcaagatcatgtacgtgggcgacgtgcggagcgtgacacagaagcatatccaggagtggggccctttcgacctggtgatcggcggcagcccttgcaatgacctgagcatcgtgaacccagcccggaagggcctgtacgagggaaccggcagactgttcttcgagttttacagactgctgcacgacgcccggcctaaggaaggcgacgaccggcccttcttttggctgttcgagaatgtggtggccatgggagtcagcgacaagcgggatattagccggttcctggagagcaaccccgtgatgatcgatgccaaggaagtgagcgccgcccaccgggccagatacttctggggcaatctgcctggcatgaacagacccctggccagcaccgtgaacgacaagctggagctgcaggagtgcctggagcacggccggatcgccaagttcagcaaggtgagaaccatcaccacccgaagcaacagcatcaaacaaggcaaggaccagcactttcctgtgttcatgaacgagaaggaggacatcctgtggtgtaccgagatggagagagtgttcgggttcccagtccactacacagatgtcagcaacatgtctagactggccagacagagactgctgggaagaagctggtccgtccctgtgatcagacacctgttcgcccctctgaaggagtacttcgcctgcgtgagcagcggcaacagcaacgccaacagccggggccccagcttctctagcggcctggtgccactgtccctgagagggagccacatgggccccatggagatctacaaaaccgtgagcgcctggaagcggcagcctgtgcgcgtgctgagcctgtttcggaatatcgataaagtcctgaaaagcctgggattcctggagagcggctctggctccggcggtggcaccctgaagtacgtggaggatgtgacaaacgtggtcagacgggatgtggagaagtggggccccttcgatctggtgtacggcagcacccaacccctgggcagctcttgtgaccggtgccctggctggtacatgtttcagttccaccggatcctgcagtacgccctgccgagacaggagtcccagcggccattcttttggattttcatggacaacttgctgctgaccgaggatgaccaggaaactaccactcggttcctgcagaccgaagccgtgaccctgcaggacgtgagaggccgggactaccagaacgccatgcgggtgtggtccaacatccctggactgaaaagcaagcacgcacctctgacccctaaagaagaggagtacctgcaggcccaggtgcggagcagaagcaagctggacgcccctaaggtggatctgctggtgaagaattgcctcctgcccctgagagagtacttcaagtatttcagccagaatagtctgcccctgggcggcccaagcagcggcgcccctcctcccagcggcggcagcccagccggctccccaacctctaccgaggagggcacctctgagtccgccacccccgagagcggccctggcacctccaccgagcccagcgagggcagcgcacccggcagccctgccggcagccccacctccacagaggagggaaccagcaccgagcccagcgaaggcagcgccccaggcaccagcaccgagcctagtgagggcggctctggcggcggcagcgcccaggagattaaacggatcaacaagatcagaagaagacttgtgaaagacagcaacaccaagaaggccggcaagacaggccccatgaaaaccctgctggttagagtgatgacacccgatctgagagagcggctggaaaacctgagaaagaagcctgaaaatatcccccagcccatcagcaatacatctagagccaacctgaataagctgctgaccgattacaccgaaatgaagaaggcgatcctgcatgtgtactgggaagagttccagaaggaccctgtgggcctgatgagccgggtggcccagcctgccagcaagaagatcgatcagaacaagctgaaacctgagatggacgagaagggcaacctgaccaccgccggctttgcctgctctcagtgtggccagcccctgttcgtgtacaagctggagcaggtgtctgagaagggcaaggcttacaccaactacttcggacggtgcaatgtggccgagcacgaaaagctgatcctgctggcccagctgaagcccgagaaggatagcgacgaagccgtgacatatagcctgggaaagtttgggcagagggccctggatttctacagcattcatgtgaccaaggagtccacccaccccgtgaagcccctggcccagatcgccggaaacagatacgcctccggacctgtgggaaaggccctgagcgacgcatgtatgggcacaatcgcctccttcctgtctaagtaccaggacatcatcatcgaacaccagaaggtggtgaagggcaaccagaagagactggagagcctgcgggagctggccggcaaggaaaacctggaataccctagcgtgaccctgccacctcagcctcacaccaaggagggcgttgatgcctacaacgaagtgatcgcccgggtgcgaatgtgggtgaacctgaacctgtggcagaagctgaagctaagcagagatgatgccaagcctctgctgagactgaagggattcccttcctttcctctggtcgagagacaggccaacgaagtggactggtgggacatggtgtgtaacgtgaagaagctgatcaacgagaaaaaggaggatggcaaggtgttttggcagaatctggctggctacaagagacaggaagccctgagaccatacctgagcagcgaggaagatcggaagaagggaaagaaattcgctcggtaccagctgggcgacctgctgctgcacctggaaaagaagcacggcgaggactggggaaaggtgtacgacgaggcctgggagcggattgacaagaaagtggaaggcctgagcaagcacatcaagctggaagaggaacggagaagcgaggacgcccagagcaaggccgccctgaccgactggctgcgggctaaggccagcttcgtgatcgagggcctgaaggaggccgacaaggacgagttctgcagatgcgagctgaagctgcagaagtggtacggggacctgcggggaaagcccttcgccatcgaagccgagaacagcatcctggacatcagcggcttcagcaagcagtacaactgtgccttcatctggcagaaggacggcgtgaagaagctgaacctgtacctgatcatcaactacttcaagggcggcaagctgcggttcaagaagatcaaacctgaagccttcgaagccaacagattctacaccgtgatcaacaaaaagagcggcgagatcgtgcccatggaggtgaacttcaacttcgacgaccccaacctgatcatcctgcctctggcctttggcaagagacagggcagagaattcatctggaacgacctgctgtccctggaaaccggcagcctgaagctggccaacggaagagtgatcgagaagacactgtacaacagaagaacccggcaggatgagcctgccctgttcgtggccctgaccttcgagcggcgggaggtcctggactcctccaatatcaaaccaatgaacctgatcggcgtggcaagaggcgaaaacatccccgccgtgatcgccctgaccgaccccgagggctgcccactgagccggtttaaggatagcctgggaaacccaacccacatcctgagaatcggcgagagctataaggagaagcagcggaccatccaggccaagaaggaggtggagcagcggagagccggcggctacagccggaagtacgccagcaaagccaagaatctggcagacgatatggtgagaaacaccgctagagatctgctgtactacgccgtgacccaggatgccatgctgatcttcgccaacctgagccggggcttcggccggcagggcaagcggaccttcatggccgagagacagtacacacggatggaggactggctgaccgccaagctggcctacgagggcctgagcaagacctacctgtccaagacactggcccagtacacctccaagacatgcagcaactgtgggtttaccatcaccagcgccgactacgacagggtgctggagaagctgaagaagacagcaacaggctggatgaccacaattaacggcaaggagctgaaggtggagggccagattacctactacaacagatacaagagacagaacgtagtcaaggacctgtccgtcgagctggatagactgagcgaagaatctgtgaacaacgacatctcctcctggacaaagggcagaagcggagaagctctgagcctcctgaagaaaagattctcccatagacccgtgcaggagaagttcgtgtgcctgaactgcggcttcgagacacacgcagccgagcaagccgccctgaacatcgccagatcctggctgttcctgcggagccaggagtacaagaaataccagacaaacaagacaaccggcaacaccgataagagagccttcgtcgagacctggcagtccttttaccggaagaagcttaaggaggtgtggaaacctgccgtgcggtctggcggatctggcggaggctccacaagcctgaccttcgaggacgtggccgtgtacttcagcgaggaggagtggcagctgctggacccccccgagaagaccctgtacaacgacgtgatgcaggacatctacgagaccgtgatcagcctgggcctgaagctgaagaacgacaccggcaacgaccaccccatcagcgtgagcaccagcgagatccagaccagcggctgcaaggtgagcaagaagaccaggatgaagatcgcccagaagaccatgggcagggagaccagccccaagaaaaagagaaaagtctaagctgccttctgcggggcttgccttctggccatgcccttcttctctcccttgcacctgtacctcttggtctttgaataaagcctgagtaggaaggctagcaaaaaaaaaaaaaaaaaaaaaaaaaaaaaaaaaaaaaaaaaaaaaaaaaaaaaaaaaaaaaaaaaaaaaaaaaaaaaaaa

SEQ ID NO: 7307 - RNA, 5797 nt, synthetic construct
  source 1..5797: mol_type = other RNA
aggaaataagagagaaaagaagagtaagaagaaatataagagccaccatggcccctaagaagaagcgtaaagtgagccggatggaacgcctcgtctacgaggtgcggcagaagtgcagaaacatcgaggacatctgcatctcctgcggatctctgaacgtgaccctggagcacccactgttcatcggcggcatgtgccagaactgtaaaaactgttttctggagtgtgcctatcaatacgacgatgacggctaccagagctactgcaccatctgttgcggcggaagagaggtgctgatgtgtggaaataacaactgctgccggtgcttctgcgtggaatgcgtggacctgctggtgggccccggcgccgcccaggccgctattaaggaagatccttggaactgctacatgtgcggccacaagggcacatacggcctgctgagacggagagaggactggcctagcagactgcagatgttcttcgccaataaccacgaccaggagttcgacccccctaaggtgtaccctcccgtccccgccgagaagagaaagcccatccgggtcctgagcctgttcgatggcatcgccaccggtctgctggtgctgaaggacctgggcatccaggtggataggtacattgcctccgaggtgtgcgaggactccatcaccgtgggaatggtgcgtcatcagggcaagatcatgtacgtgggcgacgtgcggagcgtgacacagaagcatatccaggagtggggccctttcgacctggtgatcggcggcagcccttgcaatgacctgagcatcgtgaacccagcccggaagggcctgtacgagggaaccggcagactgttcttcgagttttacagactgctgcacgacgcccggcctaaggaaggcgacgaccggcccttcttttggctgttcgagaatgtggtggccatgggagtcagcgacaagcgggatattagccggttcctggagagcaaccccgtgatgatcgatgccaaggaagtgagcgccgcccaccgggccagatacttctggggcaatctgcctggcatgaacagacccctggccagcaccgtgaacgacaagctggagctgcaggagtgcctggagcacggccggatcgccaagttcagcaaggtgagaaccatcaccacccgaagcaacagcatcaaacaaggcaaggaccagcactttcctgtgttcatgaacgagaaggaggacatcctgtggtgtaccgagatggagagagtgttcgggttcccagtccactacacagatgtcagcaacatgtctagactggccagacagagactgctgggaagaagctggtccgtccctgtgatcagacacctgttcgcccctctgaaggagtacttcgcctgcgtgagcagcggcaacagcaacgccaacagccggggccccagcttctctagcggcctggtgccactgtccctgagagggagccacatgggccccatggagatctacaaaaccgtgagcgcctggaagcggcagcctgtgcgcgtgctgagcctgtttcggaatatcgataaagtcctgaaaagcctgggattcctggagagcggctctggctccggcggtggcaccctgaagtacgtggaggatgtgacaaacgtggtcagacgggatgtggagaagtggggccccttcgatctggtgtacggcagcacccaacccctgggcagctcttgtgaccggtgccctggctggtacatgtttcagttccaccggatcctgcagtacgccctgccgagacaggagtcccagcggccattcttttggattttcatggacaacttgctgctgaccgaggatgaccaggaaactaccactcggttcctgcagaccgaagccgtgaccctgcaggacgtgagaggccgggactaccagaacgccatgcgggtgtggtccaacatccctggactgaaaagcaagcacgcacctctgacccctaaagaagaggagtacctgcaggcccaggtgcggagcagaagcaagctggacgcccctaaggtggatctgctggtgaagaattgcctcctgcccctgagagagtacttcaagtatttcagccagaatagtctgcccctgggcggcccaagcagcggcgcccctcctcccagcggcggcagcccagccggctccccaacctctaccgaggagggcacctctgagtccgccacccccgagagcggccctggcacctccaccgagcccagcgagggcagcgcacccggcagccctgccggcagccccacctccacagaggagggaaccagcaccgagcccagcgaaggcagcgccccaggcaccagcaccgagcctagtgagggcggctctggcggcggcagcgcccaggagattaaacggatcaacaagatcagaagaagacttgtgaaagacagcaacaccaagaaggccggcaagacaggccccatgaaaaccctgctggttagagtgatgacacccgatctgagagagcggctggaaaacctgagaaagaagcctgaaaatatcccccagcccatcagcaatacatctagagccaacctgaataagctgctgaccgattacaccgaaatgaagaaggcgatcctgcatgtgtactgggaagagttccagaaggaccctgtgggcctgatgagccgggtggcccagcctgccagcaagaagatcgatcagaacaagctgaaacctgagatggacgagaagggcaacctgaccaccgccggctttgcctgctctcagtgtggccagcccctgttcgtgtacaagctggagcaggtgtctgagaagggcaaggcttacaccaactacttcggacggtgcaatgtggccgagcacgaaaagctgatcctgctggcccagctgaagcccgagaaggatagcgacgaagccgtgacatatagcctgggaaagtttgggcagagggccctggatttctacagcattcatgtgaccaaggagtccacccaccccgtgaagcccctggcccagatcgccggaaacagatacgcctccggacctgtgggaaaggccctgagcgacgcatgtatgggcacaatcgcctccttcctgtctaagtaccaggacatcatcatcgaacaccagaaggtggtgaagggcaaccagaagagactggagagcctgcgggagctggccggcaaggaaaacctggaataccctagcgtgaccctgccacctcagcctcacaccaaggagggcgttgatgcctacaacgaagtgatcgcccgggtgcgaatgtgggtgaacctgaacctgtggcagaagctgaagctaagcagagatgatgccaagcctctgctgagactgaagggattcccttcctttcctctggtcgagagacaggccaacgaagtggactggtgggacatggtgtgtaacgtgaagaagctgatcaacgagaaaaaggaggatggcaaggtgttttggcagaatctggctggctacaagagacaggaagccctgagaccatacctgagcagcgaggaagatcggaagaagggaaagaaattcgctcggtaccagctgggcgacctgctgctgcacctggaaaagaagcacggcgaggactggggaaaggtgtacgacgaggcctgggagcggattgacaagaaagtggaaggcctgagcaagcacatcaagctggaagaggaacggagaagcgaggacgcccagagcaaggccgccctgaccgactggctgcgggctaaggccagcttcgtgatcgagggcctgaaggaggccgacaaggacgagttctgcagatgcgagctgaagctgcagaagtggtacggggacctgcggggaaagcccttcgccatcgaagccgagaacagcatcctggacatcagcggcttcagcaagcagtacaactgtgccttcatctggcagaaggacggcgtgaagaagctgaacctgtacctgatcatcaactacttcaagggcggcaagctgcggttcaagaagatcaaacctgaagccttcgaagccaacagattctacaccgtgatcaacaaaaagagcggcgagatcgtgcccatggaggtgaacttcaacttcgacgaccccaacctgatcatcctgcctctggcctttggcaagagacagggcagagaattcatctggaacgacctgctgtccctggaaaccggcagcctgaagctggccaacggaagagtgatcgagaagacactgtacaacagaagaacccggcaggatgagcctgccctgttcgtggccctgaccttcgagcggcgggaggtcctggactcctccaatatcaaaccaatgaacctgatcggcgtggcaagaggcgaaaacatccccgccgtgatcgccctgaccgaccccgagggctgcccactgagccggtttaaggatagcctgggaaacccaacccacatcctgagaatcggcgagagctataaggagaagcagcggaccatccaggccaagaaggaggtggagcagcggagagccggcggctacagccggaagtacgccagcaaagccaagaatctggcagacgatatggtgagaaacaccgctagagatctgctgtactacgccgtgacccaggatgccatgctgatcttcgccaacctgagccggggcttcggccggcagggcaagcggaccttcatggccgagagacagtacacacggatggaggactggctgaccgccaagctggcctacgagggcctgagcaagacctacctgtccaagacactggcccagtacacctccaagacatgcagcaactgtgggtttaccatcaccagcgccgactacgacagggtgctggagaagctgaagaagacagcaacaggctggatgaccacaattaacggcaaggagctgaaggtggagggccagattacctactacaacagatacaagagacagaacgtagtcaaggacctgtccgtcgagctggatagactgagcgaagaatctgtgaacaacgacatctcctcctggacaaagggcagaagcggagaagctctgagcctcctgaagaaaagattctcccatagacccgtgcaggagaagttcgtgtgcctgaactgcggcttcgagacacacgcagccgagcaagccgccctgaacatcgccagatcctggctgttcctgcggagccaggagtacaagaaataccagacaaacaagacaaccggcaacaccgataagagagccttcgtcgagacctggcagtccttttaccggaagaagcttaaggaggtgtggaaacctgccgtgcggtctggcggatctggcggaggctccacaagcatgagccaggtgaccttcagcgacgtggccatcgacttcagccacgaggagtgggcctgcctggacagcgcccagagggacctgtacaaggacgtgatggtgcagaactacgagaacctggtgagcgtgggcctgagcatcaccaagccctacgtgatcatgctgctggaggacggcaaggagccctggatgatggagaagaagctgagcaaggtgtaccccttccccctgagccacagcgtgaccagccccaagaaaaagagaaaagtctaagctgccttctgcggggcttgccttctggccatgcccttcttctctcccttgcacctgtacctcttggtctttgaataaagcctgagtaggaaggctagcaaaaaaaaaaaaaaaaaaaaaaaaaaaaaaaaaaaaaaaaaaaaaaaaaaaaaaaaaaaaaaaaaaaaaaaaaaaaaaaa

SEQ ID NO: 7308 - RNA, 5797 nt, synthetic construct
  source 1..5797: mol_type = other RNA
aggaaataagagagaaaagaagagtaagaagaaatataagagccaccatggcccctaagaagaagcgtaaagtgagccggatggaacgcctcgtctacgaggtgcggcagaagtgcagaaacatcgaggacatctgcatctcctgcggatctctgaacgtgaccctggagcacccactgttcatcggcggcatgtgccagaactgtaaaaactgttttctggagtgtgcctatcaatacgacgatgacggctaccagagctactgcaccatctgttgcggcggaagagaggtgctgatgtgtggaaataacaactgctgccggtgcttctgcgtggaatgcgtggacctgctggtgggccccggcgccgcccaggccgctattaaggaagatccttggaactgctacatgtgcggccacaagggcacatacggcctgctgagacggagagaggactggcctagcagactgcagatgttcttcgccaataaccacgaccaggagttcgacccccctaaggtgtaccctcccgtccccgccgagaagagaaagcccatccgggtcctgagcctgttcgatggcatcgccaccggtctgctggtgctgaaggacctgggcatccaggtggataggtacattgcctccgaggtgtgcgaggactccatcaccgtgggaatggtgcgtcatcagggcaagatcatgtacgtgggcgacgtgcggagcgtgacacagaagcatatccaggagtggggccctttcgacctggtgatcggcggcagcccttgcaatgacctgagcatcgtgaacccagcccggaagggcctgtacgagggaaccggcagactgttcttcgagttttacagactgctgcacgacgcccggcctaaggaaggcgacgaccggcccttcttttggctgttcgagaatgtggtggccatgggagtcagcgacaagcgggatattagccggttcctggagagcaaccccgtgatgatcgatgccaaggaagtgagcgccgcccaccgggccagatacttctggggcaatctgcctggcatgaacagacccctggccagcaccgtgaacgacaagctggagctgcaggagtgcctggagcacggccggatcgccaagttcagcaaggtgagaaccatcaccacccgaagcaacagcatcaaacaaggcaaggaccagcactttcctgtgttcatgaacgagaaggaggacatcctgtggtgtaccgagatggagagagtgttcgggttcccagtccactacacagatgtcagcaacatgtctagactggccagacagagactgctgggaagaagctggtccgtccctgtgatcagacacctgttcgcccctctgaaggagtacttcgcctgcgtgagcagcggcaacagcaacgccaacagccggggccccagcttctctagcggcctggtgccactgtccctgagagggagccacatgggccccatggagatctacaaaaccgtgagcgcctggaagcggcagcctgtgcgcgtgctgagcctgtttcggaatatcgataaagtcctgaaaagcctgggattcctggagagcggctctggctccggcggtggcaccctgaagtacgtggaggatgtgacaaacgtggtcagacgggatgtggagaagtggggccccttcgatctggtgtacggcagcacccaacccctgggcagctcttgtgaccggtgccctggctggtacatgtttcagttccaccggatcctgcagtacgccctgccgagacaggagtcccagcggccattcttttggattttcatggacaacttgctgctgaccgaggatgaccaggaaactaccactcggttcctgcagaccgaagccgtgaccctgcaggacgtgagaggccgggactaccagaacgccatgcgggtgtggtccaacatccctggactgaaaagcaagcacgcacctctgacccctaaagaagaggagtacctgcaggcccaggtgcggagcagaagcaagctggacgcccctaaggtggatctgctggtgaagaattgcctcctgcccctgagagagtacttcaagtatttcagccagaatagtctgcccctgggcggcccaagcagcggcgcccctcctcccagcggcggcagcccagccggctccccaacctctaccgaggagggcacctctgagtccgccacccccgagagcggccctggcacctccaccgagcccagcgagggcagcgcacccggcagccctgccggcagccccacctccacagaggagggaaccagcaccgagcccagcgaaggcagcgccccaggcaccagcaccgagcctagtgagggcggctctggcggcggcagcgcccaggagattaaacggatcaacaagatcagaagaagacttgtgaaagacagcaacaccaagaaggccggcaagacaggccccatgaaaaccctgctggttagagtgatgacacccgatctgagagagcggctggaaaacctgagaaagaagcctgaaaatatcccccagcccatcagcaatacatctagagccaacctgaataagctgctgaccgattacaccgaaatgaagaaggcgatcctgcatgtgtactgggaagagttccagaaggaccctgtgggcctgatgagccgggtggcccagcctgccagcaagaagatcgatcagaacaagctgaaacctgagatggacgagaagggcaacctgaccaccgccggctttgcctgctctcagtgtggccagcccctgttcgtgtacaagctggagcaggtgtctgagaagggcaaggcttacaccaactacttcggacggtgcaatgtggccgagcacgaaaagctgatcctgctggcccagctgaagcccgagaaggatagcgacgaagccgtgacatatagcctgggaaagtttgggcagagggccctggatttctacagcattcatgtgaccaaggagtccacccaccccgtgaagcccctggcccagatcgccggaaacagatacgcctccggacctgtgggaaaggccctgagcgacgcatgtatgggcacaatcgcctccttcctgtctaagtaccaggacatcatcatcgaacaccagaaggtggtgaagggcaaccagaagagactggagagcctgcgggagctggccggcaaggaaaacctggaataccctagcgtgaccctgccacctcagcctcacaccaaggagggcgttgatgcctacaacgaagtgatcgcccgggtgcgaatgtgggtgaacctgaacctgtggcagaagctgaagctaagcagagatgatgccaagcctctgctgagactgaagggattcccttcctttcctctggtcgagagacaggccaacgaagtggactggtgggacatggtgtgtaacgtgaagaagctgatcaacgagaaaaaggaggatggcaaggtgttttggcagaatctggctggctacaagagacaggaagccctgagaccatacctgagcagcgaggaagatcggaagaagggaaagaaattcgctcggtaccagctgggcgacctgctgctgcacctggaaaagaagcacggcgaggactggggaaaggtgtacgacgaggcctgggagcggattgacaagaaagtggaaggcctgagcaagcacatcaagctggaagaggaacggagaagcgaggacgcccagagcaaggccgccctgaccgactggctgcgggctaaggccagcttcgtgatcgagggcctgaaggaggccgacaaggacgagttctgcagatgcgagctgaagctgcagaagtggtacggggacctgcggggaaagcccttcgccatcgaagccgagaacagcatcctggacatcagcggcttcagcaagcagtacaactgtgccttcatctggcagaaggacggcgtgaagaagctgaacctgtacctgatcatcaactacttcaagggcggcaagctgcggttcaagaagatcaaacctgaagccttcgaagccaacagattctacaccgtgatcaacaaaaagagcggcgagatcgtgcccatggaggtgaacttcaacttcgacgaccccaacctgatcatcctgcctctggcctttggcaagagacagggcagagaattcatctggaacgacctgctgtccctggaaaccggcagcctgaagctggccaacggaagagtgatcgagaagacactgtacaacagaagaacccggcaggatgagcctgccctgttcgtggccctgaccttcgagcggcgggaggtcctggactcctccaatatcaaaccaatgaacctgatcggcgtggcaagaggcgaaaacatccccgccgtgatcgccctgaccgaccccgagggctgcccactgagccggtttaaggatagcctgggaaacccaacccacatcctgagaatcggcgagagctataaggagaagcagcggaccatccaggccaagaaggaggtggagcagcggagagccggcggctacagccggaagtacgccagcaaagccaagaatctggcagacgatatggtgagaaacaccgctagagatctgctgtactacgccgtgacccaggatgccatgctgatcttcgccaacctgagccggggcttcggccggcagggcaagcggaccttcatggccgagagacagtacacacggatggaggactggctgaccgccaagctggcctacgagggcctgagcaagacctacctgtccaagacactggcccagtacacctccaagacatgcagcaactgtgggtttaccatcaccagcgccgactacgacagggtgctggagaagctgaagaagacagcaacaggctggatgaccacaattaacggcaaggagctgaaggtggagggccagattacctactacaacagatacaagagacagaacgtagtcaaggacctgtccgtcgagctggatagactgagcgaagaatctgtgaacaacgacatctcctcctggacaaagggcagaagcggagaagctctgagcctcctgaagaaaagattctcccatagacccgtgcaggagaagttcgtgtgcctgaactgcggcttcgagacacacgcagccgagcaagccgccctgaacatcgccagatcctggctgttcctgcggagccaggagtacaagaaataccagacaaacaagacaaccggcaacaccgataagagagccttcgtcgagacctggcagtccttttaccggaagaagcttaaggaggtgtggaaacctgccgtgcggtctggcggatctggcggaggctccacaagcacccagatgcaggtgaagttcgacgacatcgccgtgagcttcagccaggaggagtggaagtacctggacgaggagcagaaggagctgtacagggaggtgatgaaggagaactaccagatcctgatcagcctgggcaccggcagcagcaccacccccaagatcatcagccacatcgagaggggcgaggagccctacatcagggacgagcccgtgctggtggagaggaagaccggcaagagcagcaccagccccaagaaaaagagaaaagtctaagctgccttctgcggggcttgccttctggccatgcccttcttctctcccttgcacctgtacctcttggtctttgaataaagcctgagtaggaaggctagcaaaaaaaaaaaaaaaaaaaaaaaaaaaaaaaaaaaaaaaaaaaaaaaaaaaaaaaaaaaaaaaaaaaaaaaaaaaaaaaa

SEQ ID NO: 7309 - RNA, 5797 nt, synthetic construct
  source 1..5797: mol_type = other RNA
aggaaataagagagaaaagaagagtaagaagaaatataagagccaccatggcccctaagaagaagcgtaaagtgagccggatggaacgcctcgtctacgaggtgcggcagaagtgcagaaacatcgaggacatctgcatctcctgcggatctctgaacgtgaccctggagcacccactgttcatcggcggcatgtgccagaactgtaaaaactgttttctggagtgtgcctatcaatacgacgatgacggctaccagagctactgcaccatctgttgcggcggaagagaggtgctgatgtgtggaaataacaactgctgccggtgcttctgcgtggaatgcgtggacctgctggtgggccccggcgccgcccaggccgctattaaggaagatccttggaactgctacatgtgcggccacaagggcacatacggcctgctgagacggagagaggactggcctagcagactgcagatgttcttcgccaataaccacgaccaggagttcgacccccctaaggtgtaccctcccgtccccgccgagaagagaaagcccatccgggtcctgagcctgttcgatggcatcgccaccggtctgctggtgctgaaggacctgggcatccaggtggataggtacattgcctccgaggtgtgcgaggactccatcaccgtgggaatggtgcgtcatcagggcaagatcatgtacgtgggcgacgtgcggagcgtgacacagaagcatatccaggagtggggccctttcgacctggtgatcggcggcagcccttgcaatgacctgagcatcgtgaacccagcccggaagggcctgtacgagggaaccggcagactgttcttcgagttttacagactgctgcacgacgcccggcctaaggaaggcgacgaccggcccttcttttggctgttcgagaatgtggtggccatgggagtcagcgacaagcgggatattagccggttcctggagagcaaccccgtgatgatcgatgccaaggaagtgagcgccgcccaccgggccagatacttctggggcaatctgcctggcatgaacagacccctggccagcaccgtgaacgacaagctggagctgcaggagtgcctggagcacggccggatcgccaagttcagcaaggtgagaaccatcaccacccgaagcaacagcatcaaacaaggcaaggaccagcactttcctgtgttcatgaacgagaaggaggacatcctgtggtgtaccgagatggagagagtgttcgggttcccagtccactacacagatgtcagcaacatgtctagactggccagacagagactgctgggaagaagctggtccgtccctgtgatcagacacctgttcgcccctctgaaggagtacttcgcctgcgtgagcagcggcaacagcaacgccaacagccggggccccagcttctctagcggcctggtgccactgtccctgagagggagccacatgggccccatggagatctacaaaaccgtgagcgcctggaagcggcagcctgtgcgcgtgctgagcctgtttcggaatatcgataaagtcctgaaaagcctgggattcctggagagcggctctggctccggcggtggcaccctgaagtacgtggaggatgtgacaaacgtggtcagacgggatgtggagaagtggggccccttcgatctggtgtacggcagcacccaacccctgggcagctcttgtgaccggtgccctggctggtacatgtttcagttccaccggatcctgcagtacgccctgccgagacaggagtcccagcggccattcttttggattttcatggacaacttgctgctgaccgaggatgaccaggaaactaccactcggttcctgcagaccgaagccgtgaccctgcaggacgtgagaggccgggactaccagaacgccatgcgggtgtggtccaacatccctggactgaaaagcaagcacgcacctctgacccctaaagaagaggagtacctgcaggcccaggtgcggagcagaagcaagctggacgcccctaaggtggatctgctggtgaagaattgcctcctgcccctgagagagtacttcaagtatttcagccagaatagtctgcccctgggcggcccaagcagcggcgcccctcctcccagcggcggcagcccagccggctccccaacctctaccgaggagggcacctctgagtccgccacccccgagagcggccctggcacctccaccgagcccagcgagggcagcgcacccggcagccctgccggcagccccacctccacagaggagggaaccagcaccgagcccagcgaaggcagcgccccaggcaccagcaccgagcctagtgagggcggctctggcggcggcagcgcccaggagattaaacggatcaacaagatcagaagaagacttgtgaaagacagcaacaccaagaaggccggcaagacaggccccatgaaaaccctgctggttagagtgatgacacccgatctgagagagcggctggaaaacctgagaaagaagcctgaaaatatcccccagcccatcagcaatacatctagagccaacctgaataagctgctgaccgattacaccgaaatgaagaaggcgatcctgcatgtgtactgggaagagttccagaaggaccctgtgggcctgatgagccgggtggcccagcctgccagcaagaagatcgatcagaacaagctgaaacctgagatggacgagaagggcaacctgaccaccgccggctttgcctgctctcagtgtggccagcccctgttcgtgtacaagctggagcaggtgtctgagaagggcaaggcttacaccaactacttcggacggtgcaatgtggccgagcacgaaaagctgatcctgctggcccagctgaagcccgagaaggatagcgacgaagccgtgacatatagcctgggaaagtttgggcagagggccctggatttctacagcattcatgtgaccaaggagtccacccaccccgtgaagcccctggcccagatcgccggaaacagatacgcctccggacctgtgggaaaggccctgagcgacgcatgtatgggcacaatcgcctccttcctgtctaagtaccaggacatcatcatcgaacaccagaaggtggtgaagggcaaccagaagagactggagagcctgcgggagctggccggcaaggaaaacctggaataccctagcgtgaccctgccacctcagcctcacaccaaggagggcgttgatgcctacaacgaagtgatcgcccgggtgcgaatgtgggtgaacctgaacctgtggcagaagctgaagctaagcagagatgatgccaagcctctgctgagactgaagggattcccttcctttcctctggtcgagagacaggccaacgaagtggactggtgggacatggtgtgtaacgtgaagaagctgatcaacgagaaaaaggaggatggcaaggtgttttggcagaatctggctggctacaagagacaggaagccctgagaccatacctgagcagcgaggaagatcggaagaagggaaagaaattcgctcggtaccagctgggcgacctgctgctgcacctggaaaagaagcacggcgaggactggggaaaggtgtacgacgaggcctgggagcggattgacaagaaagtggaaggcctgagcaagcacatcaagctggaagaggaacggagaagcgaggacgcccagagcaaggccgccctgaccgactggctgcgggctaaggccagcttcgtgatcgagggcctgaaggaggccgacaaggacgagttctgcagatgcgagctgaagctgcagaagtggtacggggacctgcggggaaagcccttcgccatcgaagccgagaacagcatcctggacatcagcggcttcagcaagcagtacaactgtgccttcatctggcagaaggacggcgtgaagaagctgaacctgtacctgatcatcaactacttcaagggcggcaagctgcggttcaagaagatcaaacctgaagccttcgaagccaacagattctacaccgtgatcaacaaaaagagcggcgagatcgtgcccatggaggtgaacttcaacttcgacgaccccaacctgatcatcctgcctctggcctttggcaagagacagggcagagaattcatctggaacgacctgctgtccctggaaaccggcagcctgaagctggccaacggaagagtgatcgagaagacactgtacaacagaagaacccggcaggatgagcctgccctgttcgtggccctgaccttcgagcggcgggaggtcctggactcctccaatatcaaaccaatgaacctgatcggcgtggcaagaggcgaaaacatccccgccgtgatcgccctgaccgaccccgagggctgcccactgagccggtttaaggatagcctgggaaacccaacccacatcctgagaatcggcgagagctataaggagaagcagcggaccatccaggccaagaaggaggtggagcagcggagagccggcggctacagccggaagtacgccagcaaagccaagaatctggcagacgatatggtgagaaacaccgctagagatctgctgtactacgccgtgacccaggatgccatgctgatcttcgccaacctgagccggggcttcggccggcagggcaagcggaccttcatggccgagagacagtacacacggatggaggactggctgaccgccaagctggcctacgagggcctgagcaagacctacctgtccaagacactggcccagtacacctccaagacatgcagcaactgtgggtttaccatcaccagcgccgactacgacagggtgctggagaagctgaagaagacagcaacaggctggatgaccacaattaacggcaaggagctgaaggtggagggccagattacctactacaacagatacaagagacagaacgtagtcaaggacctgtccgtcgagctggatagactgagcgaagaatctgtgaacaacgacatctcctcctggacaaagggcagaagcggagaagctctgagcctcctgaagaaaagattctcccatagacccgtgcaggagaagttcgtgtgcctgaactgcggcttcgagacacacgcagccgagcaagccgccctgaacatcgccagatcctggctgttcctgcggagccaggagtacaagaaataccagacaaacaagacaaccggcaacaccgataagagagccttcgtcgagacctggcagtccttttaccggaagaagcttaaggaggtgtggaaacctgccgtgcggtctggcggatctggcggaggctccacaagcatgaccctgctgaccttcagggacgtggccatcgagttcagcctggaggagtggaagtgcctggacctggcccagcagaacctgtacagggacgtgatgctggagaactacaggaacctgttcagcatcggcctgaccgtgagcaagcccggcctgatcacctgcctggagcagaggaaggagccctggaacgtgaagaggcaggaggccgtggacggccaccccggctggtgcagcggcgtgaccagccccaagaaaaagagaaaagtctaagctgccttctgcggggcttgccttctggccatgcccttcttctctcccttgcacctgtacctcttggtctttgaataaagcctgagtaggaaggctagcaaaaaaaaaaaaaaaaaaaaaaaaaaaaaaaaaaaaaaaaaaaaaaaaaaaaaaaaaaaaaaaaaaaaaaaaaaaaaaaa

SEQ ID NO: 7310 - RNA, 5827 nt, synthetic construct
  source 1..5827: mol_type = other RNA
aggaaataagagagaaaagaagagtaagaagaaatataagagccaccatggcccctaagaagaagcgtaaagtgagccggatggaacgcctcgtctacgaggtgcggcagaagtgcagaaacatcgaggacatctgcatctcctgcggatctctgaacgtgaccctggagcacccactgttcatcggcggcatgtgccagaactgtaaaaactgttttctggagtgtgcctatcaatacgacgatgacggctaccagagctactgcaccatctgttgcggcggaagagaggtgctgatgtgtggaaataacaactgctgccggtgcttctgcgtggaatgcgtggacctgctggtgggccccggcgccgcccaggccgctattaaggaagatccttggaactgctacatgtgcggccacaagggcacatacggcctgctgagacggagagaggactggcctagcagactgcagatgttcttcgccaataaccacgaccaggagttcgacccccctaaggtgtaccctcccgtccccgccgagaagagaaagcccatccgggtcctgagcctgttcgatggcatcgccaccggtctgctggtgctgaaggacctgggcatccaggtggataggtacattgcctccgaggtgtgcgaggactccatcaccgtgggaatggtgcgtcatcagggcaagatcatgtacgtgggcgacgtgcggagcgtgacacagaagcatatccaggagtggggccctttcgacctggtgatcggcggcagcccttgcaatgacctgagcatcgtgaacccagcccggaagggcctgtacgagggaaccggcagactgttcttcgagttttacagactgctgcacgacgcccggcctaaggaaggcgacgaccggcccttcttttggctgttcgagaatgtggtggccatgggagtcagcgacaagcgggatattagccggttcctggagagcaaccccgtgatgatcgatgccaaggaagtgagcgccgcccaccgggccagatacttctggggcaatctgcctggcatgaacagacccctggccagcaccgtgaacgacaagctggagctgcaggagtgcctggagcacggccggatcgccaagttcagcaaggtgagaaccatcaccacccgaagcaacagcatcaaacaaggcaaggaccagcactttcctgtgttcatgaacgagaaggaggacatcctgtggtgtaccgagatggagagagtgttcgggttcccagtccactacacagatgtcagcaacatgtctagactggccagacagagactgctgggaagaagctggtccgtccctgtgatcagacacctgttcgcccctctgaaggagtacttcgcctgcgtgagcagcggcaacagcaacgccaacagccggggccccagcttctctagcggcctggtgccactgtccctgagagggagccacatgggccccatggagatctacaaaaccgtgagcgcctggaagcggcagcctgtgcgcgtgctgagcctgtttcggaatatcgataaagtcctgaaaagcctgggattcctggagagcggctctggctccggcggtggcaccctgaagtacgtggaggatgtgacaaacgtggtcagacgggatgtggagaagtggggccccttcgatctggtgtacggcagcacccaacccctgggcagctcttgtgaccggtgccctggctggtacatgtttcagttccaccggatcctgcagtacgccctgccgagacaggagtcccagcggccattcttttggattttcatggacaacttgctgctgaccgaggatgaccaggaaactaccactcggttcctgcagaccgaagccgtgaccctgcaggacgtgagaggccgggactaccagaacgccatgcgggtgtggtccaacatccctggactgaaaagcaagcacgcacctctgacccctaaagaagaggagtacctgcaggcccaggtgcggagcagaagcaagctggacgcccctaaggtggatctgctggtgaagaattgcctcctgcccctgagagagtacttcaagtatttcagccagaatagtctgcccctgggcggcccaagcagcggcgcccctcctcccagcggcggcagcccagccggctccccaacctctaccgaggagggcacctctgagtccgccacccccgagagcggccctggcacctccaccgagcccagcgagggcagcgcacccggcagccctgccggcagccccacctccacagaggagggaaccagcaccgagcccagcgaaggcagcgccccaggcaccagcaccgagcctagtgagggcggctctggcggcggcagcgcccaggagattaaacggatcaacaagatcagaagaagacttgtgaaagacagcaacaccaagaaggccggcaagacaggccccatgaaaaccctgctggttagagtgatgacacccgatctgagagagcggctggaaaacctgagaaagaagcctgaaaatatcccccagcccatcagcaatacatctagagccaacctgaataagctgctgaccgattacaccgaaatgaagaaggcgatcctgcatgtgtactgggaagagttccagaaggaccctgtgggcctgatgagccgggtggcccagcctgccagcaagaagatcgatcagaacaagctgaaacctgagatggacgagaagggcaacctgaccaccgccggctttgcctgctctcagtgtggccagcccctgttcgtgtacaagctggagcaggtgtctgagaagggcaaggcttacaccaactacttcggacggtgcaatgtggccgagcacgaaaagctgatcctgctggcccagctgaagcccgagaaggatagcgacgaagccgtgacatatagcctgggaaagtttgggcagagggccctggatttctacagcattcatgtgaccaaggagtccacccaccccgtgaagcccctggcccagatcgccggaaacagatacgcctccggacctgtgggaaaggccctgagcgacgcatgtatgggcacaatcgcctccttcctgtctaagtaccaggacatcatcatcgaacaccagaaggtggtgaagggcaaccagaagagactggagagcctgcgggagctggccggcaaggaaaacctggaataccctagcgtgaccctgccacctcagcctcacaccaaggagggcgttgatgcctacaacgaagtgatcgcccgggtgcgaatgtgggtgaacctgaacctgtggcagaagctgaagctaagcagagatgatgccaagcctctgctgagactgaagggattcccttcctttcctctggtcgagagacaggccaacgaagtggactggtgggacatggtgtgtaacgtgaagaagctgatcaacgagaaaaaggaggatggcaaggtgttttggcagaatctggctggctacaagagacaggaagccctgagaccatacctgagcagcgaggaagatcggaagaagggaaagaaattcgctcggtaccagctgggcgacctgctgctgcacctggaaaagaagcacggcgaggactggggaaaggtgtacgacgaggcctgggagcggattgacaagaaagtggaaggcctgagcaagcacatcaagctggaagaggaacggagaagcgaggacgcccagagcaaggccgccctgaccgactggctgcgggctaaggccagcttcgtgatcgagggcctgaaggaggccgacaaggacgagttctgcagatgcgagctgaagctgcagaagtggtacggggacctgcggggaaagcccttcgccatcgaagccgagaacagcatcctggacatcagcggcttcagcaagcagtacaactgtgccttcatctggcagaaggacggcgtgaagaagctgaacctgtacctgatcatcaactacttcaagggcggcaagctgcggttcaagaagatcaaacctgaagccttcgaagccaacagattctacaccgtgatcaacaaaaagagcggcgagatcgtgcccatggaggtgaacttcaacttcgacgaccccaacctgatcatcctgcctctggcctttggcaagagacagggcagagaattcatctggaacgacctgctgtccctggaaaccggcagcctgaagctggccaacggaagagtgatcgagaagacactgtacaacagaagaacccggcaggatgagcctgccctgttcgtggccctgaccttcgagcggcgggaggtcctggactcctccaatatcaaaccaatgaacctgatcggcgtggcaagaggcgaaaacatccccgccgtgatcgccctgaccgaccccgagggctgcccactgagccggtttaaggatagcctgggaaacccaacccacatcctgagaatcggcgagagctataaggagaagcagcggaccatccaggccaagaaggaggtggagcagcggagagccggcggctacagccggaagtacgccagcaaagccaagaatctggcagacgatatggtgagaaacaccgctagagatctgctgtactacgccgtgacccaggatgccatgctgatcttcgccaacctgagccggggcttcggccggcagggcaagcggaccttcatggccgagagacagtacacacggatggaggactggctgaccgccaagctggcctacgagggcctgagcaagacctacctgtccaagacactggcccagtacacctccaagacatgcagcaactgtgggtttaccatcaccagcgccgactacgacagggtgctggagaagctgaagaagacagcaacaggctggatgaccacaattaacggcaaggagctgaaggtggagggccagattacctactacaacagatacaagagacagaacgtagtcaaggacctgtccgtcgagctggatagactgagcgaagaatctgtgaacaacgacatctcctcctggacaaagggcagaagcggagaagctctgagcctcctgaagaaaagattctcccatagacccgtgcaggagaagttcgtgtgcctgaactgcggcttcgagacacacgcagccgagcaagccgccctgaacatcgccagatcctggctgttcctgcggagccaggagtacaagaaataccagacaaacaagacaaccggcaacaccgataagagagccttcgtcgagacctggcagtccttttaccggaagaagcttaaggaggtgtggaaacctgccgtgcggtctggcggatctggcggaggctccacaagcgtgaccttcgaggacgtggccgtgaacttcaccccccaggagtgggccctgctggaccccagccagaagaacctgtacagggacgtgatgcaggagaccctgaggaacctggccagcgtgggcaagaagtggaaggaccagaacatggaggacgagtgcaagacccccaggaggaacctgaggagcgtggtgggcgagaggctgttcaccagcaaggagggcagccagtgcggcgagaccctgaacctggacagccaccacatgctgaagaagaccagccccaagaaaaagagaaaagtctaagctgccttctgcggggcttgccttctggccatgcccttcttctctcccttgcacctgtacctcttggtctttgaataaagcctgagtaggaaggctagcaaaaaaaaaaaaaaaaaaaaaaaaaaaaaaaaaaaaaaaaaaaaaaaaaaaaaaaaaaaaaaaaaaaaaaaaaaaaaaaa

SEQ ID NO: 7311 - RNA, 5845 nt, synthetic construct
  source 1..5845: mol_type = other RNA
aggaaataagagagaaaagaagagtaagaagaaatataagagccaccatggcccctaagaagaagcgtaaagtgagccggatggaacgcctcgtctacgaggtgcggcagaagtgcagaaacatcgaggacatctgcatctcctgcggatctctgaacgtgaccctggagcacccactgttcatcggcggcatgtgccagaactgtaaaaactgttttctggagtgtgcctatcaatacgacgatgacggctaccagagctactgcaccatctgttgcggcggaagagaggtgctgatgtgtggaaataacaactgctgccggtgcttctgcgtggaatgcgtggacctgctggtgggccccggcgccgcccaggccgctattaaggaagatccttggaactgctacatgtgcggccacaagggcacatacggcctgctgagacggagagaggactggcctagcagactgcagatgttcttcgccaataaccacgaccaggagttcgacccccctaaggtgtaccctcccgtccccgccgagaagagaaagcccatccgggtcctgagcctgttcgatggcatcgccaccggtctgctggtgctgaaggacctgggcatccaggtggataggtacattgcctccgaggtgtgcgaggactccatcaccgtgggaatggtgcgtcatcagggcaagatcatgtacgtgggcgacgtgcggagcgtgacacagaagcatatccaggagtggggccctttcgacctggtgatcggcggcagcccttgcaatgacctgagcatcgtgaacccagcccggaagggcctgtacgagggaaccggcagactgttcttcgagttttacagactgctgcacgacgcccggcctaaggaaggcgacgaccggcccttcttttggctgttcgagaatgtggtggccatgggagtcagcgacaagcgggatattagccggttcctggagagcaaccccgtgatgatcgatgccaaggaagtgagcgccgcccaccgggccagatacttctggggcaatctgcctggcatgaacagacccctggccagcaccgtgaacgacaagctggagctgcaggagtgcctggagcacggccggatcgccaagttcagcaaggtgagaaccatcaccacccgaagcaacagcatcaaacaaggcaaggaccagcactttcctgtgttcatgaacgagaaggaggacatcctgtggtgtaccgagatggagagagtgttcgggttcccagtccactacacagatgtcagcaacatgtctagactggccagacagagactgctgggaagaagctggtccgtccctgtgatcagacacctgttcgcccctctgaaggagtacttcgcctgcgtgagcagcggcaacagcaacgccaacagccggggccccagcttctctagcggcctggtgccactgtccctgagagggagccacatgggccccatggagatctacaaaaccgtgagcgcctggaagcggcagcctgtgcgcgtgctgagcctgtttcggaatatcgataaagtcctgaaaagcctgggattcctggagagcggctctggctccggcggtggcaccctgaagtacgtggaggatgtgacaaacgtggtcagacgggatgtggagaagtggggccccttcgatctggtgtacggcagcacccaacccctgggcagctcttgtgaccggtgccctggctggtacatgtttcagttccaccggatcctgcagtacgccctgccgagacaggagtcccagcggccattcttttggattttcatggacaacttgctgctgaccgaggatgaccaggaaactaccactcggttcctgcagaccgaagccgtgaccctgcaggacgtgagaggccgggactaccagaacgccatgcgggtgtggtccaacatccctggactgaaaagcaagcacgcacctctgacccctaaagaagaggagtacctgcaggcccaggtgcggagcagaagcaagctggacgcccctaaggtggatctgctggtgaagaattgcctcctgcccctgagagagtacttcaagtatttcagccagaatagtctgcccctgggcggcccaagcagcggcgcccctcctcccagcggcggcagcccagccggctccccaacctctaccgaggagggcacctctgagtccgccacccccgagagcggccctggcacctccaccgagcccagcgagggcagcgcacccggcagccctgccggcagccccacctccacagaggagggaaccagcaccgagcccagcgaaggcagcgccccaggcaccagcaccgagcctagtgagggcggctctggcggcggcagcgcccaggagattaaacggatcaacaagatcagaagaagacttgtgaaagacagcaacaccaagaaggccggcaagacaggccccatgaaaaccctgctggttagagtgatgacacccgatctgagagagcggctggaaaacctgagaaagaagcctgaaaatatcccccagcccatcagcaatacatctagagccaacctgaataagctgctgaccgattacaccgaaatgaagaaggcgatcctgcatgtgtactgggaagagttccagaaggaccctgtgggcctgatgagccgggtggcccagcctgccagcaagaagatcgatcagaacaagctgaaacctgagatggacgagaagggcaacctgaccaccgccggctttgcctgctctcagtgtggccagcccctgttcgtgtacaagctggagcaggtgtctgagaagggcaaggcttacaccaactacttcggacggtgcaatgtggccgagcacgaaaagctgatcctgctggcccagctgaagcccgagaaggatagcgacgaagccgtgacatatagcctgggaaagtttgggcagagggccctggatttctacagcattcatgtgaccaaggagtccacccaccccgtgaagcccctggcccagatcgccggaaacagatacgcctccggacctgtgggaaaggccctgagcgacgcatgtatgggcacaatcgcctccttcctgtctaagtaccaggacatcatcatcgaacaccagaaggtggtgaagggcaaccagaagagactggagagcctgcgggagctggccggcaaggaaaacctggaataccctagcgtgaccctgccacctcagcctcacaccaaggagggcgttgatgcctacaacgaagtgatcgcccgggtgcgaatgtgggtgaacctgaacctgtggcagaagctgaagctaagcagagatgatgccaagcctctgctgagactgaagggattcccttcctttcctctggtcgagagacaggccaacgaagtggactggtgggacatggtgtgtaacgtgaagaagctgatcaacgagaaaaaggaggatggcaaggtgttttggcagaatctggctggctacaagagacaggaagccctgagaccatacctgagcagcgaggaagatcggaagaagggaaagaaattcgctcggtaccagctgggcgacctgctgctgcacctggaaaagaagcacggcgaggactggggaaaggtgtacgacgaggcctgggagcggattgacaagaaagtggaaggcctgagcaagcacatcaagctggaagaggaacggagaagcgaggacgcccagagcaaggccgccctgaccgactggctgcgggctaaggccagcttcgtgatcgagggcctgaaggaggccgacaaggacgagttctgcagatgcgagctgaagctgcagaagtggtacggggacctgcggggaaagcccttcgccatcgaagccgagaacagcatcctggacatcagcggcttcagcaagcagtacaactgtgccttcatctggcagaaggacggcgtgaagaagctgaacctgtacctgatcatcaactacttcaagggcggcaagctgcggttcaagaagatcaaacctgaagccttcgaagccaacagattctacaccgtgatcaacaaaaagagcggcgagatcgtgcccatggaggtgaacttcaacttcgacgaccccaacctgatcatcctgcctctggcctttggcaagagacagggcagagaattcatctggaacgacctgctgtccctggaaaccggcagcctgaagctggccaacggaagagtgatcgagaagacactgtacaacagaagaacccggcaggatgagcctgccctgttcgtggccctgaccttcgagcggcgggaggtcctggactcctccaatatcaaaccaatgaacctgatcggcgtggcaagaggcgaaaacatccccgccgtgatcgccctgaccgaccccgagggctgcccactgagccggtttaaggatagcctgggaaacccaacccacatcctgagaatcggcgagagctataaggagaagcagcggaccatccaggccaagaaggaggtggagcagcggagagccggcggctacagccggaagtacgccagcaaagccaagaatctggcagacgatatggtgagaaacaccgctagagatctgctgtactacgccgtgacccaggatgccatgctgatcttcgccaacctgagccggggcttcggccggcagggcaagcggaccttcatggccgagagacagtacacacggatggaggactggctgaccgccaagctggcctacgagggcctgagcaagacctacctgtccaagacactggcccagtacacctccaagacatgcagcaactgtgggtttaccatcaccagcgccgactacgacagggtgctggagaagctgaagaagacagcaacaggctggatgaccacaattaacggcaaggagctgaaggtggagggccagattacctactacaacagatacaagagacagaacgtagtcaaggacctgtccgtcgagctggatagactgagcgaagaatctgtgaacaacgacatctcctcctggacaaagggcagaagcggagaagctctgagcctcctgaagaaaagattctcccatagacccgtgcaggagaagttcgtgtgcctgaactgcggcttcgagacacacgcagccgagcaagccgccctgaacatcgccagatcctggctgttcctgcggagccaggagtacaagaaataccagacaaacaagacaaccggcaacaccgataagagagccttcgtcgagacctggcagtccttttaccggaagaagcttaaggaggtgtggaaacctgccgtgcggtctggcggatctggcggaggctccacaagcgagaagatcgaggacatggccgtgagcctgatcagggaggagtggctgctggaccccagccagaaggacctgaggagggacaacaggaccgagaactacaggaacatgttcagcctgggcggcgagaccaggagcgagaacagggagctggccagcaagcaggtggccagcgccggcgtgcagccccacggcgagaccgccgccaggtgcaacggcgacgtgaccggcgccctggagcacggcgaggccagggacctgctgggcagcagggtggagaggcagagggccaacaccagccccaagaaaaagagaaaagtctaagctgccttctgcggggcttgccttctggccatgcccttcttctctcccttgcacctgtacctcttggtctttgaataaagcctgagtaggaaggctagcaaaaaaaaaaaaaaaaaaaaaaaaaaaaaaaaaaaaaaaaaaaaaaaaaaaaaaaaaaaaaaaaaaaaaaaaaaaaaaaa

SEQ ID NO: 7312 - RNA, 5797 nt, synthetic construct; identical to SEQ ID NO: 5715
  modified_base 1..5797: mod_base = OTHER; note = Each t is m1f
  source 1..5797: mol_type = other RNA

SEQ ID NO: 7313 - RNA, 5797 nt, synthetic construct; identical to SEQ ID NO: 5716
  modified_base 1..5797: mod_base = OTHER; note = Each t is m1f
  source 1..5797: mol_type = other RNA

SEQ ID NO: 7314 - RNA, 5797 nt, synthetic construct; identical to SEQ ID NO: 5717
  modified_base 1..5797: mod_base = OTHER; note = Each t is m1f
  source 1..5797: mol_type = other RNA

SEQ ID NO: 7315 - RNA, 5797 nt, synthetic construct; identical to SEQ ID NO: 5718
  modified_base 1..5797: mod_base = OTHER; note = Each t is m1f
  source 1..5797: mol_type = other RNA

SEQ ID NO: 7316 - RNA, 5797 nt, synthetic construct; identical to SEQ ID NO: 5719
  modified_base 1..5797: mod_base = OTHER; note = Each t is m1f
  source 1..5797: mol_type = other RNA

SEQ ID NO: 7317 - RNA, 5797 nt, synthetic construct; identical to SEQ ID NO: 5720
  modified_base 1..5797: mod_base = OTHER; note = Each t is m1f
  source 1..5797: mol_type = other RNA

SEQ ID NO: 7318 - RNA, 5797 nt, synthetic construct; identical to SEQ ID NO: 5721
  modified_base 1..5797: mod_base = OTHER; note = Each t is m1f
  source 1..5797: mol_type = other RNA

SEQ ID NO: 7319 - RNA, 5797 nt, synthetic construct; identical to SEQ ID NO: 5722
  modified_base 1..5797: mod_base = OTHER; note = Each t is m1f
  source 1..5797: mol_type = other RNA

SEQ ID NO: 7320 - RNA, 5797 nt, synthetic construct; identical to SEQ ID NO: 5723
  modified_base 1..5797: mod_base = OTHER; note = Each t is m1f
  source 1..5797: mol_type = other RNA

SEQ ID NO: 7321 - RNA, 5797 nt, synthetic construct; identical to SEQ ID NO: 5724
  modified_base 1..5797: mod_base = OTHER; note = Each t is m1f
  source 1..5797: mol_type = other RNA

SEQ ID NO: 7322 - RNA, 5797 nt, synthetic construct; identical to SEQ ID NO: 5725
  modified_base 1..5797: mod_base = OTHER; note = Each t is m1f
  source 1..5797: mol_type = other RNA

SEQ ID NO: 7323 - RNA, 5797 nt, synthetic construct; identical to SEQ ID NO: 5726
  modified_base 1..5797: mod_base = OTHER; note = Each t is m1f
  source 1..5797: mol_type = other RNA

SEQ ID NO: 7324 - RNA, 5797 nt, synthetic construct; identical to SEQ ID NO: 5727
  modified_base 1..5797: mod_base = OTHER; note = Each t is m1f
  source 1..5797: mol_type = other RNA

SEQ ID NO: 7325 - RNA, 5797 nt, synthetic construct; identical to SEQ ID NO: 5728
  modified_base 1..5797: mod_base = OTHER; note = Each t is m1f
  source 1..5797: mol_type = other RNA

SEQ ID NO: 7326 - RNA, 5797 nt, synthetic construct; identical to SEQ ID NO: 5729
  modified_base 1..5797: mod_base = OTHER; note = Each t is m1f
  source 1..5797: mol_type = other RNA

SEQ ID NO: 7327 - RNA, 5797 nt, synthetic construct; identical to SEQ ID NO: 5730
  modified_base 1..5797: mod_base = OTHER; note = Each t is m1f
  source 1..5797: mol_type = other RNA

SEQ ID NO: 7328 - RNA, 5797 nt, synthetic construct; identical to SEQ ID NO: 5731
  modified_base 1..5797: mod_base = OTHER; note = Each t is m1f
  source 1..5797: mol_type = other RNA

SEQ ID NO: 7329 - RNA, 5797 nt, synthetic construct; identical to SEQ ID NO: 5732
  modified_base 1..5797: mod_base = OTHER; note = Each t is m1f
  source 1..5797: mol_type = other RNA

SEQ ID NO: 7330 - RNA, 5797 nt, synthetic construct; identical to SEQ ID NO: 5733
  modified_base 1..5797: mod_base = OTHER; note = Each t is m1f
  source 1..5797: mol_type = other RNA

SEQ ID NO: 7331 - RNA, 5797 nt, synthetic construct; identical to SEQ ID NO: 5734
  modified_base 1..5797: mod_base = OTHER; note = Each t is m1f
  source 1..5797: mol_type = other RNA

SEQ ID NO: 7332 - RNA, 5797 nt, synthetic construct; identical to SEQ ID NO: 5735
  modified_base 1..5797: mod_base = OTHER; note = Each t is m1f
  source 1..5797: mol_type = other RNA

SEQ ID NO: 7333 - RNA, 5797 nt, synthetic construct; identical to SEQ ID NO: 5736
  modified_base 1..5797: mod_base = OTHER; note = Each t is m1f
  source 1..5797: mol_type = other RNA

SEQ ID NO: 7334 - RNA, 5797 nt, synthetic construct; identical to SEQ ID NO: 5737
  modified_base 1..5797: mod_base = OTHER; note = Each t is m1f
  source 1..5797: mol_type = other RNA

SEQ ID NO: 7335 - RNA, 5797 nt, synthetic construct; identical to SEQ ID NO: 5738
  modified_base 1..5797: mod_base = OTHER; note = Each t is m1f
  source 1..5797: mol_type = other RNA

SEQ ID NO: 7336 - RNA, 5797 nt, synthetic construct; identical to SEQ ID NO: 5739
  modified_base 1..5797: mod_base = OTHER; note = Each t is m1f
  source 1..5797: mol_type = other RNA

SEQ ID NO: 7337 - RNA, 5797 nt, synthetic construct; identical to SEQ ID NO: 5740
  modified_base 1..5797: mod_base = OTHER; note = Each t is m1f
  source 1..5797: mol_type = other RNA

SEQ ID NO: 7338 - RNA, 5797 nt, synthetic construct; identical to SEQ ID NO: 5741
  modified_base 1..5797: mod_base = OTHER; note = Each t is m1f
  source 1..5797: mol_type = other RNA

SEQ ID NO: 7339 - RNA, 5797 nt, synthetic construct; identical to SEQ ID NO: 5742
  modified_base 1..5797: mod_base = OTHER; note = Each t is m1f
  source 1..5797: mol_type = other RNA

SEQ ID NO: 7340 - RNA, 5797 nt, synthetic construct; identical to SEQ ID NO: 5743
  modified_base 1..5797: mod_base = OTHER; note = Each t is m1f
  source 1..5797: mol_type = other RNA

SEQ ID NO: 7341 - RNA, 5797 nt, synthetic construct; identical to SEQ ID NO: 5744
  modified_base 1..5797: mod_base = OTHER; note = Each t is m1f
  source 1..5797: mol_type = other RNA

SEQ ID NO: 7342 - RNA, 5797 nt, synthetic construct; identical to SEQ ID NO: 5745
  modified_base 1..5797: mod_base = OTHER; note = Each t is m1f
  source 1..5797: mol_type = other RNA

SEQ ID NO: 7343 - RNA, 5797 nt, synthetic construct; identical to SEQ ID NO: 5746
  modified_base 1..5797: mod_base = OTHER; note = Each t is m1f
  source 1..5797: mol_type = other RNA

SEQ ID NO: 7344 - RNA, 5797 nt, synthetic construct; identical to SEQ ID NO: 5747
  modified_base 1..5797: mod_base = OTHER; note = Each t is m1f
  source 1..5797: mol_type = other RNA

SEQ ID NO: 7345 - RNA, 5797 nt, synthetic construct; identical to SEQ ID NO: 5748
  modified_base 1..5797: mod_base = OTHER; note = Each t is m1f
  source 1..5797: mol_type = other RNA

SEQ ID NO: 7346 - RNA, 5797 nt, synthetic construct; identical to SEQ ID NO: 5749
  modified_base 1..5797: mod_base = OTHER; note = Each t is m1f
  source 1..5797: mol_type = other RNA

SEQ ID NO: 7347 - RNA, 5797 nt, synthetic construct; identical to SEQ ID NO: 5750
  modified_base 1..5797: mod_base = OTHER; note = Each t is m1f
  source 1..5797: mol_type = other RNA

SEQ ID NO: 7348 - RNA, 5797 nt, synthetic construct; identical to SEQ ID NO: 5751
  modified_base 1..5797: mod_base = OTHER; note = Each t is m1f
  source 1..5797: mol_type = other RNA

SEQ ID NO: 7349 - RNA, 5797 nt, synthetic construct; identical to SEQ ID NO: 5752
  modified_base 1..5797: mod_base = OTHER; note = Each t is m1f
  source 1..5797: mol_type = other RNA

SEQ ID NO: 7350 - RNA, 5797 nt, synthetic construct; identical to SEQ ID NO: 5753
  modified_base 1..5797: mod_base = OTHER; note = Each t is m1f
  source 1..5797: mol_type = other RNA

SEQ ID NO: 7351 - RNA, 5797 nt, synthetic construct; identical to SEQ ID NO: 5754
  modified_base 1..5797: mod_base = OTHER; note = Each t is m1f
  source 1..5797: mol_type = other RNA

SEQ ID NO: 7352 - RNA, 5797 nt, synthetic construct; identical to SEQ ID NO: 5755
  modified_base 1..5797: mod_base = OTHER; note = Each t is m1f
  source 1..5797: mol_type = other RNA

SEQ ID NO: 7353 - RNA, 5797 nt, synthetic construct; identical to SEQ ID NO: 5756
  modified_base 1..5797: mod_base = OTHER; note = Each t is m1f
  source 1..5797: mol_type = other RNA

SEQ ID NO: 7354 - RNA, 5797 nt, synthetic construct; identical to SEQ ID NO: 5757
  modified_base 1..5797: mod_base = OTHER; note = Each t is m1f
  source 1..5797: mol_type = other RNA

SEQ ID NO: 7355 - RNA, 5797 nt, synthetic construct; identical to SEQ ID NO: 5758
  modified_base 1..5797: mod_base = OTHER; note = Each t is m1f
  source 1..5797: mol_type = other RNA

SEQ ID NO: 7356 - RNA, 5797 nt, synthetic construct; identical to SEQ ID NO: 5759
  modified_base 1..5797: mod_base = OTHER; note = Each t is m1f
  source 1..5797: mol_type = other RNA

SEQ ID NO: 7357 - RNA, 5797 nt, synthetic construct; identical to SEQ ID NO: 5760
  modified_base 1..5797: mod_base = OTHER; note = Each t is m1f
  source 1..5797: mol_type = other RNA

SEQ ID NO: 7358 - RNA, 5797 nt, synthetic construct; identical to SEQ ID NO: 5761
  modified_base 1..5797: mod_base = OTHER; note = Each t is m1f
  source 1..5797: mol_type = other RNA

SEQ ID NO: 7359 - RNA, 5797 nt, synthetic construct; identical to SEQ ID NO: 5762
  modified_base 1..5797: mod_base = OTHER; note = Each t is m1f
  source 1..5797: mol_type = other RNA

SEQ ID NO: 7360 - RNA, 5797 nt, synthetic construct; identical to SEQ ID NO: 5763
  modified_base 1..5797: mod_base = OTHER; note = Each t is m1f
  source 1..5797: mol_type = other RNA

SEQ ID NO: 7361 - RNA, 5797 nt, synthetic construct; identical to SEQ ID NO: 5764
  modified_base 1..5797: mod_base = OTHER; note = Each t is m1f
  source 1..5797: mol_type = other RNA

SEQ ID NO: 7362 - RNA, 5797 nt, synthetic construct; identical to SEQ ID NO: 5765
  modified_base 1..5797: mod_base = OTHER; note = Each t is m1f
  source 1..5797: mol_type = other RNA

SEQ ID NO: 7363 - RNA, 5797 nt, synthetic construct; identical to SEQ ID NO: 5766
  modified_base 1..5797: mod_base = OTHER; note = Each t is m1f
  source 1..5797: mol_type = other RNA

SEQ ID NO: 7364 - RNA, 5797 nt, synthetic construct; identical to SEQ ID NO: 5767
  modified_base 1..5797: mod_base = OTHER; note = Each t is m1f
  source 1..5797: mol_type = other RNA

SEQ ID NO: 7365 - RNA, 5797 nt, synthetic construct; identical to SEQ ID NO: 5768
  modified_base 1..5797: mod_base = OTHER; note = Each t is m1f
  source 1..5797: mol_type = other RNA

SEQ ID NO: 7366 - RNA, 5797 nt, synthetic construct; identical to SEQ ID NO: 5769
  modified_base 1..5797: mod_base = OTHER; note = Each t is m1f
  source 1..5797: mol_type = other RNA

SEQ ID NO: 7367 - RNA, 5806 nt, synthetic construct; identical to SEQ ID NO: 5770
  modified_base 1..5797: mod_base = OTHER; note = Each t is m1f
  source 1..5806: mol_type = other RNA

SEQ ID NO: 7368 - RNA, 5797 nt, synthetic construct; identical to SEQ ID NO: 5771
  modified_base 1..5797: mod_base = OTHER; note = Each t is m1f
  source 1..5797: mol_type = other RNA

SEQ ID NO: 7369 - RNA, 5797 nt, synthetic construct; identical to SEQ ID NO: 5772
  modified_base 1..5797: mod_base = OTHER; note = Each t is m1f
  source 1..5797: mol_type = other RNA

SEQ ID NO: 7370 - RNA, 5797 nt, synthetic construct; identical to SEQ ID NO: 5773
  modified_base 1..5797: mod_base = OTHER; note = Each t is m1f
  source 1..5797: mol_type = other RNA

SEQ ID NO: 7371 - RNA, 5794 nt, synthetic construct; identical to SEQ ID NO: 5774
  modified_base 1..5794: mod_base = OTHER; note = Each t is m1f
  source 1..5794: mol_type = other RNA

SEQ ID NO: 7372 - RNA, 5797 nt, synthetic construct; identical to SEQ ID NO: 5775
  modified_base 1..5797: mod_base = OTHER; note = Each t is m1f
  source 1..5797: mol_type = other RNA

SEQ ID NO: 7373 - RNA, 5797 nt, synthetic construct; identical to SEQ ID NO: 5776
  modified_base 1..5797: mod_base = OTHER; note = Each t is m1f
  source 1..5797: mol_type = other RNA

SEQ ID NO: 7374 - RNA, 5797 nt, synthetic construct; identical to SEQ ID NO: 5777
  modified_base 1..5797: mod_base = OTHER; note = Each t is m1f
  source 1..5797: mol_type = other RNA

SEQ ID NO: 7375 - RNA, 5797 nt, synthetic construct; identical to SEQ ID NO: 5778
  modified_base 1..5797: mod_base = OTHER; note = Each t is m1f
  source 1..5797: mol_type = other RNA

SEQ ID NO: 7376 - RNA, 5797 nt, synthetic construct; identical to SEQ ID NO: 5779
  modified_base 1..5797: mod_base = OTHER; note = Each t is m1f
  source 1..5797: mol_type = other RNA

SEQ ID NO: 7377 - RNA, 5797 nt, synthetic construct; identical to SEQ ID NO: 5780
  modified_base 1..5797: mod_base = OTHER; note = Each t is m1f
  source 1..5797: mol_type = other RNA

SEQ ID NO: 7378 - RNA, 5797 nt, synthetic construct; identical to SEQ ID NO: 5781
  modified_base 1..5797: mod_base = OTHER; note = Each t is m1f
  source 1..5797: mol_type = other RNA

SEQ ID NO: 7379 - RNA, 5797 nt, synthetic construct; identical to SEQ ID NO: 5782
  modified_base 1..5797: mod_base = OTHER; note = Each t is m1f
  source 1..5797: mol_type = other RNA

SEQ ID NO: 7380 - RNA, 5797 nt, synthetic construct; identical to SEQ ID NO: 5783
  modified_base 1..5797: mod_base = OTHER; note = Each t is m1f
  source 1..5797: mol_type = other RNA

SEQ ID NO: 7381 - RNA, 5797 nt, synthetic construct; identical to SEQ ID NO: 5784
  modified_base 1..5797: mod_base = OTHER; note = Each t is m1f
  source 1..5797: mol_type = other RNA

SEQ ID NO: 7382 - RNA, 5797 nt, synthetic construct; identical to SEQ ID NO: 5785
  modified_base 1..5797: mod_base = OTHER; note = Each t is m1f
  source 1..5797: mol_type = other RNA

SEQ ID NO: 7383 - RNA, 5797 nt, synthetic construct; identical to SEQ ID NO: 5786
  modified_base 1..5797: mod_base = OTHER; note = Each t is m1f
  source 1..5797: mol_type = other RNA

SEQ ID NO: 7384 - RNA, 5797 nt, synthetic construct; identical to SEQ ID NO: 5787
  modified_base 1..5797: mod_base = OTHER; note = Each t is m1f
  source 1..5797: mol_type = other RNA

SEQ ID NO: 7385 - RNA, 5797 nt, synthetic construct; identical to SEQ ID NO: 5788
  modified_base 1..5797: mod_base = OTHER; note = Each t is m1f
  source 1..5797: mol_type = other RNA

SEQ ID NO: 7386 - RNA, 5797 nt, synthetic construct; identical to SEQ ID NO: 5789
  modified_base 1..5797: mod_base = OTHER; note = Each t is m1f
  source 1..5797: mol_type = other RNA

SEQ ID NO: 7387 - RNA, 5797 nt, synthetic construct; identical to SEQ ID NO: 5790
  modified_base 1..5797: mod_base = OTHER; note = Each t is m1f
  source 1..5797: mol_type = other RNA

SEQ ID NO: 7388 - RNA, 5797 nt, synthetic construct; identical to SEQ ID NO: 5791
  modified_base 1..5797: mod_base = OTHER; note = Each t is m1f
  source 1..5797: mol_type = other RNA

SEQ ID NO: 7389 - RNA, 5797 nt, synthetic construct; identical to SEQ ID NO: 5792
  modified_base 1..5797: mod_base = OTHER; note = Each t is m1f
  source 1..5797: mol_type = other RNA

SEQ ID NO: 7390 - RNA, 5797 nt, synthetic construct; identical to SEQ ID NO: 5793
  modified_base 1..5797: mod_base = OTHER; note = Each t is m1f
  source 1..5797: mol_type = other RNA

SEQ ID NO: 7391 - RNA, 5797 nt, synthetic construct; identical to SEQ ID NO: 5794
  modified_base 1..5797: mod_base = OTHER; note = Each t is m1f
  source 1..5797: mol_type = other RNA

SEQ ID NO: 7392 - RNA, 5797 nt, synthetic construct; identical to SEQ ID NO: 5795
  modified_base 1..5797: mod_base = OTHER; note = Each t is m1f
  source 1..5797: mol_type = other RNA

SEQ ID NO: 7393 - RNA, 5797 nt, synthetic construct; identical to SEQ ID NO: 5796
  modified_base 1..5797: mod_base = OTHER; note = Each t is m1f
  source 1..5797: mol_type = other RNA

SEQ ID NO: 7394 - RNA, 5797 nt, synthetic construct; identical to SEQ ID NO: 5797
  modified_base 1..5797: mod_base = OTHER; note = Each t is m1f
  source 1..5797: mol_type = other RNA

SEQ ID NO: 7395 - RNA, 5797 nt, synthetic construct; identical to SEQ ID NO: 5798
  modified_base 1..5797: mod_base = OTHER; note = Each t is m1f
  source 1..5797: mol_type = other RNA

SEQ ID NO: 7396 - RNA, 5797 nt, synthetic construct; identical to SEQ ID NO: 5799
  modified_base 1..5797: mod_base = OTHER; note = Each t is m1f
  source 1..5797: mol_type = other RNA

SEQ ID NO: 7397 - RNA, 5797 nt, synthetic construct; identical to SEQ ID NO: 5800
  modified_base 1..5797: mod_base = OTHER; note = Each t is m1f
  source 1..5797: mol_type = other RNA

SEQ ID NO: 7398 - RNA, 5797 nt, synthetic construct; identical to SEQ ID NO: 5801
  modified_base 1..5797: mod_base = OTHER; note = Each t is m1f
  source 1..5797: mol_type = other RNA

SEQ ID NO: 7399 - RNA, 5797 nt, synthetic construct; identical to SEQ ID NO: 5802
  modified_base 1..5797: mod_base = OTHER; note = Each t is m1f
  source 1..5797: mol_type = other RNA

SEQ ID NO: 7400 - RNA, 5797 nt, synthetic construct; identical to SEQ ID NO: 5803
  modified_base 1..5797: mod_base = OTHER; note = Each t is m1f
  source 1..5797: mol_type = other RNA

SEQ ID NO: 7401 - RNA, 5797 nt, synthetic construct; identical to SEQ ID NO: 5804
  modified_base 1..5797: mod_base = OTHER; note = Each t is m1f
  source 1..5797: mol_type = other RNA

SEQ ID NO: 7402 - RNA, 5797 nt, synthetic construct; identical to SEQ ID NO: 5805
  modified_base 1..5797: mod_base = OTHER; note = Each t is m1f
  source 1..5797: mol_type = other RNA

SEQ ID NO: 7403 - RNA, 5797 nt, synthetic construct; identical to SEQ ID NO: 5806
  modified_base 1..5797: mod_base = OTHER; note = Each t is m1f
  source 1..5797: mol_type = other RNA

SEQ ID NO: 7404 - RNA, 5797 nt, synthetic construct; identical to SEQ ID NO: 5807
  modified_base 1..5797: mod_base = OTHER; note = Each t is m1f
  source 1..5797: mol_type = other RNA

SEQ ID NO: 7405 - RNA, 5797 nt, synthetic construct; identical to SEQ ID NO: 5808
  modified_base 1..5797: mod_base = OTHER; note = Each t is m1f
  source 1..5797: mol_type = other RNA

SEQ ID NO: 7406 - RNA, 5797 nt, synthetic construct; identical to SEQ ID NO: 5809
  modified_base 1..5797: mod_base = OTHER; note = Each t is m1f
  source 1..5797: mol_type = other RNA

SEQ ID NO: 7407 - RNA, 5797 nt, synthetic construct; identical to SEQ ID NO: 5810
  modified_base 1..5797: mod_base = OTHER; note = Each t is m1f
  source 1..5797: mol_type = other RNA

SEQ ID NO: 7408 - RNA, 5797 nt, synthetic construct; identical to SEQ ID NO: 5811
  modified_base 1..5797: mod_base = OTHER; note = Each t is m1f
  source 1..5797: mol_type = other RNA

SEQ ID NO: 7409 - RNA, 5797 nt, synthetic construct; identical to SEQ ID NO: 5812
  modified_base 1..5797: mod_base = OTHER; note = Each t is m1f
  source 1..5797: mol_type = other RNA

SEQ ID NO: 7410 - RNA, 5797 nt, synthetic construct; identical to SEQ ID NO: 5813
  modified_base 1..5797: mod_base = OTHER; note = Each t is m1f
  source 1..5797: mol_type = other RNA

SEQ ID NO: 7411 - RNA, 5797 nt, synthetic construct; identical to SEQ ID NO: 5814
  modified_base 1..5797: mod_base = OTHER; note = Each t is m1f
  source 1..5797: mol_type = other RNA

SEQ ID NO: 7412 - RNA, 5797 nt, synthetic construct; identical to SEQ ID NO: 5815
  modified_base 1..5797: mod_base = OTHER; note = Each t is m1f
  source 1..5797: mol_type = other RNA

SEQ ID NO: 7413 - RNA, 5797 nt, synthetic construct; identical to SEQ ID NO: 5816
  modified_base 1..5797: mod_base = OTHER; note = Each t is m1f
  source 1..5797: mol_type = other RNA

SEQ ID NO: 7414 - RNA, 5797 nt, synthetic construct; identical to SEQ ID NO: 5817
  modified_base 1..5797: mod_base = OTHER; note = Each t is m1f
  source 1..5797: mol_type = other RNA

SEQ ID NO: 7415 - RNA, 5797 nt, synthetic construct; identical to SEQ ID NO: 5818
  modified_base 1..5797: mod_base = OTHER; note = Each t is m1f
  source 1..5797: mol_type = other RNA

SEQ ID NO: 7416 - RNA, 5797 nt, synthetic construct; identical to SEQ ID NO: 5819
  modified_base 1..5797: mod_base = OTHER; note = Each t is m1f
  source 1..5797: mol_type = other RNA

SEQ ID NO: 7417 - RNA, 5797 nt, synthetic construct; identical to SEQ ID NO: 5820
  modified_base 1..5797: mod_base = OTHER; note = Each t is m1f
  source 1..5797: mol_type = other RNA

SEQ ID NO: 7418 - RNA, 5797 nt, synthetic construct; identical to SEQ ID NO: 5821
  modified_base 1..5797: mod_base = OTHER; note = Each t is m1f
  source 1..5797: mol_type = other RNA

SEQ ID NO: 7419 - RNA, 5797 nt, synthetic construct; identical to SEQ ID NO: 5822
  modified_base 1..5797: mod_base = OTHER; note = Each t is m1f
  source 1..5797: mol_type = other RNA

SEQ ID NO: 7420 - RNA, 5797 nt, synthetic construct; identical to SEQ ID NO: 5823
  modified_base 1..5797: mod_base = OTHER; note = Each t is m1f
  source 1..5797: mol_type = other RNA

SEQ ID NO: 7421 - RNA, 5797 nt, synthetic construct; identical to SEQ ID NO: 5824
  modified_base 1..5797: mod_base = OTHER; note = Each t is m1f
  source 1..5797: mol_type = other RNA

SEQ ID NO: 7422 - RNA, 5797 nt, synthetic construct; identical to SEQ ID NO: 5825
  modified_base 1..5797: mod_base = OTHER; note = Each t is m1f
  source 1..5797: mol_type = other RNA

SEQ ID NO: 7423 - RNA, 5797 nt, synthetic construct; identical to SEQ ID NO: 5826
  modified_base 1..5797: mod_base = OTHER; note = Each t is m1f
  source 1..5797: mol_type = other RNA

SEQ ID NO: 7424 - RNA, 5797 nt, synthetic construct; identical to SEQ ID NO: 5827
  modified_base 1..5797: mod_base = OTHER; note = Each t is m1f
  source 1..5797: mol_type = other RNA

SEQ ID NO: 7425 - RNA, 5797 nt, synthetic construct; identical to SEQ ID NO: 5828
  modified_base 1..5797: mod_base = OTHER; note = Each t is m1f
  source 1..5797: mol_type = other RNA

SEQ ID NO: 7426 - RNA, 5797 nt, synthetic construct; identical to SEQ ID NO: 5829
  modified_base 1..5797: mod_base = OTHER; note = Each t is m1f
  source 1..5797: mol_type = other RNA

SEQ ID NO: 7427 - RNA, 5797 nt, synthetic construct; identical to SEQ ID NO: 5830
  modified_base 1..5797: mod_base = OTHER; note = Each t is m1f
  source 1..5797: mol_type = other RNA

SEQ ID NO: 7428 - RNA, 5797 nt, synthetic construct; identical to SEQ ID NO: 5831
  modified_base 1..5797: mod_base = OTHER; note = Each t is m1f
  source 1..5797: mol_type = other RNA

SEQ ID NO: 7429 - RNA, 5797 nt, synthetic construct; identical to SEQ ID NO: 5832
  modified_base 1..5797: mod_base = OTHER; note = Each t is m1f
  source 1..5797: mol_type = other RNA

SEQ ID NO: 7430 - RNA, 5797 nt, synthetic construct; identical to SEQ ID NO: 5833
  modified_base 1..5797: mod_base = OTHER; note = Each t is m1f
  source 1..5797: mol_type = other RNA

SEQ ID NO: 7431 - RNA, 5797 nt, synthetic construct; identical to SEQ ID NO: 5834
  modified_base 1..5797: mod_base = OTHER; note = Each t is m1f
  source 1..5797: mol_type = other RNA

SEQ ID NO: 7432 - RNA, 5797 nt, synthetic construct; identical to SEQ ID NO: 5835
  modified_base 1..5797: mod_base = OTHER; note = Each t is m1f
  source 1..5797: mol_type = other RNA

SEQ ID NO: 7433 - RNA, 5797 nt, synthetic construct; identical to SEQ ID NO: 5836
  modified_base 1..5797: mod_base = OTHER; note = Each t is m1f
  source 1..5797: mol_type = other RNA

SEQ ID NO: 7434 - RNA, 5797 nt, synthetic construct; identical to SEQ ID NO: 5837
  modified_base 1..5797: mod_base = OTHER; note = Each t is m1f
  source 1..5797: mol_type = other RNA

SEQ ID NO: 7435 - RNA, 5797 nt, synthetic construct; identical to SEQ ID NO: 5838
  modified_base 1..5797: mod_base = OTHER; note = Each t is m1f
  source 1..5797: mol_type = other RNA

SEQ ID NO: 7436 - RNA, 5797 nt, synthetic construct; identical to SEQ ID NO: 5839
  modified_base 1..5797: mod_base = OTHER; note = Each t is m1f
  source 1..5797: mol_type = other RNA

SEQ ID NO: 7437 - RNA, 5797 nt, synthetic construct; identical to SEQ ID NO: 5840
  modified_base 1..5797: mod_base = OTHER; note = Each t is m1f
  source 1..5797: mol_type = other RNA

SEQ ID NO: 7438 - RNA, 5797 nt, synthetic construct; identical to SEQ ID NO: 5841
  modified_base 1..5797: mod_base = OTHER; note = Each t is m1f
  source 1..5797: mol_type = other RNA

SEQ ID NO: 7439 - RNA, 5797 nt, synthetic construct; identical to SEQ ID NO: 5842
  modified_base 1..5797: mod_base = OTHER; note = Each t is m1f
  source 1..5797: mol_type = other RNA

SEQ ID NO: 7440 - RNA, 5797 nt, synthetic construct; identical to SEQ ID NO: 5843
  modified_base 1..5797: mod_base = OTHER; note = Each t is m1f
  source 1..5797: mol_type = other RNA

SEQ ID NO: 7441 - RNA, 5797 nt, synthetic construct; identical to SEQ ID NO: 5844
  modified_base 1..5797: mod_base = OTHER; note = Each t is m1f
  source 1..5797: mol_type = other RNA

SEQ ID NO: 7442 - RNA, 5797 nt, synthetic construct; identical to SEQ ID NO: 5845
  modified_base 1..5797: mod_base = OTHER; note = Each t is m1f
  source 1..5797: mol_type = other RNA

SEQ ID NO: 7443 - RNA, 5797 nt, synthetic construct; identical to SEQ ID NO: 5846
  modified_base 1..5797: mod_base = OTHER; note = Each t is m1f
  source 1..5797: mol_type = other RNA

SEQ ID NO: 7444 - RNA, 5797 nt, synthetic construct; identical to SEQ ID NO: 5847
  modified_base 1..5797: mod_base = OTHER; note = Each t is m1f
  source 1..5797: mol_type = other RNA

SEQ ID NO: 7445 - RNA, 5797 nt, synthetic construct; identical to SEQ ID NO: 5848
  modified_base 1..5797: mod_base = OTHER; note = Each t is m1f
  source 1..5797: mol_type = other RNA

SEQ ID NO: 7446 - RNA, 5797 nt, synthetic construct; identical to SEQ ID NO: 5849
  modified_base 1..5797: mod_base = OTHER; note = Each t is m1f
  source 1..5797: mol_type = other RNA

SEQ ID NO: 7447 - RNA, 5797 nt, synthetic construct; identical to SEQ ID NO: 5850
  modified_base 1..5797: mod_base = OTHER; note = Each t is m1f
  source 1..5797: mol_type = other RNA

SEQ ID NO: 7448 - RNA, 5797 nt, synthetic construct; identical to SEQ ID NO: 5851
  modified_base 1..5797: mod_base = OTHER; note = Each t is m1f
  source 1..5797: mol_type = other RNA

SEQ ID NO: 7449 - RNA, 5797 nt, synthetic construct; identical to SEQ ID NO: 5852
  modified_base 1..5797: mod_base = OTHER; note = Each t is m1f
  source 1..5797: mol_type = other RNA

SEQ ID NO: 7450 - RNA, 5797 nt, synthetic construct; identical to SEQ ID NO: 5853
  modified_base 1..5797: mod_base = OTHER; note = Each t is m1f
  source 1..5797: mol_type = other RNA

SEQ ID NO: 7451 - RNA, 5797 nt, synthetic construct; identical to SEQ ID NO: 5854
  modified_base 1..5797: mod_base = OTHER; note = Each t is m1f
  source 1..5797: mol_type = other RNA

SEQ ID NO: 7452 - RNA, 5797 nt, synthetic construct; identical to SEQ ID NO: 5855
  modified_base 1..5797: mod_base = OTHER; note = Each t is m1f
  source 1..5797: mol_type = other RNA

SEQ ID NO: 7453 - RNA, 5797 nt, synthetic construct; identical to SEQ ID NO: 5856
  modified_base 1..5797: mod_base = OTHER; note = Each t is m1f
  source 1..5797: mol_type = other RNA

SEQ ID NO: 7454 - RNA, 5797 nt, synthetic construct; identical to SEQ ID NO: 5857
  modified_base 1..5797: mod_base = OTHER; note = Each t is m1f
  source 1..5797: mol_type = other RNA

SEQ ID NO: 7455 - RNA, 5797 nt, synthetic construct; identical to SEQ ID NO: 5858
  modified_base 1..5797: mod_base = OTHER; note = Each t is m1f
  source 1..5797: mol_type = other RNA

SEQ ID NO: 7456 - RNA, 5797 nt, synthetic construct; identical to SEQ ID NO: 5859
  modified_base 1..5797: mod_base = OTHER; note = Each t is m1f
  source 1..5797: mol_type = other RNA

SEQ ID NO: 7457 - RNA, 5797 nt, synthetic construct; identical to SEQ ID NO: 5860
  modified_base 1..5797: mod_base = OTHER; note = Each t is m1f
  source 1..5797: mol_type = other RNA

SEQ ID NO: 7458 - RNA, 5797 nt, synthetic construct; identical to SEQ ID NO: 5861
  modified_base 1..5797: mod_base = OTHER; note = Each t is m1f
  source 1..5797: mol_type = other RNA

SEQ ID NO: 7459 - RNA, 5797 nt, synthetic construct; identical to SEQ ID NO: 5862
  modified_base 1..5797: mod_base = OTHER; note = Each t is m1f
  source 1..5797: mol_type = other RNA

SEQ ID NO: 7460 - RNA, 5797 nt, synthetic construct; identical to SEQ ID NO: 5863
  modified_base 1..5797: mod_base = OTHER; note = Each t is m1f
  source 1..5797: mol_type = other RNA

SEQ ID NO: 7461 - RNA, 5797 nt, synthetic construct; identical to SEQ ID NO: 5864
  modified_base 1..5797: mod_base = OTHER; note = Each t is m1f
  source 1..5797: mol_type = other RNA

SEQ ID NO: 7462 - RNA, 5797 nt, synthetic construct; identical to SEQ ID NO: 5865
  modified_base 1..5797: mod_base = OTHER; note = Each t is m1f
  source 1..5797: mol_type = other RNA

SEQ ID NO: 7463 - RNA, 5797 nt, synthetic construct; identical to SEQ ID NO: 5866
  modified_base 1..5797: mod_base = OTHER; note = Each t is m1f
  source 1..5797: mol_type = other RNA

SEQ ID NO: 7464 - RNA, 5797 nt, synthetic construct; identical to SEQ ID NO: 5867
  modified_base 1..5797: mod_base = OTHER; note = Each t is m1f
  source 1..5797: mol_type = other RNA

SEQ ID NO: 7465 - RNA, 5797 nt, synthetic construct; identical to SEQ ID NO: 5868
  modified_base 1..5797: mod_base = OTHER; note = Each t is m1f
  source 1..5797: mol_type = other RNA

SEQ ID NO: 7466 - RNA, 5797 nt, synthetic construct; identical to SEQ ID NO: 5869
  modified_base 1..5797: mod_base = OTHER; note = Each t is m1f
  source 1..5797: mol_type = other RNA

SEQ ID NO: 7467 - RNA, 5797 nt, synthetic construct; identical to SEQ ID NO: 5870
  modified_base 1..5797: mod_base = OTHER; note = Each t is m1f
  source 1..5797: mol_type = other RNA

SEQ ID NO: 7468 - RNA, 5797 nt, synthetic construct; identical to SEQ ID NO: 5871
  modified_base 1..5797: mod_base = OTHER; note = Each t is m1f
  source 1..5797: mol_type = other RNA

SEQ ID NO: 7469 - RNA, 5797 nt, synthetic construct; identical to SEQ ID NO: 5872
  modified_base 1..5797: mod_base = OTHER; note = Each t is m1f
  source 1..5797: mol_type = other RNA

SEQ ID NO: 7470 - RNA, 5797 nt, synthetic construct; identical to SEQ ID NO: 5873
  modified_base 1..5797: mod_base = OTHER; note = Each t is m1f
  source 1..5797: mol_type = other RNA

SEQ ID NO: 7471 - RNA, 5797 nt, synthetic construct; identical to SEQ ID NO: 5874
  modified_base 1..5797: mod_base = OTHER; note = Each t is m1f
  source 1..5797: mol_type = other RNA

SEQ ID NO: 7472 - RNA, 5797 nt, synthetic construct; identical to SEQ ID NO: 5875
  modified_base 1..5797: mod_base = OTHER; note = Each t is m1f
  source 1..5797: mol_type = other RNA

SEQ ID NO: 7473 - RNA, 5797 nt, synthetic construct; identical to SEQ ID NO: 5876
  modified_base 1..5797: mod_base = OTHER; note = Each t is m1f
  source 1..5797: mol_type = other RNA

SEQ ID NO: 7474 - RNA, 5797 nt, synthetic construct; identical to SEQ ID NO: 5877
  modified_base 1..5797: mod_base = OTHER; note = Each t is m1f
  source 1..5797: mol_type = other RNA

SEQ ID NO: 7475 - RNA, 5794 nt, synthetic construct; identical to SEQ ID NO: 5878
  modified_base 1..5794: mod_base = OTHER; note = Each t is m1f
  source 1..5794: mol_type = other RNA

SEQ ID NO: 7476 - RNA, 5797 nt, synthetic construct; identical to SEQ ID NO: 5879
  modified_base 1..5797: mod_base = OTHER; note = Each t is m1f
  source 1..5797: mol_type = other RNA

SEQ ID NO: 7477 - RNA, 5797 nt, synthetic construct; identical to SEQ ID NO: 5880
  modified_base 1..5797: mod_base = OTHER; note = Each t is m1f
  source 1..5797: mol_type = other RNA

SEQ ID NO: 7478 - RNA, 5797 nt, synthetic construct; identical to SEQ ID NO: 5881
  modified_base 1..5797: mod_base = OTHER; note = Each t is m1f
  source 1..5797: mol_type = other RNA

SEQ ID NO: 7479 - RNA, 5797 nt, synthetic construct; identical to SEQ ID NO: 5882
  modified_base 1..5797: mod_base = OTHER; note = Each t is m1f
  source 1..5797: mol_type = other RNA

SEQ ID NO: 7480 - RNA, 5797 nt, synthetic construct; identical to SEQ ID NO: 5883
  modified_base 1..5797: mod_base = OTHER; note = Each t is m1f
  source 1..5797: mol_type = other RNA

SEQ ID NO: 7481 - RNA, 5797 nt, synthetic construct; identical to SEQ ID NO: 5884
  modified_base 1..5797: mod_base = OTHER; note = Each t is m1f
  source 1..5797: mol_type = other RNA

SEQ ID NO: 7482 - RNA, 5797 nt, synthetic construct; identical to SEQ ID NO: 5885
  modified_base 1..5797: mod_base = OTHER; note = Each t is m1f
  source 1..5797: mol_type = other RNA

SEQ ID NO: 7483 - RNA, 5797 nt, synthetic construct; identical to SEQ ID NO: 5886
  modified_base 1..5797: mod_base = OTHER; note = Each t is m1f
  source 1..5797: mol_type = other RNA

SEQ ID NO: 7484 - RNA, 5797 nt, synthetic construct; identical to SEQ ID NO: 5887
  modified_base 1..5797: mod_base = OTHER; note = Each t is m1f
  source 1..5797: mol_type = other RNA

SEQ ID NO: 7485 - RNA, 5797 nt, synthetic construct; identical to SEQ ID NO: 5888
  modified_base 1..5797: mod_base = OTHER; note = Each t is m1f
  source 1..5797: mol_type = other RNA

SEQ ID NO: 7486 - RNA, 5794 nt, synthetic construct; identical to SEQ ID NO: 5889
  modified_base 1..5794: mod_base = OTHER; note = Each t is m1f
  source 1..5794: mol_type = other RNA

SEQ ID NO: 7487 - RNA, 5797 nt, synthetic construct; identical to SEQ ID NO: 5890
  modified_base 1..5797: mod_base = OTHER; note = Each t is m1f
  source 1..5797: mol_type = other RNA

SEQ ID NO: 7488 - RNA, 5797 nt, synthetic construct; identical to SEQ ID NO: 5891
  modified_base 1..5797: mod_base = OTHER; note = Each t is m1f
  source 1..5797: mol_type = other RNA

SEQ ID NO: 7489 - RNA, 5797 nt, synthetic construct; identical to SEQ ID NO: 5892
  modified_base 1..5797: mod_base = OTHER; note = Each t is m1f
  source 1..5797: mol_type = other RNA

SEQ ID NO: 7490 - RNA, 5797 nt, synthetic construct; identical to SEQ ID NO: 5893
  modified_base 1..5797: mod_base = OTHER; note = Each t is m1f
  source 1..5797: mol_type = other RNA

SEQ ID NO: 7491 - RNA, 5797 nt, synthetic construct; identical to SEQ ID NO: 5894
  modified_base 1..5797: mod_base = OTHER; note = Each t is m1f
  source 1..5797: mol_type = other RNA

SEQ ID NO: 7492 - RNA, 5797 nt, synthetic construct; identical to SEQ ID NO: 5895
  modified_base 1..5797: mod_base = OTHER; note = Each t is m1f
  source 1..5797: mol_type = other RNA

SEQ ID NO: 7493 - RNA, 5797 nt, synthetic construct; identical to SEQ ID NO: 5896
  modified_base 1..5797: mod_base = OTHER; note = Each t is m1f
  source 1..5797: mol_type = other RNA

SEQ ID NO: 7494 - RNA, 5797 nt, synthetic construct; identical to SEQ ID NO: 5897
  modified_base 1..5797: mod_base = OTHER; note = Each t is m1f
  source 1..5797: mol_type = other RNA

SEQ ID NO: 7495 - RNA, 5797 nt, synthetic construct; identical to SEQ ID NO: 5898
  modified_base 1..5797: mod_base = OTHER; note = Each t is m1f
  source 1..5797: mol_type = other RNA

SEQ ID NO: 7496 - RNA, 5797 nt, synthetic construct; identical to SEQ ID NO: 5899
  modified_base 1..5797: mod_base = OTHER; note = Each t is m1f
  source 1..5797: mol_type = other RNA

SEQ ID NO: 7497 - RNA, 5797 nt, synthetic construct; identical to SEQ ID NO: 5900
  modified_base 1..5797: mod_base = OTHER; note = Each t is m1f
  source 1..5797: mol_type = other RNA

SEQ ID NO: 7498 - RNA, 5797 nt, synthetic construct; identical to SEQ ID NO: 5901
  modified_base 1..5797: mod_base = OTHER; note = Each t is m1f
  source 1..5797: mol_type = other RNA

SEQ ID NO: 7499 - RNA, 5797 nt, synthetic construct; identical to SEQ ID NO: 5902
  modified_base 1..5797: mod_base = OTHER; note = Each t is m1f
  source 1..5797: mol_type = other RNA

SEQ ID NO: 7500 - RNA, 5797 nt, synthetic construct; identical to SEQ ID NO: 5903
  modified_base 1..5797: mod_base = OTHER; note = Each t is m1f
  source 1..5797: mol_type = other RNA

SEQ ID NO: 7501 - RNA, 5797 nt, synthetic construct; identical to SEQ ID NO: 5904
  modified_base 1..5797: mod_base = OTHER; note = Each t is m1f
  source 1..5797: mol_type = other RNA

SEQ ID NO: 7502 - RNA, 5797 nt, synthetic construct; identical to SEQ ID NO: 5905
  modified_base 1..5797: mod_base = OTHER; note = Each t is m1f
  source 1..5797: mol_type = other RNA

SEQ ID NO: 7503 - RNA, 5797 nt, synthetic construct; identical to SEQ ID NO: 5906
  modified_base 1..5797: mod_base = OTHER; note = Each t is m1f
  source 1..5797: mol_type = other RNA

SEQ ID NO: 7504 - RNA, 5797 nt, synthetic construct; identical to SEQ ID NO: 5907
  modified_base 1..5797: mod_base = OTHER; note = Each t is m1f
  source 1..5797: mol_type = other RNA

SEQ ID NO: 7505 - RNA, 5797 nt, synthetic construct; identical to SEQ ID NO: 5908
  modified_base 1..5797: mod_base = OTHER; note = Each t is m1f
  source 1..5797: mol_type = other RNA

SEQ ID NO: 7506 - RNA, 5797 nt, synthetic construct; identical to SEQ ID NO: 5909
  modified_base 1..5797: mod_base = OTHER; note = Each t is m1f
  source 1..5797: mol_type = other RNA

SEQ ID NO: 7507 - RNA, 5797 nt, synthetic construct; identical to SEQ ID NO: 5910
  modified_base 1..5797: mod_base = OTHER; note = Each t is m1f
  source 1..5797: mol_type = other RNA

SEQ ID NO: 7508 - RNA, 5797 nt, synthetic construct; identical to SEQ ID NO: 5911
  modified_base 1..5797: mod_base = OTHER; note = Each t is m1f
  source 1..5797: mol_type = other RNA

SEQ ID NO: 7509 - RNA, 5797 nt, synthetic construct; identical to SEQ ID NO: 5912
  modified_base 1..5797: mod_base = OTHER; note = Each t is m1f
  source 1..5797: mol_type = other RNA

SEQ ID NO: 7510 - RNA, 5797 nt, synthetic construct; identical to SEQ ID NO: 5913
  modified_base 1..5797: mod_base = OTHER; note = Each t is m1f
  source 1..5797: mol_type = other RNA

SEQ ID NO: 7511 - RNA, 5797 nt, synthetic construct; identical to SEQ ID NO: 5914
  modified_base 1..5797: mod_base = OTHER; note = Each t is m1f
  source 1..5797: mol_type = other RNA

SEQ ID NO: 7512 - RNA, 5797 nt, synthetic construct; identical to SEQ ID NO: 5915
  modified_base 1..5797: mod_base = OTHER; note = Each t is m1f
  source 1..5797: mol_type = other RNA

SEQ ID NO: 7513 - RNA, 5797 nt, synthetic construct; identical to SEQ ID NO: 5916
  modified_base 1..5797: mod_base = OTHER; note = Each t is m1f
  source 1..5797: mol_type = other RNA

SEQ ID NO: 7514 - RNA, 5794 nt, synthetic construct; identical to SEQ ID NO: 5917
  modified_base 1..5794: mod_base = OTHER; note = Each t is m1f
  source 1..5794: mol_type = other RNA

SEQ ID NO: 7515 - RNA, 5797 nt, synthetic construct; identical to SEQ ID NO: 5918
  modified_base 1..5797: mod_base = OTHER; note = Each t is m1f
  source 1..5797: mol_type = other RNA

SEQ ID NO: 7516 - RNA, 5797 nt, synthetic construct; identical to SEQ ID NO: 5919
  modified_base 1..5797: mod_base = OTHER; note = Each t is m1f
  source 1..5797: mol_type = other RNA

SEQ ID NO: 7517 - RNA, 5797 nt, synthetic construct; identical to SEQ ID NO: 5920
  modified_base 1..5797: mod_base = OTHER; note = Each t is m1f
  source 1..5797: mol_type = other RNA

SEQ ID NO: 7518 - RNA, 5797 nt, synthetic construct; identical to SEQ ID NO: 5921
  modified_base 1..5797: mod_base = OTHER; note = Each t is m1f
  source 1..5797: mol_type = other RNA

SEQ ID NO: 7519 - RNA, 5797 nt, synthetic construct; identical to SEQ ID NO: 5922
  modified_base 1..5797: mod_base = OTHER; note = Each t is m1f
  source 1..5797: mol_type = other RNA

SEQ ID NO: 7520 - RNA, 5797 nt, synthetic construct; identical to SEQ ID NO: 5923
  modified_base 1..5797: mod_base = OTHER; note = Each t is m1f
  source 1..5797: mol_type = other RNA

SEQ ID NO: 7521 - RNA, 5797 nt, synthetic construct; identical to SEQ ID NO: 5924
  modified_base 1..5797: mod_base = OTHER; note = Each t is m1f
  source 1..5797: mol_type = other RNA

SEQ ID NO: 7522 - RNA, 5797 nt, synthetic construct; identical to SEQ ID NO: 5925
  modified_base 1..5797: mod_base = OTHER; note = Each t is m1f
  source 1..5797: mol_type = other RNA

SEQ ID NO: 7523 - RNA, 5797 nt, synthetic construct; identical to SEQ ID NO: 5926
  modified_base 1..5797: mod_base = OTHER; note = Each t is m1f
  source 1..5797: mol_type = other RNA

SEQ ID NO: 7524 - RNA, 5797 nt, synthetic construct; identical to SEQ ID NO: 5927
  modified_base 1..5797: mod_base = OTHER; note = Each t is m1f
  source 1..5797: mol_type = other RNA

SEQ ID NO: 7525 - RNA, 5797 nt, synthetic construct; identical to SEQ ID NO: 5928
  modified_base 1..5797: mod_base = OTHER; note = Each t is m1f
  source 1..5797: mol_type = other RNA

SEQ ID NO: 7526 - RNA, 5797 nt, synthetic construct; identical to SEQ ID NO: 5929
  modified_base 1..5797: mod_base = OTHER; note = Each t is m1f
  source 1..5797: mol_type = other RNA

SEQ ID NO: 7527 - RNA, 5797 nt, synthetic construct; identical to SEQ ID NO: 5930
  modified_base 1..5797: mod_base = OTHER; note = Each t is m1f
  source 1..5797: mol_type = other RNA

SEQ ID NO: 7528 - RNA, 5797 nt, synthetic construct; identical to SEQ ID NO: 5931
  modified_base 1..5797: mod_base = OTHER; note = Each t is m1f
  source 1..5797: mol_type = other RNA

SEQ ID NO: 7529 - RNA, 5797 nt, synthetic construct; identical to SEQ ID NO: 5932
  modified_base 1..5797: mod_base = OTHER; note = Each t is m1f
  source 1..5797: mol_type = other RNA

SEQ ID NO: 7530 - RNA, 5797 nt, synthetic construct; identical to SEQ ID NO: 5933
  modified_base 1..5797: mod_base = OTHER; note = Each t is m1f
  source 1..5797: mol_type = other RNA

SEQ ID NO: 7531 - RNA, 5797 nt, synthetic construct; identical to SEQ ID NO: 5934
  modified_base 1..5797: mod_base = OTHER; note = Each t is m1f
  source 1..5797: mol_type = other RNA

SEQ ID NO: 7532 - RNA, 5797 nt, synthetic construct; identical to SEQ ID NO: 5935
  modified_base 1..5797: mod_base = OTHER; note = Each t is m1f
  source 1..5797: mol_type = other RNA

SEQ ID NO: 7533 - RNA, 5797 nt, synthetic construct; identical to SEQ ID NO: 5936
  modified_base 1..5797: mod_base = OTHER; note = Each t is m1f
  source 1..5797: mol_type = other RNA

SEQ ID NO: 7534 - RNA, 5797 nt, synthetic construct; identical to SEQ ID NO: 5937
  modified_base 1..5797: mod_base = OTHER; note = Each t is m1f
  source 1..5797: mol_type = other RNA

SEQ ID NO: 7535 - RNA, 5797 nt, synthetic construct; identical to SEQ ID NO: 5938
  modified_base 1..5797: mod_base = OTHER; note = Each t is m1f
  source 1..5797: mol_type = other RNA

SEQ ID NO: 7536 - RNA, 5797 nt, synthetic construct; identical to SEQ ID NO: 5939
  modified_base 1..5797: mod_base = OTHER; note = Each t is m1f
  source 1..5797: mol_type = other RNA

SEQ ID NO: 7537 - RNA, 5797 nt, synthetic construct; identical to SEQ ID NO: 5940
  modified_base 1..5797: mod_base = OTHER; note = Each t is m1f
  source 1..5797: mol_type = other RNA

SEQ ID NO: 7538 - RNA, 5797 nt, synthetic construct; identical to SEQ ID NO: 5941
  modified_base 1..5797: mod_base = OTHER; note = Each t is m1f
  source 1..5797: mol_type = other RNA

SEQ ID NO: 7539 - RNA, 5797 nt, synthetic construct; identical to SEQ ID NO: 5942
  modified_base 1..5797: mod_base = OTHER; note = Each t is m1f
  source 1..5797: mol_type = other RNA

SEQ ID NO: 7540 - RNA, 5797 nt, synthetic construct; identical to SEQ ID NO: 5943
  modified_base 1..5797: mod_base = OTHER; note = Each t is m1f
  source 1..5797: mol_type = other RNA

SEQ ID NO: 7541 - RNA, 5797 nt, synthetic construct; identical to SEQ ID NO: 5944
  modified_base 1..5797: mod_base = OTHER; note = Each t is m1f
  source 1..5797: mol_type = other RNA

SEQ ID NO: 7542 - RNA, 5797 nt, synthetic construct; identical to SEQ ID NO: 5945
  modified_base 1..5797: mod_base = OTHER; note = Each t is m1f
  source 1..5797: mol_type = other RNA

SEQ ID NO: 7543 - RNA, 5797 nt, synthetic construct; identical to SEQ ID NO: 5946
  modified_base 1..5797: mod_base = OTHER; note = Each t is m1f
  source 1..5797: mol_type = other RNA

SEQ ID NO: 7544 - RNA, 5797 nt, synthetic construct; identical to SEQ ID NO: 5947
  modified_base 1..5797: mod_base = OTHER; note = Each t is m1f
  source 1..5797: mol_type = other RNA

SEQ ID NO: 7545 - RNA, 5797 nt, synthetic construct; identical to SEQ ID NO: 5948
  modified_base 1..5797: mod_base = OTHER; note = Each t is m1f
  source 1..5797: mol_type = other RNA

SEQ ID NO: 7546 - RNA, 5797 nt, synthetic construct; identical to SEQ ID NO: 5949
  modified_base 1..5797: mod_base = OTHER; note = Each t is m1f
  source 1..5797: mol_type = other RNA

SEQ ID NO: 7547 - RNA, 5797 nt, synthetic construct; identical to SEQ ID NO: 5950
  modified_base 1..5797: mod_base = OTHER; note = Each t is m1f
  source 1..5797: mol_type = other RNA

SEQ ID NO: 7548 - RNA, 5797 nt, synthetic construct; identical to SEQ ID NO: 5951
  modified_base 1..5797: mod_base = OTHER; note = Each t is m1f
  source 1..5797: mol_type = other RNA

SEQ ID NO: 7549 - RNA, 5797 nt, synthetic construct; identical to SEQ ID NO: 5952
  modified_base 1..5797: mod_base = OTHER; note = Each t is m1f
  source 1..5797: mol_type = other RNA

SEQ ID NO: 7550 - RNA, 5797 nt, synthetic construct; identical to SEQ ID NO: 5953
  modified_base 1..5797: mod_base = OTHER; note = Each t is m1f
  source 1..5797: mol_type = other RNA

SEQ ID NO: 7551 - RNA, 5797 nt, synthetic construct; identical to SEQ ID NO: 5954
  modified_base 1..5797: mod_base = OTHER; note = Each t is m1f
  source 1..5797: mol_type = other RNA

SEQ ID NO: 7552 - RNA, 5797 nt, synthetic construct; identical to SEQ ID NO: 5955
  modified_base 1..5797: mod_base = OTHER; note = Each t is m1f
  source 1..5797: mol_type = other RNA

SEQ ID NO: 7553 - RNA, 5797 nt, synthetic construct; identical to SEQ ID NO: 5956
  modified_base 1..5797: mod_base = OTHER; note = Each t is m1f
  source 1..5797: mol_type = other RNA

SEQ ID NO: 7554 - RNA, 5797 nt, synthetic construct; identical to SEQ ID NO: 5957
  modified_base 1..5797: mod_base = OTHER; note = Each t is m1f
  source 1..5797: mol_type = other RNA

SEQ ID NO: 7555 - RNA, 5797 nt, synthetic construct; identical to SEQ ID NO: 5958
  modified_base 1..5797: mod_base = OTHER; note = Each t is m1f
  source 1..5797: mol_type = other RNA

SEQ ID NO: 7556 - RNA, 5797 nt, synthetic construct; identical to SEQ ID NO: 5959
  modified_base 1..5797: mod_base = OTHER; note = Each t is m1f
  source 1..5797: mol_type = other RNA

SEQ ID NO: 7557 - RNA, 5797 nt, synthetic construct; identical to SEQ ID NO: 5960
  modified_base 1..5797: mod_base = OTHER; note = Each t is m1f
  source 1..5797: mol_type = other RNA

SEQ ID NO: 7558 - RNA, 5797 nt, synthetic construct; identical to SEQ ID NO: 5961
  modified_base 1..5797: mod_base = OTHER; note = Each t is m1f
  source 1..5797: mol_type = other RNA

SEQ ID NO: 7559 - RNA, 5797 nt, synthetic construct; identical to SEQ ID NO: 5962
  modified_base 1..5797: mod_base = OTHER; note = Each t is m1f
  source 1..5797: mol_type = other RNA

SEQ ID NO: 7560 - RNA, 5797 nt, synthetic construct; identical to SEQ ID NO: 5963
  modified_base 1..5797: mod_base = OTHER; note = Each t is m1f
  source 1..5797: mol_type = other RNA

SEQ ID NO: 7561 - RNA, 5797 nt, synthetic construct; identical to SEQ ID NO: 5964
  modified_base 1..5797: mod_base = OTHER; note = Each t is m1f
  source 1..5797: mol_type = other RNA

SEQ ID NO: 7562 - RNA, 5797 nt, synthetic construct; identical to SEQ ID NO: 5965
  modified_base 1..5797: mod_base = OTHER; note = Each t is m1f
  source 1..5797: mol_type = other RNA

SEQ ID NO: 7563 - RNA, 5797 nt, synthetic construct; identical to SEQ ID NO: 5966
  modified_base 1..5797: mod_base = OTHER; note = Each t is m1f
  source 1..5797: mol_type = other RNA

SEQ ID NO: 7564 - RNA, 5797 nt, synthetic construct; identical to SEQ ID NO: 5967
  modified_base 1..5797: mod_base = OTHER; note = Each t is m1f
  source 1..5797: mol_type = other RNA

SEQ ID NO: 7565 - RNA, 5797 nt, synthetic construct; identical to SEQ ID NO: 5968
  modified_base 1..5797: mod_base = OTHER; note = Each t is m1f
  source 1..5797: mol_type = other RNA

SEQ ID NO: 7566 - RNA, 5797 nt, synthetic construct; identical to SEQ ID NO: 5969
  modified_base 1..5797: mod_base = OTHER; note = Each t is m1f
  source 1..5797: mol_type = other RNA

SEQ ID NO: 7567 - RNA, 5806 nt, synthetic construct; identical to SEQ ID NO: 5970
  modified_base 1..5797: mod_base = OTHER; note = Each t is m1f
  source 1..5806: mol_type = other RNA

SEQ ID NO: 7568 - RNA, 5797 nt, synthetic construct; identical to SEQ ID NO: 5971
  modified_base 1..5797: mod_base = OTHER; note = Each t is m1f
  source 1..5797: mol_type = other RNA

SEQ ID NO: 7569 - RNA, 5797 nt, synthetic construct; identical to SEQ ID NO: 5972
  modified_base 1..5797: mod_base = OTHER; note = Each t is m1f
  source 1..5797: mol_type = other RNA

SEQ ID NO: 7570 - RNA, 5797 nt, synthetic construct; identical to SEQ ID NO: 5973
  modified_base 1..5797: mod_base = OTHER; note = Each t is m1f
  source 1..5797: mol_type = other RNA

SEQ ID NO: 7571 - RNA, 5797 nt, synthetic construct; identical to SEQ ID NO: 5974
  modified_base 1..5797: mod_base = OTHER; note = Each t is m1f
  source 1..5797: mol_type = other RNA

SEQ ID NO: 7572 - RNA, 5797 nt, synthetic construct; identical to SEQ ID NO: 5975
  modified_base 1..5797: mod_base = OTHER; note = Each t is m1f
  source 1..5797: mol_type = other RNA

SEQ ID NO: 7573 - RNA, 5794 nt, synthetic construct; identical to SEQ ID NO: 5976
  modified_base 1..5794: mod_base = OTHER; note = Each t is m1f
  source 1..5794: mol_type = other RNA

SEQ ID NO: 7574 - RNA, 5797 nt, synthetic construct; identical to SEQ ID NO: 5977
  modified_base 1..5797: mod_base = OTHER; note = Each t is m1f
  source 1..5797: mol_type = other RNA

SEQ ID NO: 7575 - RNA, 5797 nt, synthetic construct; identical to SEQ ID NO: 5978
  modified_base 1..5797: mod_base = OTHER; note = Each t is m1f
  source 1..5797: mol_type = other RNA

SEQ ID NO: 7576 - RNA, 5797 nt, synthetic construct; identical to SEQ ID NO: 5979
  modified_base 1..5797: mod_base = OTHER; note = Each t is m1f
  source 1..5797: mol_type = other RNA

SEQ ID NO: 7577 - RNA, 5797 nt, synthetic construct; identical to SEQ ID NO: 5980
  modified_base 1..5797: mod_base = OTHER; note = Each t is m1f
  source 1..5797: mol_type = other RNA

SEQ ID NO: 7578 - RNA, 5797 nt, synthetic construct; identical to SEQ ID NO: 5981
  modified_base 1..5797: mod_base = OTHER; note = Each t is m1f
  source 1..5797: mol_type = other RNA

SEQ ID NO: 7579 - RNA, 5797 nt, synthetic construct; identical to SEQ ID NO: 5982
  modified_base 1..5797: mod_base = OTHER; note = Each t is m1f
  source 1..5797: mol_type = other RNA

SEQ ID NO: 7580 - RNA, 5815 nt, synthetic construct; identical to SEQ ID NO: 5983
  modified_base 1..5797: mod_base = OTHER; note = Each t is m1f
  source 1..5815: mol_type = other RNA

SEQ ID NO: 7581 - RNA, 5797 nt, synthetic construct; identical to SEQ ID NO: 5984
  modified_base 1..5797: mod_base = OTHER; note = Each t is m1f
  source 1..5797: mol_type = other RNA

SEQ ID NO: 7582 - RNA, 5797 nt, synthetic construct; identical to SEQ ID NO: 5985
  modified_base 1..5797: mod_base = OTHER; note = Each t is m1f
  source 1..5797: mol_type = other RNA

SEQ ID NO: 7583 - RNA, 5797 nt, synthetic construct; identical to SEQ ID NO: 5986
  modified_base 1..5797: mod_base = OTHER; note = Each t is m1f
  source 1..5797: mol_type = other RNA

SEQ ID NO: 7584 - RNA, 5797 nt, synthetic construct; identical to SEQ ID NO: 5987
  modified_base 1..5797: mod_base = OTHER; note = Each t is m1f
  source 1..5797: mol_type = other RNA

SEQ ID NO: 7585 - RNA, 5797 nt, synthetic construct; identical to SEQ ID NO: 5988
  modified_base 1..5797: mod_base = OTHER; note = Each t is m1f
  source 1..5797: mol_type = other RNA

SEQ ID NO: 7586 - RNA, 5797 nt, synthetic construct; identical to SEQ ID NO: 5989
  modified_base 1..5797: mod_base = OTHER; note = Each t is m1f
  source 1..5797: mol_type = other RNA

SEQ ID NO: 7587 - RNA, 5797 nt, synthetic construct; identical to SEQ ID NO: 5990
  modified_base 1..5797: mod_base = OTHER; note = Each t is m1f
  source 1..5797: mol_type = other RNA

SEQ ID NO: 7588 - RNA, 5797 nt, synthetic construct; identical to SEQ ID NO: 5991
  modified_base 1..5797: mod_base = OTHER; note = Each t is m1f
  source 1..5797: mol_type = other RNA

SEQ ID NO: 7589 - RNA, 5797 nt, synthetic construct; identical to SEQ ID NO: 5992
  modified_base 1..5797: mod_base = OTHER; note = Each t is m1f
  source 1..5797: mol_type = other RNA

SEQ ID NO: 7590 - RNA, 5797 nt, synthetic construct; identical to SEQ ID NO: 5993
  modified_base 1..5797: mod_base = OTHER; note = Each t is m1f
  source 1..5797: mol_type = other RNA

SEQ ID NO: 7591 - RNA, 5797 nt, synthetic construct; identical to SEQ ID NO: 5994
  modified_base 1..5797: mod_base = OTHER; note = Each t is m1f
  source 1..5797: mol_type = other RNA

SEQ ID NO: 7592 - RNA, 5797 nt, synthetic construct; identical to SEQ ID NO: 5995
  modified_base 1..5797: mod_base = OTHER; note = Each t is m1f
  source 1..5797: mol_type = other RNA

SEQ ID NO: 7593 - RNA, 5797 nt, synthetic construct; identical to SEQ ID NO: 5996
  modified_base 1..5797: mod_base = OTHER; note = Each t is m1f
  source 1..5797: mol_type = other RNA

SEQ ID NO: 7594 - RNA, 5797 nt, synthetic construct; identical to SEQ ID NO: 5997
  modified_base 1..5797: mod_base = OTHER; note = Each t is m1f
  source 1..5797: mol_type = other RNA

SEQ ID NO: 7595 - RNA, 5797 nt, synthetic construct; identical to SEQ ID NO: 5998
  modified_base 1..5797: mod_base = OTHER; note = Each t is m1f
  source 1..5797: mol_type = other RNA

SEQ ID NO: 7596 - RNA, 5797 nt, synthetic construct; identical to SEQ ID NO: 5999
  modified_base 1..5797: mod_base = OTHER; note = Each t is m1f
  source 1..5797: mol_type = other RNA

SEQ ID NO: 7597 - RNA, 5797 nt, synthetic construct; identical to SEQ ID NO: 6000
  modified_base 1..5797: mod_base = OTHER; note = Each t is m1f
  source 1..5797: mol_type = other RNA

SEQ ID NO: 7598 - RNA, 5797 nt, synthetic construct; identical to SEQ ID NO: 6001
  modified_base 1..5797: mod_base = OTHER; note = Each t is m1f
  source 1..5797: mol_type = other RNA

SEQ ID NO: 7599 - RNA, 5797 nt, synthetic construct; identical to SEQ ID NO: 6002
  modified_base 1..5797: mod_base = OTHER; note = Each t is m1f
  source 1..5797: mol_type = other RNA

SEQ ID NO: 7600 - RNA, 5797 nt, synthetic construct; identical to SEQ ID NO: 6003
  modified_base 1..5797: mod_base = OTHER; note = Each t is m1f
  source 1..5797: mol_type = other RNA

SEQ ID NO: 7601 - RNA, 5797 nt, synthetic construct; identical to SEQ ID NO: 6004
  modified_base 1..5797: mod_base = OTHER; note = Each t is m1f
  source 1..5797: mol_type = other RNA

SEQ ID NO: 7602 - RNA, 5797 nt, synthetic construct; identical to SEQ ID NO: 6005
  modified_base 1..5797: mod_base = OTHER; note = Each t is m1f
  source 1..5797: mol_type = other RNA

SEQ ID NO: 7603 - RNA, 5797 nt, synthetic construct; identical to SEQ ID NO: 6006
  modified_base 1..5797: mod_base = OTHER; note = Each t is m1f
  source 1..5797: mol_type = other RNA

SEQ ID NO: 7604 - RNA, 5797 nt, synthetic construct; identical to SEQ ID NO: 6007
  modified_base 1..5797: mod_base = OTHER; note = Each t is m1f
  source 1..5797: mol_type = other RNA

SEQ ID NO: 7605 - RNA, 5797 nt, synthetic construct; identical to SEQ ID NO: 6008
  modified_base 1..5797: mod_base = OTHER; note = Each t is m1f
  source 1..5797: mol_type = other RNA

SEQ ID NO: 7606 - RNA, 5797 nt, synthetic construct; identical to SEQ ID NO: 6009
  modified_base 1..5797: mod_base = OTHER; note = Each t is m1f
  source 1..5797: mol_type = other RNA

SEQ ID NO: 7607 - RNA, 5797 nt, synthetic construct; identical to SEQ ID NO: 6010
  modified_base 1..5797: mod_base = OTHER; note = Each t is m1f
  source 1..5797: mol_type = other RNA

SEQ ID NO: 7608 - RNA, 5797 nt, synthetic construct; identical to SEQ ID NO: 6011
  modified_base 1..5797: mod_base = OTHER; note = Each t is m1f
  source 1..5797: mol_type = other RNA

SEQ ID NO: 7609 - RNA, 5797 nt, synthetic construct; identical to SEQ ID NO: 6012
  modified_base 1..5797: mod_base = OTHER; note = Each t is m1f
  source 1..5797: mol_type = other RNA

SEQ ID NO: 7610 - RNA, 5797 nt, synthetic construct; identical to SEQ ID NO: 6013
  modified_base 1..5797: mod_base = OTHER; note = Each t is m1f
  source 1..5797: mol_type = other RNA

SEQ ID NO: 7611 - RNA, 5797 nt, synthetic construct; identical to SEQ ID NO: 6014
  modified_base 1..5797: mod_base = OTHER; note = Each t is m1f
  source 1..5797: mol_type = other RNA

SEQ ID NO: 7612 - RNA, 5797 nt, synthetic construct; identical to SEQ ID NO: 6015
  modified_base 1..5797: mod_base = OTHER; note = Each t is m1f
  source 1..5797: mol_type = other RNA

SEQ ID NO: 7613 - RNA, 5815 nt, synthetic construct; identical to SEQ ID NO: 6016
  modified_base 1..5797: mod_base = OTHER; note = Each t is m1f
  source 1..5815: mol_type = other RNA

SEQ ID NO: 7614 - RNA, 5797 nt, synthetic construct; identical to SEQ ID NO: 6017
  modified_base 1..5797: mod_base = OTHER; note = Each t is m1f
  source 1..5797: mol_type = other RNA

SEQ ID NO: 7615 - RNA, 5797 nt, synthetic construct; identical to SEQ ID NO: 6018
  modified_base 1..5797: mod_base = OTHER; note = Each t is m1f
  source 1..5797: mol_type = other RNA

SEQ ID NO: 7616 - RNA, 5797 nt, synthetic construct; identical to SEQ ID NO: 6019
  modified_base 1..5797: mod_base = OTHER; note = Each t is m1f
  source 1..5797: mol_type = other RNA

SEQ ID NO: 7617 - RNA, 5797 nt, synthetic construct; identical to SEQ ID NO: 6020
  modified_base 1..5797: mod_base = OTHER; note = Each t is m1f
  source 1..5797: mol_type = other RNA

SEQ ID NO: 7618 - RNA, 5797 nt, synthetic construct; identical to SEQ ID NO: 6021
  modified_base 1..5797: mod_base = OTHER; note = Each t is m1f
  source 1..5797: mol_type = other RNA

SEQ ID NO: 7619 - RNA, 5797 nt, synthetic construct; identical to SEQ ID NO: 6022
  modified_base 1..5797: mod_base = OTHER; note = Each t is m1f
  source 1..5797: mol_type = other RNA

SEQ ID NO: 7620 - RNA, 5797 nt, synthetic construct; identical to SEQ ID NO: 6023
  modified_base 1..5797: mod_base = OTHER; note = Each t is m1f
  source 1..5797: mol_type = other RNA

SEQ ID NO: 7621 - RNA, 5797 nt, synthetic construct; identical to SEQ ID NO: 6024
  modified_base 1..5797: mod_base = OTHER; note = Each t is m1f
  source 1..5797: mol_type = other RNA

SEQ ID NO: 7622 - RNA, 5806 nt, synthetic construct; identical to SEQ ID NO: 6025
  modified_base 1..5797: mod_base = OTHER; note = Each t is m1f
  source 1..5806: mol_type = other RNA

SEQ ID NO: 7623 - RNA, 5797 nt, synthetic construct; identical to SEQ ID NO: 6026
  modified_base 1..5797: mod_base = OTHER; note = Each t is m1f
  source 1..5797: mol_type = other RNA

SEQ ID NO: 7624 - RNA, 5797 nt, synthetic construct; identical to SEQ ID NO: 6027
  modified_base 1..5797: mod_base = OTHER; note = Each t is m1f
  source 1..5797: mol_type = other RNA

SEQ ID NO: 7625 - RNA, 5797 nt, synthetic construct; identical to SEQ ID NO: 6028
  modified_base 1..5797: mod_base = OTHER; note = Each t is m1f
  source 1..5797: mol_type = other RNA

SEQ ID NO: 7626 - RNA, 5797 nt, synthetic construct; identical to SEQ ID NO: 6029
  modified_base 1..5797: mod_base = OTHER; note = Each t is m1f
  source 1..5797: mol_type = other RNA

SEQ ID NO: 7627 - RNA, 5797 nt, synthetic construct; identical to SEQ ID NO: 6030
  modified_base 1..5797: mod_base = OTHER; note = Each t is m1f
  source 1..5797: mol_type = other RNA

SEQ ID NO: 7628 - RNA, 5797 nt, synthetic construct; identical to SEQ ID NO: 6031
  modified_base 1..5797: mod_base = OTHER; note = Each t is m1f
  source 1..5797: mol_type = other RNA

SEQ ID NO: 7629 - RNA, 5797 nt, synthetic construct; identical to SEQ ID NO: 6032
  modified_base 1..5797: mod_base = OTHER; note = Each t is m1f
  source 1..5797: mol_type = other RNA

SEQ ID NO: 7630 - RNA, 5794 nt, synthetic construct; identical to SEQ ID NO: 6033
  modified_base 1..5794: mod_base = OTHER; note = Each t is m1f
  source 1..5794: mol_type = other RNA

SEQ ID NO: 7631 - RNA, 5797 nt, synthetic construct; identical to SEQ ID NO: 6034
  modified_base 1..5797: mod_base = OTHER; note = Each t is m1f
  source 1..5797: mol_type = other RNA

SEQ ID NO: 7632 - RNA, 5797 nt, synthetic construct; identical to SEQ ID NO: 6035
  modified_base 1..5797: mod_base = OTHER; note = Each t is m1f
  source 1..5797: mol_type = other RNA

SEQ ID NO: 7633 - RNA, 5797 nt, synthetic construct; identical to SEQ ID NO: 6036
  modified_base 1..5797: mod_base = OTHER; note = Each t is m1f
  source 1..5797: mol_type = other RNA

SEQ ID NO: 7634 - RNA, 5797 nt, synthetic construct; identical to SEQ ID NO: 6037
  modified_base 1..5797: mod_base = OTHER; note = Each t is m1f
  source 1..5797: mol_type = other RNA

SEQ ID NO: 7635 - RNA, 5797 nt, synthetic construct; identical to SEQ ID NO: 6038
  modified_base 1..5797: mod_base = OTHER; note = Each t is m1f
  source 1..5797: mol_type = other RNA

SEQ ID NO: 7636 - RNA, 5797 nt, synthetic construct; identical to SEQ ID NO: 6039
  modified_base 1..5797: mod_base = OTHER; note = Each t is m1f
  source 1..5797: mol_type = other RNA

SEQ ID NO: 7637 - RNA, 5797 nt, synthetic construct; identical to SEQ ID NO: 6040
  modified_base 1..5797: mod_base = OTHER; note = Each t is m1f
  source 1..5797: mol_type = other RNA

SEQ ID NO: 7638 - RNA, 5797 nt, synthetic construct; identical to SEQ ID NO: 6041
  modified_base 1..5797: mod_base = OTHER; note = Each t is m1f
  source 1..5797: mol_type = other RNA

SEQ ID NO: 7639 - RNA, 5797 nt, synthetic construct; identical to SEQ ID NO: 6042
  modified_base 1..5797: mod_base = OTHER; note = Each t is m1f
  source 1..5797: mol_type = other RNA

SEQ ID NO: 7640 - RNA, 5797 nt, synthetic construct; identical to SEQ ID NO: 6043
  modified_base 1..5797: mod_base = OTHER; note = Each t is m1f
  source 1..5797: mol_type = other RNA

SEQ ID NO: 7641 - RNA, 5797 nt, synthetic construct; identical to SEQ ID NO: 6044
  modified_base 1..5797: mod_base = OTHER; note = Each t is m1f
  source 1..5797: mol_type = other RNA

SEQ ID NO: 7642 - RNA, 5797 nt, synthetic construct; identical to SEQ ID NO: 6045
  modified_base 1..5797: mod_base = OTHER; note = Each t is m1f
  source 1..5797: mol_type = other RNA

SEQ ID NO: 7643 - RNA, 5797 nt, synthetic construct; identical to SEQ ID NO: 6046
  modified_base 1..5797: mod_base = OTHER; note = Each t is m1f
  source 1..5797: mol_type = other RNA

SEQ ID NO: 7644 - RNA, 5797 nt, synthetic construct; identical to SEQ ID NO: 6047
  modified_base 1..5797: mod_base = OTHER; note = Each t is m1f
  source 1..5797: mol_type = other RNA

SEQ ID NO: 7645 - RNA, 5797 nt, synthetic construct; identical to SEQ ID NO: 6048
  modified_base 1..5797: mod_base = OTHER; note = Each t is m1f
  source 1..5797: mol_type = other RNA

SEQ ID NO: 7646 - RNA, 5797 nt, synthetic construct; identical to SEQ ID NO: 6049
  modified_base 1..5797: mod_base = OTHER; note = Each t is m1f
  source 1..5797: mol_type = other RNA

SEQ ID NO: 7647 - RNA, 5797 nt, synthetic construct; identical to SEQ ID NO: 6050
  modified_base 1..5797: mod_base = OTHER; note = Each t is m1f
  source 1..5797: mol_type = other RNA

SEQ ID NO: 7648 - RNA, 5797 nt, synthetic construct; identical to SEQ ID NO: 6051
  modified_base 1..5797: mod_base = OTHER; note = Each t is m1f
  source 1..5797: mol_type = other RNA

SEQ ID NO: 7649 - RNA, 5797 nt, synthetic construct; identical to SEQ ID NO: 6052
  modified_base 1..5797: mod_base = OTHER; note = Each t is m1f
  source 1..5797: mol_type = other RNA

SEQ ID NO: 7650 - RNA, 5797 nt, synthetic construct; identical to SEQ ID NO: 6053
  modified_base 1..5797: mod_base = OTHER; note = Each t is m1f
  source 1..5797: mol_type = other RNA

SEQ ID NO: 7651 - RNA, 5797 nt, synthetic construct; identical to SEQ ID NO: 6054
  modified_base 1..5797: mod_base = OTHER; note = Each t is m1f
  source 1..5797: mol_type = other RNA

SEQ ID NO: 7652 - RNA, 5797 nt, synthetic construct; identical to SEQ ID NO: 6055
  modified_base 1..5797: mod_base = OTHER; note = Each t is m1f
  source 1..5797: mol_type = other RNA

SEQ ID NO: 7653 - RNA, 5797 nt, synthetic construct; identical to SEQ ID NO: 6056
  modified_base 1..5797: mod_base = OTHER; note = Each t is m1f
  source 1..5797: mol_type = other RNA

SEQ ID NO: 7654 - RNA, 5797 nt, synthetic construct; identical to SEQ ID NO: 6057
  modified_base 1..5797: mod_base = OTHER; note = Each t is m1f
  source 1..5797: mol_type = other RNA

SEQ ID NO: 7655 - RNA, 5797 nt, synthetic construct; identical to SEQ ID NO: 6058
  modified_base 1..5797: mod_base = OTHER; note = Each t is m1f
  source 1..5797: mol_type = other RNA

SEQ ID NO: 7656 - RNA, 5797 nt, synthetic construct; identical to SEQ ID NO: 6059
  modified_base 1..5797: mod_base = OTHER; note = Each t is m1f
  source 1..5797: mol_type = other RNA

SEQ ID NO: 7657 - RNA, 5797 nt, synthetic construct; identical to SEQ ID NO: 6060
  modified_base 1..5797: mod_base = OTHER; note = Each t is m1f
  source 1..5797: mol_type = other RNA

SEQ ID NO: 7658 - RNA, 5797 nt, synthetic construct; identical to SEQ ID NO: 6061
  modified_base 1..5797: mod_base = OTHER; note = Each t is m1f
  source 1..5797: mol_type = other RNA

SEQ ID NO: 7659 - RNA, 5797 nt, synthetic construct; identical to SEQ ID NO: 6062
  modified_base 1..5797: mod_base = OTHER; note = Each t is m1f
  source 1..5797: mol_type = other RNA

SEQ ID NO: 7660 - RNA, 5797 nt, synthetic construct; identical to SEQ ID NO: 6063
  modified_base 1..5797: mod_base = OTHER; note = Each t is m1f
  source 1..5797: mol_type = other RNA

SEQ ID NO: 7661 - RNA, 5797 nt, synthetic construct; identical to SEQ ID NO: 6064
  modified_base 1..5797: mod_base = OTHER; note = Each t is m1f
  source 1..5797: mol_type = other RNA

SEQ ID NO: 7662 - RNA, 5797 nt, synthetic construct; identical to SEQ ID NO: 6065
  modified_base 1..5797: mod_base = OTHER; note = Each t is m1f
  source 1..5797: mol_type = other RNA

SEQ ID NO: 7663 - RNA, 5797 nt, synthetic construct; identical to SEQ ID NO: 6066
  modified_base 1..5797: mod_base = OTHER; note = Each t is m1f
  source 1..5797: mol_type = other RNA

SEQ ID NO: 7664 - RNA, 5833 nt, synthetic construct; identical to SEQ ID NO: 6067
  modified_base 1..5797: mod_base = OTHER; note = Each t is m1f
  source 1..5833: mol_type = other RNA

SEQ ID NO: 7665 - RNA, 5797 nt, synthetic construct; identical to SEQ ID NO: 6068
  modified_base 1..5797: mod_base = OTHER; note = Each t is m1f
  source 1..5797: mol_type = other RNA

SEQ ID NO: 7666 - RNA, 5797 nt, synthetic construct; identical to SEQ ID NO: 6069
  modified_base 1..5797: mod_base = OTHER; note = Each t is m1f
  source 1..5797: mol_type = other RNA

SEQ ID NO: 7667 - RNA, 5797 nt, synthetic construct; identical to SEQ ID NO: 6070
  modified_base 1..5797: mod_base = OTHER; note = Each t is m1f
  source 1..5797: mol_type = other RNA

SEQ ID NO: 7668 - RNA, 5797 nt, synthetic construct; identical to SEQ ID NO: 6071
  modified_base 1..5797: mod_base = OTHER; note = Each t is m1f
  source 1..5797: mol_type = other RNA

SEQ ID NO: 7669 - RNA, 5797 nt, synthetic construct; identical to SEQ ID NO: 6072
  modified_base 1..5797: mod_base = OTHER; note = Each t is m1f
  source 1..5797: mol_type = other RNA

SEQ ID NO: 7670 - RNA, 5797 nt, synthetic construct; identical to SEQ ID NO: 6073
  modified_base 1..5797: mod_base = OTHER; note = Each t is m1f
  source 1..5797: mol_type = other RNA

SEQ ID NO: 7671 - RNA, 5797 nt, synthetic construct; identical to SEQ ID NO: 6074
  modified_base 1..5797: mod_base = OTHER; note = Each t is m1f
  source 1..5797: mol_type = other RNA

SEQ ID NO: 7672 - RNA, 5797 nt, synthetic construct; identical to SEQ ID NO: 6075
  modified_base 1..5797: mod_base = OTHER; note = Each t is m1f
  source 1..5797: mol_type = other RNA

SEQ ID NO: 7673 - RNA, 5797 nt, synthetic construct; identical to SEQ ID NO: 6076
  modified_base 1..5797: mod_base = OTHER; note = Each t is m1f
  source 1..5797: mol_type = other RNA

SEQ ID NO: 7674 - RNA, 5797 nt, synthetic construct; identical to SEQ ID NO: 6077
  modified_base 1..5797: mod_base = OTHER; note = Each t is m1f
  source 1..5797: mol_type = other RNA

SEQ ID NO: 7675 - RNA, 5797 nt, synthetic construct; identical to SEQ ID NO: 6078
  modified_base 1..5797: mod_base = OTHER; note = Each t is m1f
  source 1..5797: mol_type = other RNA

SEQ ID NO: 7676 - RNA, 5797 nt, synthetic construct; identical to SEQ ID NO: 6079
  modified_base 1..5797: mod_base = OTHER; note = Each t is m1f
  source 1..5797: mol_type = other RNA

SEQ ID NO: 7677 - RNA, 5797 nt, synthetic construct; identical to SEQ ID NO: 6080
  modified_base 1..5797: mod_base = OTHER; note = Each t is m1f
  source 1..5797: mol_type = other RNA

SEQ ID NO: 7678 - RNA, 5797 nt, synthetic construct; identical to SEQ ID NO: 6081
  modified_base 1..5797: mod_base = OTHER; note = Each t is m1f
  source 1..5797: mol_type = other RNA

SEQ ID NO: 7679 - RNA, 5797 nt, synthetic construct; identical to SEQ ID NO: 6082
  modified_base 1..5797: mod_base = OTHER; note = Each t is m1f
  source 1..5797: mol_type = other RNA

SEQ ID NO: 7680 - RNA, 5797 nt, synthetic construct; identical to SEQ ID NO: 6083
  modified_base 1..5797: mod_base = OTHER; note = Each t is m1f
  source 1..5797: mol_type = other RNA

SEQ ID NO: 7681 - RNA, 5797 nt, synthetic construct; identical to SEQ ID NO: 6084
  modified_base 1..5797: mod_base = OTHER; note = Each t is m1f
  source 1..5797: mol_type = other RNA

SEQ ID NO: 7682 - RNA, 5797 nt, synthetic construct; identical to SEQ ID NO: 6085
  modified_base 1..5797: mod_base = OTHER; note = Each t is m1f
  source 1..5797: mol_type = other RNA

SEQ ID NO: 7683 - RNA, 5797 nt, synthetic construct; identical to SEQ ID NO: 6086
  modified_base 1..5797: mod_base = OTHER; note = Each t is m1f
  source 1..5797: mol_type = other RNA

SEQ ID NO: 7684 - RNA, 5797 nt, synthetic construct; identical to SEQ ID NO: 6087
  modified_base 1..5797: mod_base = OTHER; note = Each t is m1f
  source 1..5797: mol_type = other RNA

SEQ ID NO: 7685 - RNA, 5797 nt, synthetic construct; identical to SEQ ID NO: 6088
  modified_base 1..5797: mod_base = OTHER; note = Each t is m1f
  source 1..5797: mol_type = other RNA

SEQ ID NO: 7686 - RNA, 5797 nt, synthetic construct; identical to SEQ ID NO: 6089
  modified_base 1..5797: mod_base = OTHER; note = Each t is m1f
  source 1..5797: mol_type = other RNA

SEQ ID NO: 7687 - RNA, 5797 nt, synthetic construct; identical to SEQ ID NO: 6090
  modified_base 1..5797: mod_base = OTHER; note = Each t is m1f
  source 1..5797: mol_type = other RNA

SEQ ID NO: 7688 - RNA, 5797 nt, synthetic construct; identical to SEQ ID NO: 6091
  modified_base 1..5797: mod_base = OTHER; note = Each t is m1f
  source 1..5797: mol_type = other RNA

SEQ ID NO: 7689 - RNA, 5797 nt, synthetic construct; identical to SEQ ID NO: 6092
  modified_base 1..5797: mod_base = OTHER; note = Each t is m1f
  source 1..5797: mol_type = other RNA

SEQ ID NO: 7690 - RNA, 5797 nt, synthetic construct; identical to SEQ ID NO: 6093
  modified_base 1..5797: mod_base = OTHER; note = Each t is m1f
  source 1..5797: mol_type = other RNA

SEQ ID NO: 7691 - RNA, 5797 nt, synthetic construct; identical to SEQ ID NO: 6094
  modified_base 1..5797: mod_base = OTHER; note = Each t is m1f
  source 1..5797: mol_type = other RNA

SEQ ID NO: 7692 - RNA, 5797 nt, synthetic construct; identical to SEQ ID NO: 6095
  modified_base 1..5797: mod_base = OTHER; note = Each t is m1f
  source 1..5797: mol_type = other RNA

SEQ ID NO: 7693 - RNA, 5797 nt, synthetic construct; identical to SEQ ID NO: 6096
  modified_base 1..5797: mod_base = OTHER; note = Each t is m1f
  source 1..5797: mol_type = other RNA

SEQ ID NO: 7694 - RNA, 5797 nt, synthetic construct; identical to SEQ ID NO: 6097
  modified_base 1..5797: mod_base = OTHER; note = Each t is m1f
  source 1..5797: mol_type = other RNA

SEQ ID NO: 7695 - RNA, 5797 nt, synthetic construct; identical to SEQ ID NO: 6098
  modified_base 1..5797: mod_base = OTHER; note = Each t is m1f
  source 1..5797: mol_type = other RNA

SEQ ID NO: 7696 - RNA, 5797 nt, synthetic construct; identical to SEQ ID NO: 6099
  modified_base 1..5797: mod_base = OTHER; note = Each t is m1f
  source 1..5797: mol_type = other RNA

SEQ ID NO: 7697 - RNA, 5797 nt, synthetic construct; identical to SEQ ID NO: 6100
  modified_base 1..5797: mod_base = OTHER; note = Each t is m1f
  source 1..5797: mol_type = other RNA

SEQ ID NO: 7698 - RNA, 5797 nt, synthetic construct; identical to SEQ ID NO: 6101
  modified_base 1..5797: mod_base = OTHER; note = Each t is m1f
  source 1..5797: mol_type = other RNA

SEQ ID NO: 7699 - RNA, 5797 nt, synthetic construct; identical to SEQ ID NO: 6102
  modified_base 1..5797: mod_base = OTHER; note = Each t is m1f
  source 1..5797: mol_type = other RNA

SEQ ID NO: 7700 - RNA, 5797 nt, synthetic construct; identical to SEQ ID NO: 6103
  modified_base 1..5797: mod_base = OTHER; note = Each t is m1f
  source 1..5797: mol_type = other RNA

SEQ ID NO: 7701 - RNA, 5797 nt, synthetic construct; identical to SEQ ID NO: 6104
  modified_base 1..5797: mod_base = OTHER; note = Each t is m1f
  source 1..5797: mol_type = other RNA

SEQ ID NO: 7702 - RNA, 5797 nt, synthetic construct; identical to SEQ ID NO: 6105
  modified_base 1..5797: mod_base = OTHER; note = Each t is m1f
  source 1..5797: mol_type = other RNA

SEQ ID NO: 7703 - RNA, 5797 nt, synthetic construct; identical to SEQ ID NO: 6106
  modified_base 1..5797: mod_base = OTHER; note = Each t is m1f
  source 1..5797: mol_type = other RNA

SEQ ID NO: 7704 - RNA, 5797 nt, synthetic construct; identical to SEQ ID NO: 6107
  modified_base 1..5797: mod_base = OTHER; note = Each t is m1f
  source 1..5797: mol_type = other RNA

SEQ ID NO: 7705 - RNA, 5797 nt, synthetic construct; identical to SEQ ID NO: 6108
  modified_base 1..5797: mod_base = OTHER; note = Each t is m1f
  source 1..5797: mol_type = other RNA

SEQ ID NO: 7706 - RNA, 5797 nt, synthetic construct; identical to SEQ ID NO: 6109
  modified_base 1..5797: mod_base = OTHER; note = Each t is m1f
  source 1..5797: mol_type = other RNA

SEQ ID NO: 7707 - RNA, 5797 nt, synthetic construct; identical to SEQ ID NO: 6110
  modified_base 1..5797: mod_base = OTHER; note = Each t is m1f
  source 1..5797: mol_type = other RNA

SEQ ID NO: 7708 - RNA, 5797 nt, synthetic construct; identical to SEQ ID NO: 6111
  modified_base 1..5797: mod_base = OTHER; note = Each t is m1f
  source 1..5797: mol_type = other RNA

SEQ ID NO: 7709 - RNA, 5797 nt, synthetic construct; identical to SEQ ID NO: 6112
  modified_base 1..5797: mod_base = OTHER; note = Each t is m1f
  source 1..5797: mol_type = other RNA

SEQ ID NO: 7710 - RNA, 5797 nt, synthetic construct; identical to SEQ ID NO: 6113
  modified_base 1..5797: mod_base = OTHER; note = Each t is m1f
  source 1..5797: mol_type = other RNA

SEQ ID NO: 7711 - RNA, 5806 nt, synthetic construct; identical to SEQ ID NO: 6114
  modified_base 1..5797: mod_base = OTHER; note = Each t is m1f
  source 1..5806: mol_type = other RNA

SEQ ID NO: 7712 - RNA, 5797 nt, synthetic construct; identical to SEQ ID NO: 6115
  modified_base 1..5797: mod_base = OTHER; note = Each t is m1f
  source 1..5797: mol_type = other RNA

SEQ ID NO: 7713 - RNA, 5797 nt, synthetic construct; identical to SEQ ID NO: 6116
  modified_base 1..5797: mod_base = OTHER; note = Each t is m1f
  source 1..5797: mol_type = other RNA

SEQ ID NO: 7714 - RNA, 5797 nt, synthetic construct; identical to SEQ ID NO: 6117
  modified_base 1..5797: mod_base = OTHER; note = Each t is m1f
  source 1..5797: mol_type = other RNA

SEQ ID NO: 7715 - RNA, 5797 nt, synthetic construct; identical to SEQ ID NO: 6118
  modified_base 1..5797: mod_base = OTHER; note = Each t is m1f
  source 1..5797: mol_type = other RNA

SEQ ID NO: 7716 - RNA, 5797 nt, synthetic construct; identical to SEQ ID NO: 6119
  modified_base 1..5797: mod_base = OTHER; note = Each t is m1f
  source 1..5797: mol_type = other RNA

SEQ ID NO: 7717 - RNA, 5797 nt, synthetic construct; identical to SEQ ID NO: 6120
  modified_base 1..5797: mod_base = OTHER; note = Each t is m1f
  source 1..5797: mol_type = other RNA

SEQ ID NO: 7718 - RNA, 5797 nt, synthetic construct; identical to SEQ ID NO: 6121
  modified_base 1..5797: mod_base = OTHER; note = Each t is m1f
  source 1..5797: mol_type = other RNA

SEQ ID NO: 7719 - RNA, 5797 nt, synthetic construct; identical to SEQ ID NO: 6122
  modified_base 1..5797: mod_base = OTHER; note = Each t is m1f
  source 1..5797: mol_type = other RNA

SEQ ID NO: 7720 - RNA, 5797 nt, synthetic construct; identical to SEQ ID NO: 6123
  modified_base 1..5797: mod_base = OTHER; note = Each t is m1f
  source 1..5797: mol_type = other RNA

SEQ ID NO: 7721 - RNA, 5797 nt, synthetic construct; identical to SEQ ID NO: 6124
  modified_base 1..5797: mod_base = OTHER; note = Each t is m1f
  source 1..5797: mol_type = other RNA

SEQ ID NO: 7722 - RNA, 5797 nt, synthetic construct; identical to SEQ ID NO: 6125
  modified_base 1..5797: mod_base = OTHER; note = Each t is m1f
  source 1..5797: mol_type = other RNA

SEQ ID NO: 7723 - RNA, 5797 nt, synthetic construct; identical to SEQ ID NO: 6126
  modified_base 1..5797: mod_base = OTHER; note = Each t is m1f
  source 1..5797: mol_type = other RNA

SEQ ID NO: 7724 - RNA, 5797 nt, synthetic construct; identical to SEQ ID NO: 6127
  modified_base 1..5797: mod_base = OTHER; note = Each t is m1f
  source 1..5797: mol_type = other RNA

SEQ ID NO: 7725 - RNA, 5797 nt, synthetic construct; identical to SEQ ID NO: 6128
  modified_base 1..5797: mod_base = OTHER; note = Each t is m1f
  source 1..5797: mol_type = other RNA

SEQ ID NO: 7726 - RNA, 5797 nt, synthetic construct; identical to SEQ ID NO: 6129
  modified_base 1..5797: mod_base = OTHER; note = Each t is m1f
  source 1..5797: mol_type = other RNA

SEQ ID NO: 7727 - RNA, 5797 nt, synthetic construct; identical to SEQ ID NO: 6130
  modified_base 1..5797: mod_base = OTHER; note = Each t is m1f
  source 1..5797: mol_type = other RNA

SEQ ID NO: 7728 - RNA, 5797 nt, synthetic construct; identical to SEQ ID NO: 6131
  modified_base 1..5797: mod_base = OTHER; note = Each t is m1f
  source 1..5797: mol_type = other RNA

SEQ ID NO: 7729 - RNA, 5797 nt, synthetic construct; identical to SEQ ID NO: 6132
  modified_base 1..5797: mod_base = OTHER; note = Each t is m1f
  source 1..5797: mol_type = other RNA

SEQ ID NO: 7730 - RNA, 5797 nt, synthetic construct; identical to SEQ ID NO: 6133
  modified_base 1..5797: mod_base = OTHER; note = Each t is m1f
  source 1..5797: mol_type = other RNA

SEQ ID NO: 7731 - RNA, 5797 nt, synthetic construct; identical to SEQ ID NO: 6134
  modified_base 1..5797: mod_base = OTHER; note = Each t is m1f
  source 1..5797: mol_type = other RNA

SEQ ID NO: 7732 - RNA, 5797 nt, synthetic construct; identical to SEQ ID NO: 6135
  modified_base 1..5797: mod_base = OTHER; note = Each t is m1f
  source 1..5797: mol_type = other RNA

SEQ ID NO: 7733 - RNA, 5797 nt, synthetic construct; identical to SEQ ID NO: 6136
  modified_base 1..5797: mod_base = OTHER; note = Each t is m1f
  source 1..5797: mol_type = other RNA

SEQ ID NO: 7734 - RNA, 5797 nt, synthetic construct; identical to SEQ ID NO: 6137
  modified_base 1..5797: mod_base = OTHER; note = Each t is m1f
  source 1..5797: mol_type = other RNA

SEQ ID NO: 7735 - RNA, 5797 nt, synthetic construct; identical to SEQ ID NO: 6138
  modified_base 1..5797: mod_base = OTHER; note = Each t is m1f
  source 1..5797: mol_type = other RNA

SEQ ID NO: 7736 - RNA, 5797 nt, synthetic construct; identical to SEQ ID NO: 6139
  modified_base 1..5797: mod_base = OTHER; note = Each t is m1f
  source 1..5797: mol_type = other RNA

SEQ ID NO: 7737 - RNA, 5797 nt, synthetic construct; identical to SEQ ID NO: 6140
  modified_base 1..5797: mod_base = OTHER; note = Each t is m1f
  source 1..5797: mol_type = other RNA

SEQ ID NO: 7738 - RNA, 5797 nt, synthetic construct; identical to SEQ ID NO: 6141
  modified_base 1..5797: mod_base = OTHER; note = Each t is m1f
  source 1..5797: mol_type = other RNA

SEQ ID NO: 7739 - RNA, 5797 nt, synthetic construct; identical to SEQ ID NO: 6142
  modified_base 1..5797: mod_base = OTHER; note = Each t is m1f
  source 1..5797: mol_type = other RNA

SEQ ID NO: 7740 - RNA, 5797 nt, synthetic construct; identical to SEQ ID NO: 6143
  modified_base 1..5797: mod_base = OTHER; note = Each t is m1f
  source 1..5797: mol_type = other RNA

SEQ ID NO: 7741 - RNA, 5797 nt, synthetic construct; identical to SEQ ID NO: 6144
  modified_base 1..5797: mod_base = OTHER; note = Each t is m1f
  source 1..5797: mol_type = other RNA

SEQ ID NO: 7742 - RNA, 5797 nt, synthetic construct; identical to SEQ ID NO: 6145
  modified_base 1..5797: mod_base = OTHER; note = Each t is m1f
  source 1..5797: mol_type = other RNA

SEQ ID NO: 7743 - RNA, 5797 nt, synthetic construct; identical to SEQ ID NO: 6146
  modified_base 1..5797: mod_base = OTHER; note = Each t is m1f
  source 1..5797: mol_type = other RNA

SEQ ID NO: 7744 - RNA, 5797 nt, synthetic construct; identical to SEQ ID NO: 6147
  modified_base 1..5797: mod_base = OTHER; note = Each t is m1f
  source 1..5797: mol_type = other RNA

SEQ ID NO: 7745 - RNA, 5797 nt, synthetic construct; identical to SEQ ID NO: 6148
  modified_base 1..5797: mod_base = OTHER; note = Each t is m1f
  source 1..5797: mol_type = other RNA

SEQ ID NO: 7746 - RNA, 5797 nt, synthetic construct; identical to SEQ ID NO: 6149
  modified_base 1..5797: mod_base = OTHER; note = Each t is m1f
  source 1..5797: mol_type = other RNA

SEQ ID NO: 7747 - RNA, 5797 nt, synthetic construct; identical to SEQ ID NO: 6150
  modified_base 1..5797: mod_base = OTHER; note = Each t is m1f
  source 1..5797: mol_type = other RNA

SEQ ID NO: 7748 - RNA, 5797 nt, synthetic construct; identical to SEQ ID NO: 6151
  modified_base 1..5797: mod_base = OTHER; note = Each t is m1f
  source 1..5797: mol_type = other RNA

SEQ ID NO: 7749 - RNA, 5797 nt, synthetic construct; identical to SEQ ID NO: 6152
  modified_base 1..5797: mod_base = OTHER; note = Each t is m1f
  source 1..5797: mol_type = other RNA

SEQ ID NO: 7750 - RNA, 5797 nt, synthetic construct; identical to SEQ ID NO: 6153
  modified_base 1..5797: mod_base = OTHER; note = Each t is m1f
  source 1..5797: mol_type = other RNA

SEQ ID NO: 7751 - RNA, 5797 nt, synthetic construct; identical to SEQ ID NO: 6154
  modified_base 1..5797: mod_base = OTHER; note = Each t is m1f
  source 1..5797: mol_type = other RNA

SEQ ID NO: 7752 - RNA, 5797 nt, synthetic construct; identical to SEQ ID NO: 6155
  modified_base 1..5797: mod_base = OTHER; note = Each t is m1f
  source 1..5797: mol_type = other RNA

SEQ ID NO: 7753 - RNA, 5797 nt, synthetic construct; identical to SEQ ID NO: 6156
  modified_base 1..5797: mod_base = OTHER; note = Each t is m1f
  source 1..5797: mol_type = other RNA

SEQ ID NO: 7754 - RNA, 5797 nt, synthetic construct; identical to SEQ ID NO: 6157
  modified_base 1..5797: mod_base = OTHER; note = Each t is m1f
  source 1..5797: mol_type = other RNA

SEQ ID NO: 7755 - RNA, 5797 nt, synthetic construct; identical to SEQ ID NO: 6158
  modified_base 1..5797: mod_base = OTHER; note = Each t is m1f
  source 1..5797: mol_type = other RNA

SEQ ID NO: 7756 - RNA, 5797 nt, synthetic construct; identical to SEQ ID NO: 6159
  modified_base 1..5797: mod_base = OTHER; note = Each t is m1f
  source 1..5797: mol_type = other RNA

SEQ ID NO: 7757 - RNA, 5797 nt, synthetic construct; identical to SEQ ID NO: 6160
  modified_base 1..5797: mod_base = OTHER; note = Each t is m1f
  source 1..5797: mol_type = other RNA

SEQ ID NO: 7758 - RNA, 5797 nt, synthetic construct; identical to SEQ ID NO: 6161
  modified_base 1..5797: mod_base = OTHER; note = Each t is m1f
  source 1..5797: mol_type = other RNA

SEQ ID NO: 7759 - RNA, 5797 nt, synthetic construct; identical to SEQ ID NO: 6162
  modified_base 1..5797: mod_base = OTHER; note = Each t is m1f
  source 1..5797: mol_type = other RNA

SEQ ID NO: 7760 - RNA, 5797 nt, synthetic construct; identical to SEQ ID NO: 6163
  modified_base 1..5797: mod_base = OTHER; note = Each t is m1f
  source 1..5797: mol_type = other RNA

SEQ ID NO: 7761 - RNA, 5797 nt, synthetic construct; identical to SEQ ID NO: 6164
  modified_base 1..5797: mod_base = OTHER; note = Each t is m1f
  source 1..5797: mol_type = other RNA

SEQ ID NO: 7762 - RNA, 5797 nt, synthetic construct; identical to SEQ ID NO: 6165
  modified_base 1..5797: mod_base = OTHER; note = Each t is m1f
  source 1..5797: mol_type = other RNA

SEQ ID NO: 7763 - RNA, 5797 nt, synthetic construct; identical to SEQ ID NO: 6166
  modified_base 1..5797: mod_base = OTHER; note = Each t is m1f
  source 1..5797: mol_type = other RNA

SEQ ID NO: 7764 - RNA, 5797 nt, synthetic construct; identical to SEQ ID NO: 6167
  modified_base 1..5797: mod_base = OTHER; note = Each t is m1f
  source 1..5797: mol_type = other RNA

SEQ ID NO: 7765 - RNA, 5797 nt, synthetic construct; identical to SEQ ID NO: 6168
  modified_base 1..5797: mod_base = OTHER; note = Each t is m1f
  source 1..5797: mol_type = other RNA

SEQ ID NO: 7766 - RNA, 5797 nt, synthetic construct; identical to SEQ ID NO: 6169
  modified_base 1..5797: mod_base = OTHER; note = Each t is m1f
  source 1..5797: mol_type = other RNA

SEQ ID NO: 7767 - RNA, 5797 nt, synthetic construct; identical to SEQ ID NO: 6170
  modified_base 1..5797: mod_base = OTHER; note = Each t is m1f
  source 1..5797: mol_type = other RNA

SEQ ID NO: 7768 - RNA, 5797 nt, synthetic construct; identical to SEQ ID NO: 6171
  modified_base 1..5797: mod_base = OTHER; note = Each t is m1f
  source 1..5797: mol_type = other RNA

SEQ ID NO: 7769 - RNA, 5797 nt, synthetic construct; identical to SEQ ID NO: 6172
  modified_base 1..5797: mod_base = OTHER; note = Each t is m1f
  source 1..5797: mol_type = other RNA

SEQ ID NO: 7770 - RNA, 5797 nt, synthetic construct; identical to SEQ ID NO: 6173
  modified_base 1..5797: mod_base = OTHER; note = Each t is m1f
  source 1..5797: mol_type = other RNA

SEQ ID NO: 7771 - RNA, 5797 nt, synthetic construct; identical to SEQ ID NO: 6174
  modified_base 1..5797: mod_base = OTHER; note = Each t is m1f
  source 1..5797: mol_type = other RNA

SEQ ID NO: 7772 - RNA, 5797 nt, synthetic construct; identical to SEQ ID NO: 6175
  modified_base 1..5797: mod_base = OTHER; note = Each t is m1f
  source 1..5797: mol_type = other RNA

SEQ ID NO: 7773 - RNA, 5797 nt, synthetic construct; identical to SEQ ID NO: 6176
  modified_base 1..5797: mod_base = OTHER; note = Each t is m1f
  source 1..5797: mol_type = other RNA

SEQ ID NO: 7774 - RNA, 5797 nt, synthetic construct; identical to SEQ ID NO: 6177
  modified_base 1..5797: mod_base = OTHER; note = Each t is m1f
  source 1..5797: mol_type = other RNA

SEQ ID NO: 7775 - RNA, 5797 nt, synthetic construct; identical to SEQ ID NO: 6178
  modified_base 1..5797: mod_base = OTHER; note = Each t is m1f
  source 1..5797: mol_type = other RNA

SEQ ID NO: 7776 - RNA, 5797 nt, synthetic construct; identical to SEQ ID NO: 6179
  modified_base 1..5797: mod_base = OTHER; note = Each t is m1f
  source 1..5797: mol_type = other RNA

SEQ ID NO: 7777 - RNA, 5797 nt, synthetic construct; identical to SEQ ID NO: 6180
  modified_base 1..5797: mod_base = OTHER; note = Each t is m1f
  source 1..5797: mol_type = other RNA

SEQ ID NO: 7778 - RNA, 5797 nt, synthetic construct; identical to SEQ ID NO: 6181
  modified_base 1..5797: mod_base = OTHER; note = Each t is m1f
  source 1..5797: mol_type = other RNA

SEQ ID NO: 7779 - RNA, 5797 nt, synthetic construct; identical to SEQ ID NO: 6182
  modified_base 1..5797: mod_base = OTHER; note = Each t is m1f
  source 1..5797: mol_type = other RNA

SEQ ID NO: 7780 - RNA, 5797 nt, synthetic construct; identical to SEQ ID NO: 6183
  modified_base 1..5797: mod_base = OTHER; note = Each t is m1f
  source 1..5797: mol_type = other RNA

SEQ ID NO: 7781 - RNA, 5797 nt, synthetic construct; identical to SEQ ID NO: 6184
  modified_base 1..5797: mod_base = OTHER; note = Each t is m1f
  source 1..5797: mol_type = other RNA

SEQ ID NO: 7782 - RNA, 5797 nt, synthetic construct; identical to SEQ ID NO: 6185
  modified_base 1..5797: mod_base = OTHER; note = Each t is m1f
  source 1..5797: mol_type = other RNA

SEQ ID NO: 7783 - RNA, 5797 nt, synthetic construct; identical to SEQ ID NO: 6186
  modified_base 1..5797: mod_base = OTHER; note = Each t is m1f
  source 1..5797: mol_type = other RNA

SEQ ID NO: 7784 - RNA, 5797 nt, synthetic construct; identical to SEQ ID NO: 6187
  modified_base 1..5797: mod_base = OTHER; note = Each t is m1f
  source 1..5797: mol_type = other RNA

SEQ ID NO: 7785 - RNA, 5797 nt, synthetic construct; identical to SEQ ID NO: 6188
  modified_base 1..5797: mod_base = OTHER; note = Each t is m1f
  source 1..5797: mol_type = other RNA

SEQ ID NO: 7786 - RNA, 5797 nt, synthetic construct; identical to SEQ ID NO: 6189
  modified_base 1..5797: mod_base = OTHER; note = Each t is m1f
  source 1..5797: mol_type = other RNA

SEQ ID NO: 7787 - RNA, 5797 nt, synthetic construct; identical to SEQ ID NO: 6190
  modified_base 1..5797: mod_base = OTHER; note = Each t is m1f
  source 1..5797: mol_type = other RNA

SEQ ID NO: 7788 - RNA, 5797 nt, synthetic construct; identical to SEQ ID NO: 6191
  modified_base 1..5797: mod_base = OTHER; note = Each t is m1f
  source 1..5797: mol_type = other RNA

SEQ ID NO: 7789 - RNA, 5797 nt, synthetic construct; identical to SEQ ID NO: 6192
  modified_base 1..5797: mod_base = OTHER; note = Each t is m1f
  source 1..5797: mol_type = other RNA

SEQ ID NO: 7790 - RNA, 5797 nt, synthetic construct; identical to SEQ ID NO: 6193
  modified_base 1..5797: mod_base = OTHER; note = Each t is m1f
  source 1..5797: mol_type = other RNA

SEQ ID NO: 7791 - RNA, 5797 nt, synthetic construct; identical to SEQ ID NO: 6194
  modified_base 1..5797: mod_base = OTHER; note = Each t is m1f
  source 1..5797: mol_type = other RNA

SEQ ID NO: 7792 - RNA, 5797 nt, synthetic construct; identical to SEQ ID NO: 6195
  modified_base 1..5797: mod_base = OTHER; note = Each t is m1f
  source 1..5797: mol_type = other RNA

SEQ ID NO: 7793 - RNA, 5797 nt, synthetic construct; identical to SEQ ID NO: 6196
  modified_base 1..5797: mod_base = OTHER; note = Each t is m1f
  source 1..5797: mol_type = other RNA

SEQ ID NO: 7794 - RNA, 5797 nt, synthetic construct; identical to SEQ ID NO: 6197
  modified_base 1..5797: mod_base = OTHER; note = Each t is m1f
  source 1..5797: mol_type = other RNA

SEQ ID NO: 7795 - RNA, 5797 nt, synthetic construct; identical to SEQ ID NO: 6198
  modified_base 1..5797: mod_base = OTHER; note = Each t is m1f
  source 1..5797: mol_type = other RNA

SEQ ID NO: 7796 - RNA, 5797 nt, synthetic construct; identical to SEQ ID NO: 6199
  modified_base 1..5797: mod_base = OTHER; note = Each t is m1f
  source 1..5797: mol_type = other RNA

SEQ ID NO: 7797 - RNA, 5797 nt, synthetic construct; identical to SEQ ID NO: 6200
  modified_base 1..5797: mod_base = OTHER; note = Each t is m1f
  source 1..5797: mol_type = other RNA

SEQ ID NO: 7798 - RNA, 5797 nt, synthetic construct; identical to SEQ ID NO: 6201
  modified_base 1..5797: mod_base = OTHER; note = Each t is m1f
  source 1..5797: mol_type = other RNA

SEQ ID NO: 7799 - RNA, 5797 nt, synthetic construct; identical to SEQ ID NO: 6202
  modified_base 1..5797: mod_base = OTHER; note = Each t is m1f
  source 1..5797: mol_type = other RNA

SEQ ID NO: 7800 - RNA, 5797 nt, synthetic construct; identical to SEQ ID NO: 6203
  modified_base 1..5797: mod_base = OTHER; note = Each t is m1f
  source 1..5797: mol_type = other RNA

SEQ ID NO: 7801 - RNA, 5797 nt, synthetic construct; identical to SEQ ID NO: 6204
  modified_base 1..5797: mod_base = OTHER; note = Each t is m1f
  source 1..5797: mol_type = other RNA

SEQ ID NO: 7802 - RNA, 5797 nt, synthetic construct; identical to SEQ ID NO: 6205
  modified_base 1..5797: mod_base = OTHER; note = Each t is m1f
  source 1..5797: mol_type = other RNA

SEQ ID NO: 7803 - RNA, 5797 nt, synthetic construct; identical to SEQ ID NO: 6206
  modified_base 1..5797: mod_base = OTHER; note = Each t is m1f
  source 1..5797: mol_type = other RNA

SEQ ID NO: 7804 - RNA, 5797 nt, synthetic construct; identical to SEQ ID NO: 6207
  modified_base 1..5797: mod_base = OTHER; note = Each t is m1f
  source 1..5797: mol_type = other RNA

SEQ ID NO: 7805 - RNA, 5797 nt, synthetic construct; identical to SEQ ID NO: 6208
  modified_base 1..5797: mod_base = OTHER; note = Each t is m1f
  source 1..5797: mol_type = other RNA

SEQ ID NO: 7806 - RNA, 5797 nt, synthetic construct; identical to SEQ ID NO: 6209
  modified_base 1..5797: mod_base = OTHER; note = Each t is m1f
  source 1..5797: mol_type = other RNA

SEQ ID NO: 7807 - RNA, 5797 nt, synthetic construct; identical to SEQ ID NO: 6210
  modified_base 1..5797: mod_base = OTHER; note = Each t is m1f
  source 1..5797: mol_type = other RNA

SEQ ID NO: 7808 - RNA, 5797 nt, synthetic construct; identical to SEQ ID NO: 6211
  modified_base 1..5797: mod_base = OTHER; note = Each t is m1f
  source 1..5797: mol_type = other RNA

SEQ ID NO: 7809 - RNA, 5797 nt, synthetic construct; identical to SEQ ID NO: 6212
  modified_base 1..5797: mod_base = OTHER; note = Each t is m1f
  source 1..5797: mol_type = other RNA

SEQ ID NO: 7810 - RNA, 5797 nt, synthetic construct; identical to SEQ ID NO: 6213
  modified_base 1..5797: mod_base = OTHER; note = Each t is m1f
  source 1..5797: mol_type = other RNA

SEQ ID NO: 7811 - RNA, 5797 nt, synthetic construct; identical to SEQ ID NO: 6214
  modified_base 1..5797: mod_base = OTHER; note = Each t is m1f
  source 1..5797: mol_type = other RNA

SEQ ID NO: 7812 - RNA, 5797 nt, synthetic construct; identical to SEQ ID NO: 6215
  modified_base 1..5797: mod_base = OTHER; note = Each t is m1f
  source 1..5797: mol_type = other RNA

SEQ ID NO: 7813 - RNA, 5797 nt, synthetic construct; identical to SEQ ID NO: 6216
  modified_base 1..5797: mod_base = OTHER; note = Each t is m1f
  source 1..5797: mol_type = other RNA

SEQ ID NO: 7814 - RNA, 5797 nt, synthetic construct; identical to SEQ ID NO: 6217
  modified_base 1..5797: mod_base = OTHER; note = Each t is m1f
  source 1..5797: mol_type = other RNA

SEQ ID NO: 7815 - RNA, 5797 nt, synthetic construct; identical to SEQ ID NO: 6218
  modified_base 1..5797: mod_base = OTHER; note = Each t is m1f
  source 1..5797: mol_type = other RNA

SEQ ID NO: 7816 - RNA, 5797 nt, synthetic construct; identical to SEQ ID NO: 6219
  modified_base 1..5797: mod_base = OTHER; note = Each t is m1f
  source 1..5797: mol_type = other RNA

SEQ ID NO: 7817 - RNA, 5797 nt, synthetic construct; identical to SEQ ID NO: 6220
  modified_base 1..5797: mod_base = OTHER; note = Each t is m1f
  source 1..5797: mol_type = other RNA

SEQ ID NO: 7818 - RNA, 5797 nt, synthetic construct; identical to SEQ ID NO: 6221
  modified_base 1..5797: mod_base = OTHER; note = Each t is m1f
  source 1..5797: mol_type = other RNA

SEQ ID NO: 7819 - RNA, 5797 nt, synthetic construct; identical to SEQ ID NO: 6222
  modified_base 1..5797: mod_base = OTHER; note = Each t is m1f
  source 1..5797: mol_type = other RNA

SEQ ID NO: 7820 - RNA, 5797 nt, synthetic construct; identical to SEQ ID NO: 6223
  modified_base 1..5797: mod_base = OTHER; note = Each t is m1f
  source 1..5797: mol_type = other RNA

SEQ ID NO: 7821 - RNA, 5797 nt, synthetic construct; identical to SEQ ID NO: 6224
  modified_base 1..5797: mod_base = OTHER; note = Each t is m1f
  source 1..5797: mol_type = other RNA

SEQ ID NO: 7822 - RNA, 5797 nt, synthetic construct; identical to SEQ ID NO: 6225
  modified_base 1..5797: mod_base = OTHER; note = Each t is m1f
  source 1..5797: mol_type = other RNA

SEQ ID NO: 7823 - RNA, 5797 nt, synthetic construct; identical to SEQ ID NO: 6226
  modified_base 1..5797: mod_base = OTHER; note = Each t is m1f
  source 1..5797: mol_type = other RNA

SEQ ID NO: 7824 - RNA, 5797 nt, synthetic construct; identical to SEQ ID NO: 6227
  modified_base 1..5797: mod_base = OTHER; note = Each t is m1f
  source 1..5797: mol_type = other RNA

SEQ ID NO: 7825 - RNA, 5797 nt, synthetic construct; identical to SEQ ID NO: 6228
  modified_base 1..5797: mod_base = OTHER; note = Each t is m1f
  source 1..5797: mol_type = other RNA

SEQ ID NO: 7826 - RNA, 5797 nt, synthetic construct; identical to SEQ ID NO: 6229
  modified_base 1..5797: mod_base = OTHER; note = Each t is m1f
  source 1..5797: mol_type = other RNA

SEQ ID NO: 7827 - RNA, 5797 nt, synthetic construct; identical to SEQ ID NO: 6230
  modified_base 1..5797: mod_base = OTHER; note = Each t is m1f
  source 1..5797: mol_type = other RNA

SEQ ID NO: 7828 - RNA, 5797 nt, synthetic construct; identical to SEQ ID NO: 6231
  modified_base 1..5797: mod_base = OTHER; note = Each t is m1f
  source 1..5797: mol_type = other RNA

SEQ ID NO: 7829 - RNA, 5797 nt, synthetic construct; identical to SEQ ID NO: 6232
  modified_base 1..5797: mod_base = OTHER; note = Each t is m1f
  source 1..5797: mol_type = other RNA

SEQ ID NO: 7830 - RNA, 5797 nt, synthetic construct; identical to SEQ ID NO: 6233
  modified_base 1..5797: mod_base = OTHER; note = Each t is m1f
  source 1..5797: mol_type = other RNA

SEQ ID NO: 7831 - RNA, 5794 nt, synthetic construct; identical to SEQ ID NO: 6234
  modified_base 1..5794: mod_base = OTHER; note = Each t is m1f
  source 1..5794: mol_type = other RNA

SEQ ID NO: 7832 - RNA, 5797 nt, synthetic construct; identical to SEQ ID NO: 6235
  modified_base 1..5797: mod_base = OTHER; note = Each t is m1f
  source 1..5797: mol_type = other RNA

SEQ ID NO: 7833 - RNA, 5797 nt, synthetic construct; identical to SEQ ID NO: 6236
  modified_base 1..5797: mod_base = OTHER; note = Each t is m1f
  source 1..5797: mol_type = other RNA

SEQ ID NO: 7834 - RNA, 5797 nt, synthetic construct; identical to SEQ ID NO: 6237
  modified_base 1..5797: mod_base = OTHER; note = Each t is m1f
  source 1..5797: mol_type = other RNA

SEQ ID NO: 7835 - RNA, 5797 nt, synthetic construct; identical to SEQ ID NO: 6238
  modified_base 1..5797: mod_base = OTHER; note = Each t is m1f
  source 1..5797: mol_type = other RNA

SEQ ID NO: 7836 - RNA, 5797 nt, synthetic construct; identical to SEQ ID NO: 6239
  modified_base 1..5797: mod_base = OTHER; note = Each t is m1f
  source 1..5797: mol_type = other RNA

SEQ ID NO: 7837 - RNA, 5797 nt, synthetic construct; identical to SEQ ID NO: 6240
  modified_base 1..5797: mod_base = OTHER; note = Each t is m1f
  source 1..5797: mol_type = other RNA

SEQ ID NO: 7838 - RNA, 5797 nt, synthetic construct; identical to SEQ ID NO: 6241
  modified_base 1..5797: mod_base = OTHER; note = Each t is m1f
  source 1..5797: mol_type = other RNA

SEQ ID NO: 7839 - RNA, 5797 nt, synthetic construct; identical to SEQ ID NO: 6242
  modified_base 1..5797: mod_base = OTHER; note = Each t is m1f
  source 1..5797: mol_type = other RNA

SEQ ID NO: 7840 - RNA, 5797 nt, synthetic construct; identical to SEQ ID NO: 6243
  modified_base 1..5797: mod_base = OTHER; note = Each t is m1f
  source 1..5797: mol_type = other RNA

SEQ ID NO: 7841 - RNA, 5797 nt, synthetic construct; identical to SEQ ID NO: 6244
  modified_base 1..5797: mod_base = OTHER; note = Each t is m1f
  source 1..5797: mol_type = other RNA

SEQ ID NO: 7842 - RNA, 5797 nt, synthetic construct; identical to SEQ ID NO: 6245
  modified_base 1..5797: mod_base = OTHER; note = Each t is m1f
  source 1..5797: mol_type = other RNA

SEQ ID NO: 7843 - RNA, 5797 nt, synthetic construct; identical to SEQ ID NO: 6246
  modified_base 1..5797: mod_base = OTHER; note = Each t is m1f
  source 1..5797: mol_type = other RNA

SEQ ID NO: 7844 - RNA, 5797 nt, synthetic construct; identical to SEQ ID NO: 6247
  modified_base 1..5797: mod_base = OTHER; note = Each t is m1f
  source 1..5797: mol_type = other RNA

SEQ ID NO: 7845 - RNA, 5797 nt, synthetic construct; identical to SEQ ID NO: 6248
  modified_base 1..5797: mod_base = OTHER; note = Each t is m1f
  source 1..5797: mol_type = other RNA

SEQ ID NO: 7846 - RNA, 5797 nt, synthetic construct; identical to SEQ ID NO: 6249
  modified_base 1..5797: mod_base = OTHER; note = Each t is m1f
  source 1..5797: mol_type = other RNA

SEQ ID NO: 7847 - RNA, 5797 nt, synthetic construct; identical to SEQ ID NO: 6250
  modified_base 1..5797: mod_base = OTHER; note = Each t is m1f
  source 1..5797: mol_type = other RNA

SEQ ID NO: 7848 - RNA, 5797 nt, synthetic construct; identical to SEQ ID NO: 6251
  modified_base 1..5797: mod_base = OTHER; note = Each t is m1f
  source 1..5797: mol_type = other RNA

SEQ ID NO: 7849 - RNA, 5797 nt, synthetic construct; identical to SEQ ID NO: 6252
  modified_base 1..5797: mod_base = OTHER; note = Each t is m1f
  source 1..5797: mol_type = other RNA

SEQ ID NO: 7850 - RNA, 5797 nt, synthetic construct; identical to SEQ ID NO: 6253
  modified_base 1..5797: mod_base = OTHER; note = Each t is m1f
  source 1..5797: mol_type = other RNA

SEQ ID NO: 7851 - RNA, 5797 nt, synthetic construct; identical to SEQ ID NO: 6254
  modified_base 1..5797: mod_base = OTHER; note = Each t is m1f
  source 1..5797: mol_type = other RNA

SEQ ID NO: 7852 - RNA, 5797 nt, synthetic construct; identical to SEQ ID NO: 6255
  modified_base 1..5797: mod_base = OTHER; note = Each t is m1f
  source 1..5797: mol_type = other RNA

SEQ ID NO: 7853 - RNA, 5797 nt, synthetic construct; identical to SEQ ID NO: 6256
  modified_base 1..5797: mod_base = OTHER; note = Each t is m1f
  source 1..5797: mol_type = other RNA

SEQ ID NO: 7854 - RNA, 5797 nt, synthetic construct; identical to SEQ ID NO: 6257
  modified_base 1..5797: mod_base = OTHER; note = Each t is m1f
  source 1..5797: mol_type = other RNA

SEQ ID NO: 7855 - RNA, 5797 nt, synthetic construct; identical to SEQ ID NO: 6258
  modified_base 1..5797: mod_base = OTHER; note = Each t is m1f
  source 1..5797: mol_type = other RNA

SEQ ID NO: 7856 - RNA, 5797 nt, synthetic construct; identical to SEQ ID NO: 6259
  modified_base 1..5797: mod_base = OTHER; note = Each t is m1f
  source 1..5797: mol_type = other RNA

SEQ ID NO: 7857 - RNA, 5797 nt, synthetic construct; identical to SEQ ID NO: 6260
  modified_base 1..5797: mod_base = OTHER; note = Each t is m1f
  source 1..5797: mol_type = other RNA

SEQ ID NO: 7858 - RNA, 5797 nt, synthetic construct; identical to SEQ ID NO: 6261
  modified_base 1..5797: mod_base = OTHER; note = Each t is m1f
  source 1..5797: mol_type = other RNA

SEQ ID NO: 7859 - RNA, 5797 nt, synthetic construct; identical to SEQ ID NO: 6262
  modified_base 1..5797: mod_base = OTHER; note = Each t is m1f
  source 1..5797: mol_type = other RNA

SEQ ID NO: 7860 - RNA, 5797 nt, synthetic construct; identical to SEQ ID NO: 6263
  modified_base 1..5797: mod_base = OTHER; note = Each t is m1f
  source 1..5797: mol_type = other RNA

SEQ ID NO: 7861 - RNA, 5797 nt, synthetic construct; identical to SEQ ID NO: 6264
  modified_base 1..5797: mod_base = OTHER; note = Each t is m1f
  source 1..5797: mol_type = other RNA

SEQ ID NO: 7862 - RNA, 5797 nt, synthetic construct; identical to SEQ ID NO: 6265
  modified_base 1..5797: mod_base = OTHER; note = Each t is m1f
  source 1..5797: mol_type = other RNA

SEQ ID NO: 7863 - RNA, 5797 nt, synthetic construct; identical to SEQ ID NO: 6266
  modified_base 1..5797: mod_base = OTHER; note = Each t is m1f
  source 1..5797: mol_type = other RNA

SEQ ID NO: 7864 - RNA, 5797 nt, synthetic construct; identical to SEQ ID NO: 6267
  modified_base 1..5797: mod_base = OTHER; note = Each t is m1f
  source 1..5797: mol_type = other RNA

SEQ ID NO: 7865 - RNA, 5797 nt, synthetic construct; identical to SEQ ID NO: 6268
  modified_base 1..5797: mod_base = OTHER; note = Each t is m1f
  source 1..5797: mol_type = other RNA

SEQ ID NO: 7866 - RNA, 5797 nt, synthetic construct; identical to SEQ ID NO: 6269
  modified_base 1..5797: mod_base = OTHER; note = Each t is m1f
  source 1..5797: mol_type = other RNA

SEQ ID NO: 7867 - RNA, 5797 nt, synthetic construct; identical to SEQ ID NO: 6270
  modified_base 1..5797: mod_base = OTHER; note = Each t is m1f
  source 1..5797: mol_type = other RNA

SEQ ID NO: 7868 - RNA, 5797 nt, synthetic construct; identical to SEQ ID NO: 6271
  modified_base 1..5797: mod_base = OTHER; note = Each t is m1f
  source 1..5797: mol_type = other RNA

SEQ ID NO: 7869 - RNA, 5797 nt, synthetic construct; identical to SEQ ID NO: 6272
  modified_base 1..5797: mod_base = OTHER; note = Each t is m1f
  source 1..5797: mol_type = other RNA

SEQ ID NO: 7870 - RNA, 5797 nt, synthetic construct; identical to SEQ ID NO: 6273
  modified_base 1..5797: mod_base = OTHER; note = Each t is m1f
  source 1..5797: mol_type = other RNA

SEQ ID NO: 7871 - RNA, 5797 nt, synthetic construct; identical to SEQ ID NO: 6274
  modified_base 1..5797: mod_base = OTHER; note = Each t is m1f
  source 1..5797: mol_type = other RNA

SEQ ID NO: 7872 - RNA, 5797 nt, synthetic construct; identical to SEQ ID NO: 6275
  modified_base 1..5797: mod_base = OTHER; note = Each t is m1f
  source 1..5797: mol_type = other RNA

SEQ ID NO: 7873 - RNA, 5797 nt, synthetic construct; identical to SEQ ID NO: 6276
  modified_base 1..5797: mod_base = OTHER; note = Each t is m1f
  source 1..5797: mol_type = other RNA

SEQ ID NO: 7874 - RNA, 5797 nt, synthetic construct; identical to SEQ ID NO: 6277
  modified_base 1..5797: mod_base = OTHER; note = Each t is m1f
  source 1..5797: mol_type = other RNA

SEQ ID NO: 7875 - RNA, 5797 nt, synthetic construct; identical to SEQ ID NO: 6278
  modified_base 1..5797: mod_base = OTHER; note = Each t is m1f
  source 1..5797: mol_type = other RNA

SEQ ID NO: 7876 - RNA, 5797 nt, synthetic construct; identical to SEQ ID NO: 6279
  modified_base 1..5797: mod_base = OTHER; note = Each t is m1f
  source 1..5797: mol_type = other RNA

SEQ ID NO: 7877 - RNA, 5797 nt, synthetic construct; identical to SEQ ID NO: 6280
  modified_base 1..5797: mod_base = OTHER; note = Each t is m1f
  source 1..5797: mol_type = other RNA

SEQ ID NO: 7878 - RNA, 5797 nt, synthetic construct; identical to SEQ ID NO: 6281
  modified_base 1..5797: mod_base = OTHER; note = Each t is m1f
  source 1..5797: mol_type = other RNA

SEQ ID NO: 7879 - RNA, 5797 nt, synthetic construct; identical to SEQ ID NO: 6282
  modified_base 1..5797: mod_base = OTHER; note = Each t is m1f
  source 1..5797: mol_type = other RNA

SEQ ID NO: 7880 - RNA, 5797 nt, synthetic construct; identical to SEQ ID NO: 6283
  modified_base 1..5797: mod_base = OTHER; note = Each t is m1f
  source 1..5797: mol_type = other RNA

SEQ ID NO: 7881 - RNA, 5797 nt, synthetic construct; identical to SEQ ID NO: 6284
  modified_base 1..5797: mod_base = OTHER; note = Each t is m1f
  source 1..5797: mol_type = other RNA

SEQ ID NO: 7882 - RNA, 5797 nt, synthetic construct; identical to SEQ ID NO: 6285
  modified_base 1..5797: mod_base = OTHER; note = Each t is m1f
  source 1..5797: mol_type = other RNA

SEQ ID NO: 7883 - RNA, 5797 nt, synthetic construct; identical to SEQ ID NO: 6286
  modified_base 1..5797: mod_base = OTHER; note = Each t is m1f
  source 1..5797: mol_type = other RNA

SEQ ID NO: 7884 - RNA, 5797 nt, synthetic construct; identical to SEQ ID NO: 6287
  modified_base 1..5797: mod_base = OTHER; note = Each t is m1f
  source 1..5797: mol_type = other RNA

SEQ ID NO: 7885 - RNA, 5797 nt, synthetic construct; identical to SEQ ID NO: 6288
  modified_base 1..5797: mod_base = OTHER; note = Each t is m1f
  source 1..5797: mol_type = other RNA

SEQ ID NO: 7886 - RNA, 5797 nt, synthetic construct; identical to SEQ ID NO: 6289
  modified_base 1..5797: mod_base = OTHER; note = Each t is m1f
  source 1..5797: mol_type = other RNA

SEQ ID NO: 7887 - RNA, 5797 nt, synthetic construct; identical to SEQ ID NO: 6290
  modified_base 1..5797: mod_base = OTHER; note = Each t is m1f
  source 1..5797: mol_type = other RNA

SEQ ID NO: 7888 - RNA, 5797 nt, synthetic construct; identical to SEQ ID NO: 6291
  modified_base 1..5797: mod_base = OTHER; note = Each t is m1f
  source 1..5797: mol_type = other RNA

SEQ ID NO: 7889 - RNA, 5797 nt, synthetic construct; identical to SEQ ID NO: 6292
  modified_base 1..5797: mod_base = OTHER; note = Each t is m1f
  source 1..5797: mol_type = other RNA

SEQ ID NO: 7890 - RNA, 5797 nt, synthetic construct; identical to SEQ ID NO: 6293
  modified_base 1..5797: mod_base = OTHER; note = Each t is m1f
  source 1..5797: mol_type = other RNA

SEQ ID NO: 7891 - RNA, 5797 nt, synthetic construct; identical to SEQ ID NO: 6294
  modified_base 1..5797: mod_base = OTHER; note = Each t is m1f
  source 1..5797: mol_type = other RNA

SEQ ID NO: 7892 - RNA, 5797 nt, synthetic construct; identical to SEQ ID NO: 6295
  modified_base 1..5797: mod_base = OTHER; note = Each t is m1f
  source 1..5797: mol_type = other RNA

SEQ ID NO: 7893 - RNA, 5797 nt, synthetic construct; identical to SEQ ID NO: 6296
  modified_base 1..5797: mod_base = OTHER; note = Each t is m1f
  source 1..5797: mol_type = other RNA

SEQ ID NO: 7894 - RNA, 5797 nt, synthetic construct; identical to SEQ ID NO: 6297
  modified_base 1..5797: mod_base = OTHER; note = Each t is m1f
  source 1..5797: mol_type = other RNA

SEQ ID NO: 7895 - RNA, 5797 nt, synthetic construct; identical to SEQ ID NO: 6298
  modified_base 1..5797: mod_base = OTHER; note = Each t is m1f
  source 1..5797: mol_type = other RNA

SEQ ID NO: 7896 - RNA, 5797 nt, synthetic construct; identical to SEQ ID NO: 6299
  modified_base 1..5797: mod_base = OTHER; note = Each t is m1f
  source 1..5797: mol_type = other RNA

SEQ ID NO: 7897 - RNA, 5797 nt, synthetic construct; identical to SEQ ID NO: 6300
  modified_base 1..5797: mod_base = OTHER; note = Each t is m1f
  source 1..5797: mol_type = other RNA

SEQ ID NO: 7898 - RNA, 5797 nt, synthetic construct; identical to SEQ ID NO: 6301
  modified_base 1..5797: mod_base = OTHER; note = Each t is m1f
  source 1..5797: mol_type = other RNA

SEQ ID NO: 7899 - RNA, 5797 nt, synthetic construct; identical to SEQ ID NO: 6302
  modified_base 1..5797: mod_base = OTHER; note = Each t is m1f
  source 1..5797: mol_type = other RNA

SEQ ID NO: 7900 - RNA, 5830 nt, synthetic construct; identical to SEQ ID NO: 6303
  modified_base 1..5797: mod_base = OTHER; note = Each t is m1f
  source 1..5830: mol_type = other RNA

SEQ ID NO: 7901 - RNA, 5797 nt, synthetic construct; identical to SEQ ID NO: 6304
  modified_base 1..5797: mod_base = OTHER; note = Each t is m1f
  source 1..5797: mol_type = other RNA

SEQ ID NO: 7902 - RNA, 5797 nt, synthetic construct; identical to SEQ ID NO: 6305
  modified_base 1..5797: mod_base = OTHER; note = Each t is m1f
  source 1..5797: mol_type = other RNA

SEQ ID NO: 7903 - RNA, 5797 nt, synthetic construct; identical to SEQ ID NO: 6306
  modified_base 1..5797: mod_base = OTHER; note = Each t is m1f
  source 1..5797: mol_type = other RNA

SEQ ID NO: 7904 - RNA, 5797 nt, synthetic construct; identical to SEQ ID NO: 6307
  modified_base 1..5797: mod_base = OTHER; note = Each t is m1f
  source 1..5797: mol_type = other RNA

SEQ ID NO: 7905 - RNA, 5797 nt, synthetic construct; identical to SEQ ID NO: 6308
  modified_base 1..5797: mod_base = OTHER; note = Each t is m1f
  source 1..5797: mol_type = other RNA

SEQ ID NO: 7906 - RNA, 5797 nt, synthetic construct; identical to SEQ ID NO: 6309
  modified_base 1..5797: mod_base = OTHER; note = Each t is m1f
  source 1..5797: mol_type = other RNA

SEQ ID NO: 7907 - RNA, 5797 nt, synthetic construct; identical to SEQ ID NO: 6310
  modified_base 1..5797: mod_base = OTHER; note = Each t is m1f
  source 1..5797: mol_type = other RNA

SEQ ID NO: 7908 - RNA, 5797 nt, synthetic construct; identical to SEQ ID NO: 6311
  modified_base 1..5797: mod_base = OTHER; note = Each t is m1f
  source 1..5797: mol_type = other RNA

SEQ ID NO: 7909 - RNA, 5797 nt, synthetic construct; identical to SEQ ID NO: 6312
  modified_base 1..5797: mod_base = OTHER; note = Each t is m1f
  source 1..5797: mol_type = other RNA

SEQ ID NO: 7910 - RNA, 5797 nt, synthetic construct; identical to SEQ ID NO: 6313
  modified_base 1..5797: mod_base = OTHER; note = Each t is m1f
  source 1..5797: mol_type = other RNA

SEQ ID NO: 7911 - RNA, 5797 nt, synthetic construct; identical to SEQ ID NO: 6314
  modified_base 1..5797: mod_base = OTHER; note = Each t is m1f
  source 1..5797: mol_type = other RNA

SEQ ID NO: 7912 - RNA, 5797 nt, synthetic construct; identical to SEQ ID NO: 6315
  modified_base 1..5797: mod_base = OTHER; note = Each t is m1f
  source 1..5797: mol_type = other RNA

SEQ ID NO: 7913 - RNA, 5797 nt, synthetic construct; identical to SEQ ID NO: 6316
  modified_base 1..5797: mod_base = OTHER; note = Each t is m1f
  source 1..5797: mol_type = other RNA

SEQ ID NO: 7914 - RNA, 5797 nt, synthetic construct; identical to SEQ ID NO: 6317
  modified_base 1..5797: mod_base = OTHER; note = Each t is m1f
  source 1..5797: mol_type = other RNA

SEQ ID NO: 7915 - RNA, 5797 nt, synthetic construct; identical to SEQ ID NO: 6318
  modified_base 1..5797: mod_base = OTHER; note = Each t is m1f
  source 1..5797: mol_type = other RNA

SEQ ID NO: 7916 - RNA, 5797 nt, synthetic construct; identical to SEQ ID NO: 6319
  modified_base 1..5797: mod_base = OTHER; note = Each t is m1f
  source 1..5797: mol_type = other RNA

SEQ ID NO: 7917 - RNA, 5797 nt, synthetic construct; identical to SEQ ID NO: 6320
  modified_base 1..5797: mod_base = OTHER; note = Each t is m1f
  source 1..5797: mol_type = other RNA

SEQ ID NO: 7918 - RNA, 5797 nt, synthetic construct; identical to SEQ ID NO: 6321
  modified_base 1..5797: mod_base = OTHER; note = Each t is m1f
  source 1..5797: mol_type = other RNA

SEQ ID NO: 7919 - RNA, 5797 nt, synthetic construct; identical to SEQ ID NO: 6322
  modified_base 1..5797: mod_base = OTHER; note = Each t is m1f
  source 1..5797: mol_type = other RNA

SEQ ID NO: 7920 - RNA, 5797 nt, synthetic construct; identical to SEQ ID NO: 6323
  modified_base 1..5797: mod_base = OTHER; note = Each t is m1f
  source 1..5797: mol_type = other RNA

SEQ ID NO: 7921 - RNA, 5797 nt, synthetic construct; identical to SEQ ID NO: 6324
  modified_base 1..5797: mod_base = OTHER; note = Each t is m1f
  source 1..5797: mol_type = other RNA

SEQ ID NO: 7922 - RNA, 5797 nt, synthetic construct; identical to SEQ ID NO: 6325
  modified_base 1..5797: mod_base = OTHER; note = Each t is m1f
  source 1..5797: mol_type = other RNA

SEQ ID NO: 7923 - RNA, 5797 nt, synthetic construct; identical to SEQ ID NO: 6326
  modified_base 1..5797: mod_base = OTHER; note = Each t is m1f
  source 1..5797: mol_type = other RNA

SEQ ID NO: 7924 - RNA, 5797 nt, synthetic construct; identical to SEQ ID NO: 6327
  modified_base 1..5797: mod_base = OTHER; note = Each t is m1f
  source 1..5797: mol_type = other RNA

SEQ ID NO: 7925 - RNA, 5797 nt, synthetic construct; identical to SEQ ID NO: 6328
  modified_base 1..5797: mod_base = OTHER; note = Each t is m1f
  source 1..5797: mol_type = other RNA

SEQ ID NO: 7926 - RNA, 5797 nt, synthetic construct; identical to SEQ ID NO: 6329
  modified_base 1..5797: mod_base = OTHER; note = Each t is m1f
  source 1..5797: mol_type = other RNA

SEQ ID NO: 7927 - RNA, 5797 nt, synthetic construct; identical to SEQ ID NO: 6330
  modified_base 1..5797: mod_base = OTHER; note = Each t is m1f
  source 1..5797: mol_type = other RNA

SEQ ID NO: 7928 - RNA, 5797 nt, synthetic construct; identical to SEQ ID NO: 6331
  modified_base 1..5797: mod_base = OTHER; note = Each t is m1f
  source 1..5797: mol_type = other RNA

SEQ ID NO: 7929 - RNA, 5797 nt, synthetic construct; identical to SEQ ID NO: 6332
  modified_base 1..5797: mod_base = OTHER; note = Each t is m1f
  source 1..5797: mol_type = other RNA

SEQ ID NO: 7930 - RNA, 5797 nt, synthetic construct; identical to SEQ ID NO: 6333
  modified_base 1..5797: mod_base = OTHER; note = Each t is m1f
  source 1..5797: mol_type = other RNA

SEQ ID NO: 7931 - RNA, 5797 nt, synthetic construct; identical to SEQ ID NO: 6334
  modified_base 1..5797: mod_base = OTHER; note = Each t is m1f
  source 1..5797: mol_type = other RNA

SEQ ID NO: 7932 - RNA, 5797 nt, synthetic construct; identical to SEQ ID NO: 6335
  modified_base 1..5797: mod_base = OTHER; note = Each t is m1f
  source 1..5797: mol_type = other RNA

SEQ ID NO: 7933 - RNA, 5797 nt, synthetic construct; identical to SEQ ID NO: 6336
  modified_base 1..5797: mod_base = OTHER; note = Each t is m1f
  source 1..5797: mol_type = other RNA

SEQ ID NO: 7934 - RNA, 5797 nt, synthetic construct; identical to SEQ ID NO: 6337
  modified_base 1..5797: mod_base = OTHER; note = Each t is m1f
  source 1..5797: mol_type = other RNA

SEQ ID NO: 7935 - RNA, 5797 nt, synthetic construct; identical to SEQ ID NO: 6338
  modified_base 1..5797: mod_base = OTHER; note = Each t is m1f
  source 1..5797: mol_type = other RNA

SEQ ID NO: 7936 - RNA, 5797 nt, synthetic construct; identical to SEQ ID NO: 6339
  modified_base 1..5797: mod_base = OTHER; note = Each t is m1f
  source 1..5797: mol_type = other RNA

SEQ ID NO: 7937 - RNA, 5797 nt, synthetic construct; identical to SEQ ID NO: 6340
  modified_base 1..5797: mod_base = OTHER; note = Each t is m1f
  source 1..5797: mol_type = other RNA

SEQ ID NO: 7938 - RNA, 5797 nt, synthetic construct; identical to SEQ ID NO: 6341
  modified_base 1..5797: mod_base = OTHER; note = Each t is m1f
  source 1..5797: mol_type = other RNA

SEQ ID NO: 7939 - RNA, 5797 nt, synthetic construct; identical to SEQ ID NO: 6342
  modified_base 1..5797: mod_base = OTHER; note = Each t is m1f
  source 1..5797: mol_type = other RNA

SEQ ID NO: 7940 - RNA, 5797 nt, synthetic construct; identical to SEQ ID NO: 6343
  modified_base 1..5797: mod_base = OTHER; note = Each t is m1f
  source 1..5797: mol_type = other RNA

SEQ ID NO: 7941 - RNA, 5797 nt, synthetic construct; identical to SEQ ID NO: 6344
  modified_base 1..5797: mod_base = OTHER; note = Each t is m1f
  source 1..5797: mol_type = other RNA

SEQ ID NO: 7942 - RNA, 5797 nt, synthetic construct; identical to SEQ ID NO: 6345
  modified_base 1..5797: mod_base = OTHER; note = Each t is m1f
  source 1..5797: mol_type = other RNA

SEQ ID NO: 7943 - RNA, 5797 nt, synthetic construct; identical to SEQ ID NO: 6346
  modified_base 1..5797: mod_base = OTHER; note = Each t is m1f
  source 1..5797: mol_type = other RNA

SEQ ID NO: 7944 - RNA, 5797 nt, synthetic construct; identical to SEQ ID NO: 6347
  modified_base 1..5797: mod_base = OTHER; note = Each t is m1f
  source 1..5797: mol_type = other RNA

SEQ ID NO: 7945 - RNA, 5797 nt, synthetic construct; identical to SEQ ID NO: 6348
  modified_base 1..5797: mod_base = OTHER; note = Each t is m1f
  source 1..5797: mol_type = other RNA

SEQ ID NO: 7946 - RNA, 5797 nt, synthetic construct; identical to SEQ ID NO: 6349
  modified_base 1..5797: mod_base = OTHER; note = Each t is m1f
  source 1..5797: mol_type = other RNA

SEQ ID NO: 7947 - RNA, 5797 nt, synthetic construct; identical to SEQ ID NO: 6350
  modified_base 1..5797: mod_base = OTHER; note = Each t is m1f
  source 1..5797: mol_type = other RNA

SEQ ID NO: 7948 - RNA, 5797 nt, synthetic construct; identical to SEQ ID NO: 6351
  modified_base 1..5797: mod_base = OTHER; note = Each t is m1f
  source 1..5797: mol_type = other RNA

SEQ ID NO: 7949 - RNA, 5797 nt, synthetic construct; identical to SEQ ID NO: 6352
  modified_base 1..5797: mod_base = OTHER; note = Each t is m1f
  source 1..5797: mol_type = other RNA

SEQ ID NO: 7950 - RNA, 5797 nt, synthetic construct; identical to SEQ ID NO: 6353
  modified_base 1..5797: mod_base = OTHER; note = Each t is m1f
  source 1..5797: mol_type = other RNA

SEQ ID NO: 7951 - RNA, 5797 nt, synthetic construct; identical to SEQ ID NO: 6354
  modified_base 1..5797: mod_base = OTHER; note = Each t is m1f
  source 1..5797: mol_type = other RNA

SEQ ID NO: 7952 - RNA, 5797 nt, synthetic construct; identical to SEQ ID NO: 6355
  modified_base 1..5797: mod_base = OTHER; note = Each t is m1f
  source 1..5797: mol_type = other RNA

SEQ ID NO: 7953 - RNA, 5797 nt, synthetic construct; identical to SEQ ID NO: 6356
  modified_base 1..5797: mod_base = OTHER; note = Each t is m1f
  source 1..5797: mol_type = other RNA

SEQ ID NO: 7954 - RNA, 5797 nt, synthetic construct; identical to SEQ ID NO: 6357
  modified_base 1..5797: mod_base = OTHER; note = Each t is m1f
  source 1..5797: mol_type = other RNA

SEQ ID NO: 7955 - RNA, 5797 nt, synthetic construct; identical to SEQ ID NO: 6358
  modified_base 1..5797: mod_base = OTHER; note = Each t is m1f
  source 1..5797: mol_type = other RNA

SEQ ID NO: 7956 - RNA, 5797 nt, synthetic construct; identical to SEQ ID NO: 6359
  modified_base 1..5797: mod_base = OTHER; note = Each t is m1f
  source 1..5797: mol_type = other RNA

SEQ ID NO: 7957 - RNA, 5797 nt, synthetic construct; identical to SEQ ID NO: 6360
  modified_base 1..5797: mod_base = OTHER; note = Each t is m1f
  source 1..5797: mol_type = other RNA

SEQ ID NO: 7958 - RNA, 5797 nt, synthetic construct; identical to SEQ ID NO: 6361
  modified_base 1..5797: mod_base = OTHER; note = Each t is m1f
  source 1..5797: mol_type = other RNA

SEQ ID NO: 7959 - RNA, 5797 nt, synthetic construct; identical to SEQ ID NO: 6362
  modified_base 1..5797: mod_base = OTHER; note = Each t is m1f
  source 1..5797: mol_type = other RNA

SEQ ID NO: 7960 - RNA, 5797 nt, synthetic construct; identical to SEQ ID NO: 6363
  modified_base 1..5797: mod_base = OTHER; note = Each t is m1f
  source 1..5797: mol_type = other RNA

SEQ ID NO: 7961 - RNA, 5797 nt, synthetic construct; identical to SEQ ID NO: 6364
  modified_base 1..5797: mod_base = OTHER; note = Each t is m1f
  source 1..5797: mol_type = other RNA

SEQ ID NO: 7962 - RNA, 5797 nt, synthetic construct; identical to SEQ ID NO: 6365
  modified_base 1..5797: mod_base = OTHER; note = Each t is m1f
  source 1..5797: mol_type = other RNA

SEQ ID NO: 7963 - RNA, 5797 nt, synthetic construct; identical to SEQ ID NO: 6366
  modified_base 1..5797: mod_base = OTHER; note = Each t is m1f
  source 1..5797: mol_type = other RNA

SEQ ID NO: 7964 - RNA, 5797 nt, synthetic construct; identical to SEQ ID NO: 6367
  modified_base 1..5797: mod_base = OTHER; note = Each t is m1f
  source 1..5797: mol_type = other RNA

SEQ ID NO: 7965 - RNA, 5797 nt, synthetic construct; identical to SEQ ID NO: 6368
  modified_base 1..5797: mod_base = OTHER; note = Each t is m1f
  source 1..5797: mol_type = other RNA

SEQ ID NO: 7966 - RNA, 5797 nt, synthetic construct; identical to SEQ ID NO: 6369
  modified_base 1..5797: mod_base = OTHER; note = Each t is m1f
  source 1..5797: mol_type = other RNA

SEQ ID NO: 7967 - RNA, 5797 nt, synthetic construct; identical to SEQ ID NO: 6370
  modified_base 1..5797: mod_base = OTHER; note = Each t is m1f
  source 1..5797: mol_type = other RNA

SEQ ID NO: 7968 - RNA, 5797 nt, synthetic construct; identical to SEQ ID NO: 6371
  modified_base 1..5797: mod_base = OTHER; note = Each t is m1f
  source 1..5797: mol_type = other RNA

SEQ ID NO: 7969 - RNA, 5797 nt, synthetic construct; identical to SEQ ID NO: 6372
  modified_base 1..5797: mod_base = OTHER; note = Each t is m1f
  source 1..5797: mol_type = other RNA

SEQ ID NO: 7970 - RNA, 5806 nt, synthetic construct; identical to SEQ ID NO: 6373
  modified_base 1..5797: mod_base = OTHER; note = Each t is m1f
  source 1..5806: mol_type = other RNA

SEQ ID NO: 7971 - RNA, 5806 nt, synthetic construct; identical to SEQ ID NO: 6374
  modified_base 1..5797: mod_base = OTHER; note = Each t is m1f
  source 1..5806: mol_type = other RNA

SEQ ID NO: 7972 - RNA, 5797 nt, synthetic construct; identical to SEQ ID NO: 6375
  modified_base 1..5797: mod_base = OTHER; note = Each t is m1f
  source 1..5797: mol_type = other RNA

SEQ ID NO: 7973 - RNA, 5797 nt, synthetic construct; identical to SEQ ID NO: 6376
  modified_base 1..5797: mod_base = OTHER; note = Each t is m1f
  source 1..5797: mol_type = other RNA

SEQ ID NO: 7974 - RNA, 5797 nt, synthetic construct; identical to SEQ ID NO: 6377
  modified_base 1..5797: mod_base = OTHER; note = Each t is m1f
  source 1..5797: mol_type = other RNA

SEQ ID NO: 7975 - RNA, 5797 nt, synthetic construct; identical to SEQ ID NO: 6378
  modified_base 1..5797: mod_base = OTHER; note = Each t is m1f
  source 1..5797: mol_type = other RNA

SEQ ID NO: 7976 - RNA, 5797 nt, synthetic construct; identical to SEQ ID NO: 6379
  modified_base 1..5797: mod_base = OTHER; note = Each t is m1f
  source 1..5797: mol_type = other RNA

SEQ ID NO: 7977 - RNA, 5797 nt, synthetic construct; identical to SEQ ID NO: 6380
  modified_base 1..5797: mod_base = OTHER; note = Each t is m1f
  source 1..5797: mol_type = other RNA

SEQ ID NO: 7978 - RNA, 5797 nt, synthetic construct; identical to SEQ ID NO: 6381
  modified_base 1..5797: mod_base = OTHER; note = Each t is m1f
  source 1..5797: mol_type = other RNA

SEQ ID NO: 7979 - RNA, 5797 nt, synthetic construct; identical to SEQ ID NO: 6382
  modified_base 1..5797: mod_base = OTHER; note = Each t is m1f
  source 1..5797: mol_type = other RNA

SEQ ID NO: 7980 - RNA, 5797 nt, synthetic construct; identical to SEQ ID NO: 6383
  modified_base 1..5797: mod_base = OTHER; note = Each t is m1f
  source 1..5797: mol_type = other RNA

SEQ ID NO: 7981 - RNA, 5797 nt, synthetic construct; identical to SEQ ID NO: 6384
  modified_base 1..5797: mod_base = OTHER; note = Each t is m1f
  source 1..5797: mol_type = other RNA

SEQ ID NO: 7982 - RNA, 5797 nt, synthetic construct; identical to SEQ ID NO: 6385
  modified_base 1..5797: mod_base = OTHER; note = Each t is m1f
  source 1..5797: mol_type = other RNA

SEQ ID NO: 7983 - RNA, 5797 nt, synthetic construct; identical to SEQ ID NO: 6386
  modified_base 1..5797: mod_base = OTHER; note = Each t is m1f
  source 1..5797: mol_type = other RNA

SEQ ID NO: 7984 - RNA, 5797 nt, synthetic construct; identical to SEQ ID NO: 6387
  modified_base 1..5797: mod_base = OTHER; note = Each t is m1f
  source 1..5797: mol_type = other RNA

SEQ ID NO: 7985 - RNA, 5797 nt, synthetic construct; identical to SEQ ID NO: 6388
  modified_base 1..5797: mod_base = OTHER; note = Each t is m1f
  source 1..5797: mol_type = other RNA

SEQ ID NO: 7986 - RNA, 5797 nt, synthetic construct; identical to SEQ ID NO: 6389
  modified_base 1..5797: mod_base = OTHER; note = Each t is m1f
  source 1..5797: mol_type = other RNA

SEQ ID NO: 7987 - RNA, 5797 nt, synthetic construct; identical to SEQ ID NO: 6390
  modified_base 1..5797: mod_base = OTHER; note = Each t is m1f
  source 1..5797: mol_type = other RNA

SEQ ID NO: 7988 - RNA, 5797 nt, synthetic construct; identical to SEQ ID NO: 6391
  modified_base 1..5797: mod_base = OTHER; note = Each t is m1f
  source 1..5797: mol_type = other RNA

SEQ ID NO: 7989 - RNA, 5797 nt, synthetic construct; identical to SEQ ID NO: 6392
  modified_base 1..5797: mod_base = OTHER; note = Each t is m1f
  source 1..5797: mol_type = other RNA

SEQ ID NO: 7990 - RNA, 5797 nt, synthetic construct; identical to SEQ ID NO: 6393
  modified_base 1..5797: mod_base = OTHER; note = Each t is m1f
  source 1..5797: mol_type = other RNA

SEQ ID NO: 7991 - RNA, 5797 nt, synthetic construct; identical to SEQ ID NO: 6394
  modified_base 1..5797: mod_base = OTHER; note = Each t is m1f
  source 1..5797: mol_type = other RNA

SEQ ID NO: 7992 - RNA, 5797 nt, synthetic construct; identical to SEQ ID NO: 6395
  modified_base 1..5797: mod_base = OTHER; note = Each t is m1f
  source 1..5797: mol_type = other RNA

SEQ ID NO: 7993 - RNA, 5797 nt, synthetic construct; identical to SEQ ID NO: 6396
  modified_base 1..5797: mod_base = OTHER; note = Each t is m1f
  source 1..5797: mol_type = other RNA

SEQ ID NO: 7994 - RNA, 5797 nt, synthetic construct; identical to SEQ ID NO: 6397
  modified_base 1..5797: mod_base = OTHER; note = Each t is m1f
  source 1..5797: mol_type = other RNA

SEQ ID NO: 7995 - RNA, 5797 nt, synthetic construct; identical to SEQ ID NO: 6398
  modified_base 1..5797: mod_base = OTHER; note = Each t is m1f
  source 1..5797: mol_type = other RNA

SEQ ID NO: 7996 - RNA, 5797 nt, synthetic construct; identical to SEQ ID NO: 6399
  modified_base 1..5797: mod_base = OTHER; note = Each t is m1f
  source 1..5797: mol_type = other RNA

SEQ ID NO: 7997 - RNA, 5797 nt, synthetic construct; identical to SEQ ID NO: 6400
  modified_base 1..5797: mod_base = OTHER; note = Each t is m1f
  source 1..5797: mol_type = other RNA

SEQ ID NO: 7998 - RNA, 5797 nt, synthetic construct; identical to SEQ ID NO: 6401
  modified_base 1..5797: mod_base = OTHER; note = Each t is m1f
  source 1..5797: mol_type = other RNA

SEQ ID NO: 7999 - RNA, 5797 nt, synthetic construct; identical to SEQ ID NO: 6402
  modified_base 1..5797: mod_base = OTHER; note = Each t is m1f
  source 1..5797: mol_type = other RNA

SEQ ID NO: 8000 - RNA, 5797 nt, synthetic construct; identical to SEQ ID NO: 6403
  modified_base 1..5797: mod_base = OTHER; note = Each t is m1f
  source 1..5797: mol_type = other RNA

SEQ ID NO: 8001 - RNA, 5797 nt, synthetic construct; identical to SEQ ID NO: 6404
  modified_base 1..5797: mod_base = OTHER; note = Each t is m1f
  source 1..5797: mol_type = other RNA

SEQ ID NO: 8002 - RNA, 5797 nt, synthetic construct; identical to SEQ ID NO: 6405
  modified_base 1..5797: mod_base = OTHER; note = Each t is m1f
  source 1..5797: mol_type = other RNA

SEQ ID NO: 8003 - RNA, 5797 nt, synthetic construct; identical to SEQ ID NO: 6406
  modified_base 1..5797: mod_base = OTHER; note = Each t is m1f
  source 1..5797: mol_type = other RNA

SEQ ID NO: 8004 - RNA, 5797 nt, synthetic construct; identical to SEQ ID NO: 6407
  modified_base 1..5797: mod_base = OTHER; note = Each t is m1f
  source 1..5797: mol_type = other RNA

SEQ ID NO: 8005 - RNA, 5797 nt, synthetic construct; identical to SEQ ID NO: 6408
  modified_base 1..5797: mod_base = OTHER; note = Each t is m1f
  source 1..5797: mol_type = other RNA

SEQ ID NO: 8006 - RNA, 5797 nt, synthetic construct; identical to SEQ ID NO: 6409
  modified_base 1..5797: mod_base = OTHER; note = Each t is m1f
  source 1..5797: mol_type = other RNA

SEQ ID NO: 8007 - RNA, 5797 nt, synthetic construct; identical to SEQ ID NO: 6410
  modified_base 1..5797: mod_base = OTHER; note = Each t is m1f
  source 1..5797: mol_type = other RNA

SEQ ID NO: 8008 - RNA, 5797 nt, synthetic construct; identical to SEQ ID NO: 6411
  modified_base 1..5797: mod_base = OTHER; note = Each t is m1f
  source 1..5797: mol_type = other RNA

SEQ ID NO: 8009 - RNA, 5797 nt, synthetic construct; identical to SEQ ID NO: 6412
  modified_base 1..5797: mod_base = OTHER; note = Each t is m1f
  source 1..5797: mol_type = other RNA

SEQ ID NO: 8010 - RNA, 5797 nt, synthetic construct; identical to SEQ ID NO: 6413
  modified_base 1..5797: mod_base = OTHER; note = Each t is m1f
  source 1..5797: mol_type = other RNA

SEQ ID NO: 8011 - RNA, 5797 nt, synthetic construct; identical to SEQ ID NO: 6414
  modified_base 1..5797: mod_base = OTHER; note = Each t is m1f
  source 1..5797: mol_type = other RNA

SEQ ID NO: 8012 - RNA, 5797 nt, synthetic construct; identical to SEQ ID NO: 6415
  modified_base 1..5797: mod_base = OTHER; note = Each t is m1f
  source 1..5797: mol_type = other RNA

SEQ ID NO: 8013 - RNA, 5797 nt, synthetic construct; identical to SEQ ID NO: 6416
  modified_base 1..5797: mod_base = OTHER; note = Each t is m1f
  source 1..5797: mol_type = other RNA

SEQ ID NO: 8014 - RNA, 5797 nt, synthetic construct; identical to SEQ ID NO: 6417
  modified_base 1..5797: mod_base = OTHER; note = Each t is m1f
  source 1..5797: mol_type = other RNA

SEQ ID NO: 8015 - RNA, 5797 nt, synthetic construct; identical to SEQ ID NO: 6418
  modified_base 1..5797: mod_base = OTHER; note = Each t is m1f
  source 1..5797: mol_type = other RNA

SEQ ID NO: 8016 - RNA, 5797 nt, synthetic construct; identical to SEQ ID NO: 6419
  modified_base 1..5797: mod_base = OTHER; note = Each t is m1f
  source 1..5797: mol_type = other RNA

SEQ ID NO: 8017 - RNA, 5824 nt, synthetic construct; identical to SEQ ID NO: 6420
  modified_base 1..5797: mod_base = OTHER; note = Each t is m1f
  source 1..5824: mol_type = other RNA

SEQ ID NO: 8018 - RNA, 5797 nt, synthetic construct; identical to SEQ ID NO: 6421
  modified_base 1..5797: mod_base = OTHER; note = Each t is m1f
  source 1..5797: mol_type = other RNA

SEQ ID NO: 8019 - RNA, 5797 nt, synthetic construct; identical to SEQ ID NO: 6422
  modified_base 1..5797: mod_base = OTHER; note = Each t is m1f
  source 1..5797: mol_type = other RNA

SEQ ID NO: 8020 - RNA, 5797 nt, synthetic construct; identical to SEQ ID NO: 6423
  modified_base 1..5797: mod_base = OTHER; note = Each t is m1f
  source 1..5797: mol_type = other RNA

SEQ ID NO: 8021 - RNA, 5797 nt, synthetic construct; identical to SEQ ID NO: 6424
  modified_base 1..5797: mod_base = OTHER; note = Each t is m1f
  source 1..5797: mol_type = other RNA

SEQ ID NO: 8022 - RNA, 5797 nt, synthetic construct; identical to SEQ ID NO: 6425
  modified_base 1..5797: mod_base = OTHER; note = Each t is m1f
  source 1..5797: mol_type = other RNA

SEQ ID NO: 8023 - RNA, 5797 nt, synthetic construct; identical to SEQ ID NO: 6426
  modified_base 1..5797: mod_base = OTHER; note = Each t is m1f
  source 1..5797: mol_type = other RNA

SEQ ID NO: 8024 - RNA, 5797 nt, synthetic construct; identical to SEQ ID NO: 6427
  modified_base 1..5797: mod_base = OTHER; note = Each t is m1f
  source 1..5797: mol_type = other RNA

SEQ ID NO: 8025 - RNA, 5797 nt, synthetic construct; identical to SEQ ID NO: 6428
  modified_base 1..5797: mod_base = OTHER; note = Each t is m1f
  source 1..5797: mol_type = other RNA

SEQ ID NO: 8026 - RNA, 5797 nt, synthetic construct; identical to SEQ ID NO: 6429
  modified_base 1..5797: mod_base = OTHER; note = Each t is m1f
  source 1..5797: mol_type = other RNA

SEQ ID NO: 8027 - RNA, 5797 nt, synthetic construct; identical to SEQ ID NO: 6430
  modified_base 1..5797: mod_base = OTHER; note = Each t is m1f
  source 1..5797: mol_type = other RNA

SEQ ID NO: 8028 - RNA, 5797 nt, synthetic construct; identical to SEQ ID NO: 6431
  modified_base 1..5797: mod_base = OTHER; note = Each t is m1f
  source 1..5797: mol_type = other RNA

SEQ ID NO: 8029 - RNA, 5797 nt, synthetic construct; identical to SEQ ID NO: 6432
  modified_base 1..5797: mod_base = OTHER; note = Each t is m1f
  source 1..5797: mol_type = other RNA

SEQ ID NO: 8030 - RNA, 5797 nt, synthetic construct; identical to SEQ ID NO: 6433
  modified_base 1..5797: mod_base = OTHER; note = Each t is m1f
  source 1..5797: mol_type = other RNA

SEQ ID NO: 8031 - RNA, 5797 nt, synthetic construct; identical to SEQ ID NO: 6434
  modified_base 1..5797: mod_base = OTHER; note = Each t is m1f
  source 1..5797: mol_type = other RNA

SEQ ID NO: 8032 - RNA, 5797 nt, synthetic construct; identical to SEQ ID NO: 6435
  modified_base 1..5797: mod_base = OTHER; note = Each t is m1f
  source 1..5797: mol_type = other RNA

SEQ ID NO: 8033 - RNA, 5797 nt, synthetic construct; identical to SEQ ID NO: 6436
  modified_base 1..5797: mod_base = OTHER; note = Each t is m1f
  source 1..5797: mol_type = other RNA

SEQ ID NO: 8034 - RNA, 5797 nt, synthetic construct; identical to SEQ ID NO: 6437
  modified_base 1..5797: mod_base = OTHER; note = Each t is m1f
  source 1..5797: mol_type = other RNA

SEQ ID NO: 8035 - RNA, 5797 nt, synthetic construct; identical to SEQ ID NO: 6438
  modified_base 1..5797: mod_base = OTHER; note = Each t is m1f
  source 1..5797: mol_type = other RNA

SEQ ID NO: 8036 - RNA, 5797 nt, synthetic construct; identical to SEQ ID NO: 6439
  modified_base 1..5797: mod_base = OTHER; note = Each t is m1f
  source 1..5797: mol_type = other RNA

SEQ ID NO: 8037 - RNA, 5797 nt, synthetic construct; identical to SEQ ID NO: 6440
  modified_base 1..5797: mod_base = OTHER; note = Each t is m1f
  source 1..5797: mol_type = other RNA

SEQ ID NO: 8038 - RNA, 5797 nt, synthetic construct; identical to SEQ ID NO: 6441
  modified_base 1..5797: mod_base = OTHER; note = Each t is m1f
  source 1..5797: mol_type = other RNA

SEQ ID NO: 8039 - RNA, 5797 nt, synthetic construct; identical to SEQ ID NO: 6442
  modified_base 1..5797: mod_base = OTHER; note = Each t is m1f
  source 1..5797: mol_type = other RNA

SEQ ID NO: 8040 - RNA, 5797 nt, synthetic construct; identical to SEQ ID NO: 6443
  modified_base 1..5797: mod_base = OTHER; note = Each t is m1f
  source 1..5797: mol_type = other RNA

SEQ ID NO: 8041 - RNA, 5797 nt, synthetic construct; identical to SEQ ID NO: 6444
  modified_base 1..5797: mod_base = OTHER; note = Each t is m1f
  source 1..5797: mol_type = other RNA

SEQ ID NO: 8042 - RNA, 5797 nt, synthetic construct; identical to SEQ ID NO: 6445
  modified_base 1..5797: mod_base = OTHER; note = Each t is m1f
  source 1..5797: mol_type = other RNA

SEQ ID NO: 8043 - RNA, 5797 nt, synthetic construct; identical to SEQ ID NO: 6446
  modified_base 1..5797: mod_base = OTHER; note = Each t is m1f
  source 1..5797: mol_type = other RNA

SEQ ID NO: 8044 - RNA, 5833 nt, synthetic construct; identical to SEQ ID NO: 6447
  modified_base 1..5797: mod_base = OTHER; note = Each t is m1f
  source 1..5833: mol_type = other RNA

SEQ ID NO: 8045 - RNA, 5797 nt, synthetic construct; identical to SEQ ID NO: 6448
  modified_base 1..5797: mod_base = OTHER; note = Each t is m1f
  source 1..5797: mol_type = other RNA

SEQ ID NO: 8046 - RNA, 5797 nt, synthetic construct; identical to SEQ ID NO: 6449
  modified_base 1..5797: mod_base = OTHER; note = Each t is m1f
  source 1..5797: mol_type = other RNA

SEQ ID NO: 8047 - RNA, 5797 nt, synthetic construct; identical to SEQ ID NO: 6450
  modified_base 1..5797: mod_base = OTHER; note = Each t is m1f
  source 1..5797: mol_type = other RNA

SEQ ID NO: 8048 - RNA, 5797 nt, synthetic construct; identical to SEQ ID NO: 6451
  modified_base 1..5797: mod_base = OTHER; note = Each t is m1f
  source 1..5797: mol_type = other RNA

SEQ ID NO: 8049 - RNA, 5797 nt, synthetic construct; identical to SEQ ID NO: 6452
  modified_base 1..5797: mod_base = OTHER; note = Each t is m1f
  source 1..5797: mol_type = other RNA

SEQ ID NO: 8050 - RNA, 5797 nt, synthetic construct; identical to SEQ ID NO: 6453
  modified_base 1..5797: mod_base = OTHER; note = Each t is m1f
  source 1..5797: mol_type = other RNA

SEQ ID NO: 8051 - RNA, 5797 nt, synthetic construct; identical to SEQ ID NO: 6454
  modified_base 1..5797: mod_base = OTHER; note = Each t is m1f
  source 1..5797: mol_type = other RNA

SEQ ID NO: 8052 - RNA, 5797 nt, synthetic construct; identical to SEQ ID NO: 6455
  modified_base 1..5797: mod_base = OTHER; note = Each t is m1f
  source 1..5797: mol_type = other RNA

SEQ ID NO: 8053 - RNA, 5797 nt, synthetic construct; identical to SEQ ID NO: 6456
  modified_base 1..5797: mod_base = OTHER; note = Each t is m1f
  source 1..5797: mol_type = other RNA

SEQ ID NO: 8054 - RNA, 5797 nt, synthetic construct; identical to SEQ ID NO: 6457
  modified_base 1..5797: mod_base = OTHER; note = Each t is m1f
  source 1..5797: mol_type = other RNA

SEQ ID NO: 8055 - RNA, 5797 nt, synthetic construct; identical to SEQ ID NO: 6458
  modified_base 1..5797: mod_base = OTHER; note = Each t is m1f
  source 1..5797: mol_type = other RNA

SEQ ID NO: 8056 - RNA, 5797 nt, synthetic construct; identical to SEQ ID NO: 6459
  modified_base 1..5797: mod_base = OTHER; note = Each t is m1f
  source 1..5797: mol_type = other RNA

SEQ ID NO: 8057 - RNA, 5797 nt, synthetic construct; identical to SEQ ID NO: 6460
  modified_base 1..5797: mod_base = OTHER; note = Each t is m1f
  source 1..5797: mol_type = other RNA

SEQ ID NO: 8058 - RNA, 5797 nt, synthetic construct; identical to SEQ ID NO: 6461
  modified_base 1..5797: mod_base = OTHER; note = Each t is m1f
  source 1..5797: mol_type = other RNA

SEQ ID NO: 8059 - RNA, 5797 nt, synthetic construct; identical to SEQ ID NO: 6462
  modified_base 1..5797: mod_base = OTHER; note = Each t is m1f
  source 1..5797: mol_type = other RNA

SEQ ID NO: 8060 - RNA, 5797 nt, synthetic construct; identical to SEQ ID NO: 6463
  modified_base 1..5797: mod_base = OTHER; note = Each t is m1f
  source 1..5797: mol_type = other RNA

SEQ ID NO: 8061 - RNA, 5797 nt, synthetic construct; identical to SEQ ID NO: 6464
  modified_base 1..5797: mod_base = OTHER; note = Each t is m1f
  source 1..5797: mol_type = other RNA

SEQ ID NO: 8062 - RNA, 5797 nt, synthetic construct; identical to SEQ ID NO: 6465
  modified_base 1..5797: mod_base = OTHER; note = Each t is m1f
  source 1..5797: mol_type = other RNA

SEQ ID NO: 8063 - RNA, 5797 nt, synthetic construct; identical to SEQ ID NO: 6466
  modified_base 1..5797: mod_base = OTHER; note = Each t is m1f
  source 1..5797: mol_type = other RNA

SEQ ID NO: 8064 - RNA, 5797 nt, synthetic construct; identical to SEQ ID NO: 6467
  modified_base 1..5797: mod_base = OTHER; note = Each t is m1f
  source 1..5797: mol_type = other RNA

SEQ ID NO: 8065 - RNA, 5797 nt, synthetic construct; identical to SEQ ID NO: 6468
  modified_base 1..5797: mod_base = OTHER; note = Each t is m1f
  source 1..5797: mol_type = other RNA

SEQ ID NO: 8066 - RNA, 5797 nt, synthetic construct; identical to SEQ ID NO: 6469
  modified_base 1..5797: mod_base = OTHER; note = Each t is m1f
  source 1..5797: mol_type = other RNA

SEQ ID NO: 8067 - RNA, 5797 nt, synthetic construct; identical to SEQ ID NO: 6470
  modified_base 1..5797: mod_base = OTHER; note = Each t is m1f
  source 1..5797: mol_type = other RNA

SEQ ID NO: 8068 - RNA, 5797 nt, synthetic construct; identical to SEQ ID NO: 6471
  modified_base 1..5797: mod_base = OTHER; note = Each t is m1f
  source 1..5797: mol_type = other RNA

SEQ ID NO: 8069 - RNA, 5797 nt, synthetic construct; identical to SEQ ID NO: 6472
  modified_base 1..5797: mod_base = OTHER; note = Each t is m1f
  source 1..5797: mol_type = other RNA

SEQ ID NO: 8070 - RNA, 5797 nt, synthetic construct; identical to SEQ ID NO: 6473
  modified_base 1..5797: mod_base = OTHER; note = Each t is m1f
  source 1..5797: mol_type = other RNA

SEQ ID NO: 8071 - RNA, 5797 nt, synthetic construct; identical to SEQ ID NO: 6474
  modified_base 1..5797: mod_base = OTHER; note = Each t is m1f
  source 1..5797: mol_type = other RNA

SEQ ID NO: 8072 - RNA, 5797 nt, synthetic construct; identical to SEQ ID NO: 6475
  modified_base 1..5797: mod_base = OTHER; note = Each t is m1f
  source 1..5797: mol_type = other RNA

SEQ ID NO: 8073 - RNA, 5797 nt, synthetic construct; identical to SEQ ID NO: 6476
  modified_base 1..5797: mod_base = OTHER; note = Each t is m1f
  source 1..5797: mol_type = other RNA

SEQ ID NO: 8074 - RNA, 5797 nt, synthetic construct; identical to SEQ ID NO: 6477
  modified_base 1..5797: mod_base = OTHER; note = Each t is m1f
  source 1..5797: mol_type = other RNA

SEQ ID NO: 8075 - RNA, 5797 nt, synthetic construct; identical to SEQ ID NO: 6478
  modified_base 1..5797: mod_base = OTHER; note = Each t is m1f
  source 1..5797: mol_type = other RNA

SEQ ID NO: 8076 - RNA, 5797 nt, synthetic construct; identical to SEQ ID NO: 6479
  modified_base 1..5797: mod_base = OTHER; note = Each t is m1f
  source 1..5797: mol_type = other RNA

SEQ ID NO: 8077 - RNA, 5797 nt, synthetic construct; identical to SEQ ID NO: 6480
  modified_base 1..5797: mod_base = OTHER; note = Each t is m1f
  source 1..5797: mol_type = other RNA

SEQ ID NO: 8078 - RNA, 5797 nt, synthetic construct; identical to SEQ ID NO: 6481
  modified_base 1..5797: mod_base = OTHER; note = Each t is m1f
  source 1..5797: mol_type = other RNA

SEQ ID NO: 8079 - RNA, 5797 nt, synthetic construct; identical to SEQ ID NO: 6482
  modified_base 1..5797: mod_base = OTHER; note = Each t is m1f
  source 1..5797: mol_type = other RNA

SEQ ID NO: 8080 - RNA, 5797 nt, synthetic construct; identical to SEQ ID NO: 6483
  modified_base 1..5797: mod_base = OTHER; note = Each t is m1f
  source 1..5797: mol_type = other RNA

SEQ ID NO: 8081 - RNA, 5797 nt, synthetic construct; identical to SEQ ID NO: 6484
  modified_base 1..5797: mod_base = OTHER; note = Each t is m1f
  source 1..5797: mol_type = other RNA

SEQ ID NO: 8082 - RNA, 5797 nt, synthetic construct; identical to SEQ ID NO: 6485
  modified_base 1..5797: mod_base = OTHER; note = Each t is m1f
  source 1..5797: mol_type = other RNA

SEQ ID NO: 8083 - RNA, 5797 nt, synthetic construct; identical to SEQ ID NO: 6486
  modified_base 1..5797: mod_base = OTHER; note = Each t is m1f
  source 1..5797: mol_type = other RNA

SEQ ID NO: 8084 - RNA, 5797 nt, synthetic construct; identical to SEQ ID NO: 6487
  modified_base 1..5797: mod_base = OTHER; note = Each t is m1f
  source 1..5797: mol_type = other RNA

SEQ ID NO: 8085 - RNA, 5797 nt, synthetic construct; identical to SEQ ID NO: 6488
  modified_base 1..5797: mod_base = OTHER; note = Each t is m1f
  source 1..5797: mol_type = other RNA

SEQ ID NO: 8086 - RNA, 5797 nt, synthetic construct; identical to SEQ ID NO: 6489
  modified_base 1..5797: mod_base = OTHER; note = Each t is m1f
  source 1..5797: mol_type = other RNA

SEQ ID NO: 8087 - RNA, 5797 nt, synthetic construct; identical to SEQ ID NO: 6490
  modified_base 1..5797: mod_base = OTHER; note = Each t is m1f
  source 1..5797: mol_type = other RNA

SEQ ID NO: 8088 - RNA, 5797 nt, synthetic construct; identical to SEQ ID NO: 6491
  modified_base 1..5797: mod_base = OTHER; note = Each t is m1f
  source 1..5797: mol_type = other RNA

SEQ ID NO: 8089 - RNA, 5797 nt, synthetic construct; identical to SEQ ID NO: 6492
  modified_base 1..5797: mod_base = OTHER; note = Each t is m1f
  source 1..5797: mol_type = other RNA

SEQ ID NO: 8090 - RNA, 5797 nt, synthetic construct; identical to SEQ ID NO: 6493
  modified_base 1..5797: mod_base = OTHER; note = Each t is m1f
  source 1..5797: mol_type = other RNA

SEQ ID NO: 8091 - RNA, 5797 nt, synthetic construct; identical to SEQ ID NO: 6494
  modified_base 1..5797: mod_base = OTHER; note = Each t is m1f
  source 1..5797: mol_type = other RNA

SEQ ID NO: 8092 - RNA, 5797 nt, synthetic construct; identical to SEQ ID NO: 6495
  modified_base 1..5797: mod_base = OTHER; note = Each t is m1f
  source 1..5797: mol_type = other RNA

SEQ ID NO: 8093 - RNA, 5797 nt, synthetic construct; identical to SEQ ID NO: 6496
  modified_base 1..5797: mod_base = OTHER; note = Each t is m1f
  source 1..5797: mol_type = other RNA

SEQ ID NO: 8094 - RNA, 5797 nt, synthetic construct; identical to SEQ ID NO: 6497
  modified_base 1..5797: mod_base = OTHER; note = Each t is m1f
  source 1..5797: mol_type = other RNA

SEQ ID NO: 8095 - RNA, 5797 nt, synthetic construct; identical to SEQ ID NO: 6498
  modified_base 1..5797: mod_base = OTHER; note = Each t is m1f
  source 1..5797: mol_type = other RNA

SEQ ID NO: 8096 - RNA, 5797 nt, synthetic construct; identical to SEQ ID NO: 6499
  modified_base 1..5797: mod_base = OTHER; note = Each t is m1f
  source 1..5797: mol_type = other RNA

SEQ ID NO: 8097 - RNA, 5797 nt, synthetic construct; identical to SEQ ID NO: 6500
  modified_base 1..5797: mod_base = OTHER; note = Each t is m1f
  source 1..5797: mol_type = other RNA

SEQ ID NO: 8098 - RNA, 5797 nt, synthetic construct; identical to SEQ ID NO: 6501
  modified_base 1..5797: mod_base = OTHER; note = Each t is m1f
  source 1..5797: mol_type = other RNA

SEQ ID NO: 8099 - RNA, 5797 nt, synthetic construct; identical to SEQ ID NO: 6502
  modified_base 1..5797: mod_base = OTHER; note = Each t is m1f
  source 1..5797: mol_type = other RNA

SEQ ID NO: 8100 - RNA, 5797 nt, synthetic construct; identical to SEQ ID NO: 6503
  modified_base 1..5797: mod_base = OTHER; note = Each t is m1f
  source 1..5797: mol_type = other RNA

SEQ ID NO: 8101 - RNA, 5797 nt, synthetic construct; identical to SEQ ID NO: 6504
  modified_base 1..5797: mod_base = OTHER; note = Each t is m1f
  source 1..5797: mol_type = other RNA

SEQ ID NO: 8102 - RNA, 5797 nt, synthetic construct; identical to SEQ ID NO: 6505
  modified_base 1..5797: mod_base = OTHER; note = Each t is m1f
  source 1..5797: mol_type = other RNA

SEQ ID NO: 8103 - RNA, 5797 nt, synthetic construct; identical to SEQ ID NO: 6506
  modified_base 1..5797: mod_base = OTHER; note = Each t is m1f
  source 1..5797: mol_type = other RNA

SEQ ID NO: 8104 - RNA, 5797 nt, synthetic construct; identical to SEQ ID NO: 6507
  modified_base 1..5797: mod_base = OTHER; note = Each t is m1f
  source 1..5797: mol_type = other RNA

SEQ ID NO: 8105 - RNA, 5794 nt, synthetic construct; identical to SEQ ID NO: 6508
  modified_base 1..5794: mod_base = OTHER; note = Each t is m1f
  source 1..5794: mol_type = other RNA

SEQ ID NO: 8106 - RNA, 5797 nt, synthetic construct; identical to SEQ ID NO: 6509
  modified_base 1..5797: mod_base = OTHER; note = Each t is m1f
  source 1..5797: mol_type = other RNA

SEQ ID NO: 8107 - RNA, 5797 nt, synthetic construct; identical to SEQ ID NO: 6510
  modified_base 1..5797: mod_base = OTHER; note = Each t is m1f
  source 1..5797: mol_type = other RNA

SEQ ID NO: 8108 - RNA, 5797 nt, synthetic construct; identical to SEQ ID NO: 6511
  modified_base 1..5797: mod_base = OTHER; note = Each t is m1f
  source 1..5797: mol_type = other RNA

SEQ ID NO: 8109 - RNA, 5794 nt, synthetic construct; identical to SEQ ID NO: 6512
  modified_base 1..5794: mod_base = OTHER; note = Each t is m1f
  source 1..5794: mol_type = other RNA

SEQ ID NO: 8110 - RNA, 5797 nt, synthetic construct; identical to SEQ ID NO: 6513
  modified_base 1..5797: mod_base = OTHER; note = Each t is m1f
  source 1..5797: mol_type = other RNA

SEQ ID NO: 8111 - RNA, 5797 nt, synthetic construct; identical to SEQ ID NO: 6514
  modified_base 1..5797: mod_base = OTHER; note = Each t is m1f
  source 1..5797: mol_type = other RNA

SEQ ID NO: 8112 - RNA, 5797 nt, synthetic construct; identical to SEQ ID NO: 6515
  modified_base 1..5797: mod_base = OTHER; note = Each t is m1f
  source 1..5797: mol_type = other RNA

SEQ ID NO: 8113 - RNA, 5797 nt, synthetic construct; identical to SEQ ID NO: 6516
  modified_base 1..5797: mod_base = OTHER; note = Each t is m1f
  source 1..5797: mol_type = other RNA

SEQ ID NO: 8114 - RNA, 5797 nt, synthetic construct; identical to SEQ ID NO: 6517
  modified_base 1..5797: mod_base = OTHER; note = Each t is m1f
  source 1..5797: mol_type = other RNA

SEQ ID NO: 8115 - RNA, 5797 nt, synthetic construct; identical to SEQ ID NO: 6518
  modified_base 1..5797: mod_base = OTHER; note = Each t is m1f
  source 1..5797: mol_type = other RNA

SEQ ID NO: 8116 - RNA, 5797 nt, synthetic construct; identical to SEQ ID NO: 6519
  modified_base 1..5797: mod_base = OTHER; note = Each t is m1f
  source 1..5797: mol_type = other RNA

SEQ ID NO: 8117 - RNA, 5797 nt, synthetic construct; identical to SEQ ID NO: 6520
  modified_base 1..5797: mod_base = OTHER; note = Each t is m1f
  source 1..5797: mol_type = other RNA

SEQ ID NO: 8118 - RNA, 5797 nt, synthetic construct; identical to SEQ ID NO: 6521
  modified_base 1..5797: mod_base = OTHER; note = Each t is m1f
  source 1..5797: mol_type = other RNA

SEQ ID NO: 8119 - RNA, 5797 nt, synthetic construct; identical to SEQ ID NO: 6522
  modified_base 1..5797: mod_base = OTHER; note = Each t is m1f
  source 1..5797: mol_type = other RNA

SEQ ID NO: 8120 - RNA, 5797 nt, synthetic construct; identical to SEQ ID NO: 6523
  modified_base 1..5797: mod_base = OTHER; note = Each t is m1f
  source 1..5797: mol_type = other RNA

SEQ ID NO: 8121 - RNA, 5797 nt, synthetic construct; identical to SEQ ID NO: 6524
  modified_base 1..5797: mod_base = OTHER; note = Each t is m1f
  source 1..5797: mol_type = other RNA

SEQ ID NO: 8122 - RNA, 5797 nt, synthetic construct; identical to SEQ ID NO: 6525
  modified_base 1..5797: mod_base = OTHER; note = Each t is m1f
  source 1..5797: mol_type = other RNA

SEQ ID NO: 8123 - RNA, 5797 nt, synthetic construct; identical to SEQ ID NO: 6526
  modified_base 1..5797: mod_base = OTHER; note = Each t is m1f
  source 1..5797: mol_type = other RNA

SEQ ID NO: 8124 - RNA, 5794 nt, synthetic construct; identical to SEQ ID NO: 6527
  modified_base 1..5794: mod_base = OTHER; note = Each t is m1f
  source 1..5794: mol_type = other RNA

SEQ ID NO: 8125 - RNA, 5797 nt, synthetic construct; identical to SEQ ID NO: 6528
  modified_base 1..5797: mod_base = OTHER; note = Each t is m1f
  source 1..5797: mol_type = other RNA

SEQ ID NO: 8126 - RNA, 5797 nt, synthetic construct; identical to SEQ ID NO: 6529
  modified_base 1..5797: mod_base = OTHER; note = Each t is m1f
  source 1..5797: mol_type = other RNA

SEQ ID NO: 8127 - RNA, 5797 nt, synthetic construct; identical to SEQ ID NO: 6530
  modified_base 1..5797: mod_base = OTHER; note = Each t is m1f
  source 1..5797: mol_type = other RNA

SEQ ID NO: 8128 - RNA, 5797 nt, synthetic construct; identical to SEQ ID NO: 6531
  modified_base 1..5797: mod_base = OTHER; note = Each t is m1f
  source 1..5797: mol_type = other RNA

SEQ ID NO: 8129 - RNA, 5797 nt, synthetic construct; identical to SEQ ID NO: 6532
  modified_base 1..5797: mod_base = OTHER; note = Each t is m1f
  source 1..5797: mol_type = other RNA

SEQ ID NO: 8130 - RNA, 5797 nt, synthetic construct; identical to SEQ ID NO: 6533
  modified_base 1..5797: mod_base = OTHER; note = Each t is m1f
  source 1..5797: mol_type = other RNA

SEQ ID NO: 8131 - RNA, 5797 nt, synthetic construct; identical to SEQ ID NO: 6534
  modified_base 1..5797: mod_base = OTHER; note = Each t is m1f
  source 1..5797: mol_type = other RNA

SEQ ID NO: 8132 - RNA, 5797 nt, synthetic construct; identical to SEQ ID NO: 6535
  modified_base 1..5797: mod_base = OTHER; note = Each t is m1f
  source 1..5797: mol_type = other RNA

SEQ ID NO: 8133 - RNA, 5797 nt, synthetic construct; identical to SEQ ID NO: 6536
  modified_base 1..5797: mod_base = OTHER; note = Each t is m1f
  source 1..5797: mol_type = other RNA

SEQ ID NO: 8134 - RNA, 5797 nt, synthetic construct; identical to SEQ ID NO: 6537
  modified_base 1..5797: mod_base = OTHER; note = Each t is m1f
  source 1..5797: mol_type = other RNA

SEQ ID NO: 8135 - RNA, 5797 nt, synthetic construct; identical to SEQ ID NO: 6538
  modified_base 1..5797: mod_base = OTHER; note = Each t is m1f
  source 1..5797: mol_type = other RNA

SEQ ID NO: 8136 - RNA, 5797 nt, synthetic construct; identical to SEQ ID NO: 6539
  modified_base 1..5797: mod_base = OTHER; note = Each t is m1f
  source 1..5797: mol_type = other RNA

SEQ ID NO: 8137 - RNA, 5797 nt, synthetic construct; identical to SEQ ID NO: 6540
  modified_base 1..5797: mod_base = OTHER; note = Each t is m1f
  source 1..5797: mol_type = other RNA

SEQ ID NO: 8138 - RNA, 5797 nt, synthetic construct; identical to SEQ ID NO: 6541
  modified_base 1..5797: mod_base = OTHER; note = Each t is m1f
  source 1..5797: mol_type = other RNA

SEQ ID NO: 8139 - RNA, 5797 nt, synthetic construct; identical to SEQ ID NO: 6542
  modified_base 1..5797: mod_base = OTHER; note = Each t is m1f
  source 1..5797: mol_type = other RNA

SEQ ID NO: 8140 - RNA, 5803 nt, synthetic construct; identical to SEQ ID NO: 6543
  modified_base 1..5797: mod_base = OTHER; note = Each t is m1f
  source 1..5803: mol_type = other RNA

SEQ ID NO: 8141 - RNA, 5797 nt, synthetic construct; identical to SEQ ID NO: 6544
  modified_base 1..5797: mod_base = OTHER; note = Each t is m1f
  source 1..5797: mol_type = other RNA

SEQ ID NO: 8142 - RNA, 5797 nt, synthetic construct; identical to SEQ ID NO: 6545
  modified_base 1..5797: mod_base = OTHER; note = Each t is m1f
  source 1..5797: mol_type = other RNA

SEQ ID NO: 8143 - RNA, 5797 nt, synthetic construct; identical to SEQ ID NO: 6546
  modified_base 1..5797: mod_base = OTHER; note = Each t is m1f
  source 1..5797: mol_type = other RNA

SEQ ID NO: 8144 - RNA, 5797 nt, synthetic construct; identical to SEQ ID NO: 6547
  modified_base 1..5797: mod_base = OTHER; note = Each t is m1f
  source 1..5797: mol_type = other RNA

SEQ ID NO: 8145 - RNA, 5797 nt, synthetic construct; identical to SEQ ID NO: 6548
  modified_base 1..5797: mod_base = OTHER; note = Each t is m1f
  source 1..5797: mol_type = other RNA

SEQ ID NO: 8146 - RNA, 5797 nt, synthetic construct; identical to SEQ ID NO: 6549
  modified_base 1..5797: mod_base = OTHER; note = Each t is m1f
  source 1..5797: mol_type = other RNA

SEQ ID NO: 8147 - RNA, 5797 nt, synthetic construct; identical to SEQ ID NO: 6550
  modified_base 1..5797: mod_base = OTHER; note = Each t is m1f
  source 1..5797: mol_type = other RNA

SEQ ID NO: 8148 - RNA, 5797 nt, synthetic construct; identical to SEQ ID NO: 6551
  modified_base 1..5797: mod_base = OTHER; note = Each t is m1f
  source 1..5797: mol_type = other RNA

SEQ ID NO: 8149 - RNA, 5797 nt, synthetic construct; identical to SEQ ID NO: 6552
  modified_base 1..5797: mod_base = OTHER; note = Each t is m1f
  source 1..5797: mol_type = other RNA

SEQ ID NO: 8150 - RNA, 5797 nt, synthetic construct; identical to SEQ ID NO: 6553
  modified_base 1..5797: mod_base = OTHER; note = Each t is m1f
  source 1..5797: mol_type = other RNA

SEQ ID NO: 8151 - RNA, 5797 nt, synthetic construct; identical to SEQ ID NO: 6554
  modified_base 1..5797: mod_base = OTHER; note = Each t is m1f
  source 1..5797: mol_type = other RNA

SEQ ID NO: 8152 - RNA, 5797 nt, synthetic construct; identical to SEQ ID NO: 6555
  modified_base 1..5797: mod_base = OTHER; note = Each t is m1f
  source 1..5797: mol_type = other RNA

SEQ ID NO: 8153 - RNA, 5797 nt, synthetic construct; identical to SEQ ID NO: 6556
  modified_base 1..5797: mod_base = OTHER; note = Each t is m1f
  source 1..5797: mol_type = other RNA

SEQ ID NO: 8154 - RNA, 5797 nt, synthetic construct; identical to SEQ ID NO: 6557
  modified_base 1..5797: mod_base = OTHER; note = Each t is m1f
  source 1..5797: mol_type = other RNA

SEQ ID NO: 8155 - RNA, 5797 nt, synthetic construct; identical to SEQ ID NO: 6558
  modified_base 1..5797: mod_base = OTHER; note = Each t is m1f
  source 1..5797: mol_type = other RNA

SEQ ID NO: 8156 - RNA, 5797 nt, synthetic construct; identical to SEQ ID NO: 6559
  modified_base 1..5797: mod_base = OTHER; note = Each t is m1f
  source 1..5797: mol_type = other RNA

SEQ ID NO: 8157 - RNA, 5797 nt, synthetic construct; identical to SEQ ID NO: 6560
  modified_base 1..5797: mod_base = OTHER; note = Each t is m1f
  source 1..5797: mol_type = other RNA

SEQ ID NO: 8158 - RNA, 5797 nt, synthetic construct; identical to SEQ ID NO: 6561
  modified_base 1..5797: mod_base = OTHER; note = Each t is m1f
  source 1..5797: mol_type = other RNA

SEQ ID NO: 8159 - RNA, 5797 nt, synthetic construct; identical to SEQ ID NO: 6562
  modified_base 1..5797: mod_base = OTHER; note = Each t is m1f
  source 1..5797: mol_type = other RNA

SEQ ID NO: 8160 - RNA, 5797 nt, synthetic construct; identical to SEQ ID NO: 6563
  modified_base 1..5797: mod_base = OTHER; note = Each t is m1f
  source 1..5797: mol_type = other RNA

SEQ ID NO: 8161 - RNA, 5797 nt, synthetic construct; identical to SEQ ID NO: 6564
  modified_base 1..5797: mod_base = OTHER; note = Each t is m1f
  source 1..5797: mol_type = other RNA

SEQ ID NO: 8162 - RNA, 5797 nt, synthetic construct; identical to SEQ ID NO: 6565
  modified_base 1..5797: mod_base = OTHER; note = Each t is m1f
  source 1..5797: mol_type = other RNA

SEQ ID NO: 8163 - RNA, 5797 nt, synthetic construct; identical to SEQ ID NO: 6566
  modified_base 1..5797: mod_base = OTHER; note = Each t is m1f
  source 1..5797: mol_type = other RNA

SEQ ID NO: 8164 - RNA, 5797 nt, synthetic construct; identical to SEQ ID NO: 6567
  modified_base 1..5797: mod_base = OTHER; note = Each t is m1f
  source 1..5797: mol_type = other RNA

SEQ ID NO: 8165 - RNA, 5797 nt, synthetic construct; identical to SEQ ID NO: 6568
  modified_base 1..5797: mod_base = OTHER; note = Each t is m1f
  source 1..5797: mol_type = other RNA

SEQ ID NO: 8166 - RNA, 5797 nt, synthetic construct; identical to SEQ ID NO: 6569
  modified_base 1..5797: mod_base = OTHER; note = Each t is m1f
  source 1..5797: mol_type = other RNA

SEQ ID NO: 8167 - RNA, 5797 nt, synthetic construct; identical to SEQ ID NO: 6570
  modified_base 1..5797: mod_base = OTHER; note = Each t is m1f
  source 1..5797: mol_type = other RNA

SEQ ID NO: 8168 - RNA, 5797 nt, synthetic construct; identical to SEQ ID NO: 6571
  modified_base 1..5797: mod_base = OTHER; note = Each t is m1f
  source 1..5797: mol_type = other RNA

SEQ ID NO: 8169 - RNA, 5797 nt, synthetic construct; identical to SEQ ID NO: 6572
  modified_base 1..5797: mod_base = OTHER; note = Each t is m1f
  source 1..5797: mol_type = other RNA

SEQ ID NO: 8170 - RNA, 5797 nt, synthetic construct; identical to SEQ ID NO: 6573
  modified_base 1..5797: mod_base = OTHER; note = Each t is m1f
  source 1..5797: mol_type = other RNA

SEQ ID NO: 8171 - RNA, 5797 nt, synthetic construct; identical to SEQ ID NO: 6574
  modified_base 1..5797: mod_base = OTHER; note = Each t is m1f
  source 1..5797: mol_type = other RNA

SEQ ID NO: 8172 - RNA, 5797 nt, synthetic construct; identical to SEQ ID NO: 6575
  modified_base 1..5797: mod_base = OTHER; note = Each t is m1f
  source 1..5797: mol_type = other RNA

SEQ ID NO: 8173 - RNA, 5797 nt, synthetic construct; identical to SEQ ID NO: 6576
  modified_base 1..5797: mod_base = OTHER; note = Each t is m1f
  source 1..5797: mol_type = other RNA

SEQ ID NO: 8174 - RNA, 5797 nt, synthetic construct; identical to SEQ ID NO: 6577
  modified_base 1..5797: mod_base = OTHER; note = Each t is m1f
  source 1..5797: mol_type = other RNA

SEQ ID NO: 8175 - RNA, 5797 nt, synthetic construct; identical to SEQ ID NO: 6578
  modified_base 1..5797: mod_base = OTHER; note = Each t is m1f
  source 1..5797: mol_type = other RNA

SEQ ID NO: 8176 - RNA, 5797 nt, synthetic construct; identical to SEQ ID NO: 6579
  modified_base 1..5797: mod_base = OTHER; note = Each t is m1f
  source 1..5797: mol_type = other RNA

SEQ ID NO: 8177 - RNA, 5797 nt, synthetic construct; identical to SEQ ID NO: 6580
  modified_base 1..5797: mod_base = OTHER; note = Each t is m1f
  source 1..5797: mol_type = other RNA

SEQ ID NO: 8178 - RNA, 5797 nt, synthetic construct; identical to SEQ ID NO: 6581
  modified_base 1..5797: mod_base = OTHER; note = Each t is m1f
  source 1..5797: mol_type = other RNA

SEQ ID NO: 8179 - RNA, 5797 nt, synthetic construct; identical to SEQ ID NO: 6582
  modified_base 1..5797: mod_base = OTHER; note = Each t is m1f
  source 1..5797: mol_type = other RNA

SEQ ID NO: 8180 - RNA, 5797 nt, synthetic construct; identical to SEQ ID NO: 6583
  modified_base 1..5797: mod_base = OTHER; note = Each t is m1f
  source 1..5797: mol_type = other RNA

SEQ ID NO: 8181 - RNA, 5797 nt, synthetic construct; identical to SEQ ID NO: 6584
  modified_base 1..5797: mod_base = OTHER; note = Each t is m1f
  source 1..5797: mol_type = other RNA

SEQ ID NO: 8182 - RNA, 5797 nt, synthetic construct; identical to SEQ ID NO: 6585
  modified_base 1..5797: mod_base = OTHER; note = Each t is m1f
  source 1..5797: mol_type = other RNA

SEQ ID NO: 8183 - RNA, 5797 nt, synthetic construct; identical to SEQ ID NO: 6586
  modified_base 1..5797: mod_base = OTHER; note = Each t is m1f
  source 1..5797: mol_type = other RNA

SEQ ID NO: 8184 - RNA, 5797 nt, synthetic construct; identical to SEQ ID NO: 6587
  modified_base 1..5797: mod_base = OTHER; note = Each t is m1f
  source 1..5797: mol_type = other RNA

SEQ ID NO: 8185 - RNA, 5797 nt, synthetic construct; identical to SEQ ID NO: 6588
  modified_base 1..5797: mod_base = OTHER; note = Each t is m1f
  source 1..5797: mol_type = other RNA

SEQ ID NO: 8186 - RNA, 5797 nt, synthetic construct; identical to SEQ ID NO: 6589
  modified_base 1..5797: mod_base = OTHER; note = Each t is m1f
  source 1..5797: mol_type = other RNA

SEQ ID NO: 8187 - RNA, 5797 nt, synthetic construct; identical to SEQ ID NO: 6590
  modified_base 1..5797: mod_base = OTHER; note = Each t is m1f
  source 1..5797: mol_type = other RNA

SEQ ID NO: 8188 - RNA, 5830 nt, synthetic construct; identical to SEQ ID NO: 6591
  modified_base 1..5797: mod_base = OTHER; note = Each t is m1f
  source 1..5830: mol_type = other RNA

SEQ ID NO: 8189 - RNA, 5797 nt, synthetic construct; identical to SEQ ID NO: 6592
  modified_base 1..5797: mod_base = OTHER; note = Each t is m1f
  source 1..5797: mol_type = other RNA

SEQ ID NO: 8190 - RNA, 5797 nt, synthetic construct; identical to SEQ ID NO: 6593
  modified_base 1..5797: mod_base = OTHER; note = Each t is m1f
  source 1..5797: mol_type = other RNA

SEQ ID NO: 8191 - RNA, 5797 nt, synthetic construct; identical to SEQ ID NO: 6594
  modified_base 1..5797: mod_base = OTHER; note = Each t is m1f
  source 1..5797: mol_type = other RNA

SEQ ID NO: 8192 - RNA, 5797 nt, synthetic construct; identical to SEQ ID NO: 6595
  modified_base 1..5797: mod_base = OTHER; note = Each t is m1f
  source 1..5797: mol_type = other RNA

SEQ ID NO: 8193 - RNA, 5797 nt, synthetic construct; identical to SEQ ID NO: 6596
  modified_base 1..5797: mod_base = OTHER; note = Each t is m1f
  source 1..5797: mol_type = other RNA

SEQ ID NO: 8194 - RNA, 5797 nt, synthetic construct; identical to SEQ ID NO: 6597
  modified_base 1..5797: mod_base = OTHER; note = Each t is m1f
  source 1..5797: mol_type = other RNA

SEQ ID NO: 8195 - RNA, 5797 nt, synthetic construct; identical to SEQ ID NO: 6598
  modified_base 1..5797: mod_base = OTHER; note = Each t is m1f
  source 1..5797: mol_type = other RNA

SEQ ID NO: 8196 - RNA, 5797 nt, synthetic construct; identical to SEQ ID NO: 6599
  modified_base 1..5797: mod_base = OTHER; note = Each t is m1f
  source 1..5797: mol_type = other RNA

SEQ ID NO: 8197 - RNA, 5797 nt, synthetic construct; identical to SEQ ID NO: 6600
  modified_base 1..5797: mod_base = OTHER; note = Each t is m1f
  source 1..5797: mol_type = other RNA

SEQ ID NO: 8198 - RNA, 5797 nt, synthetic construct; identical to SEQ ID NO: 6601
  modified_base 1..5797: mod_base = OTHER; note = Each t is m1f
  source 1..5797: mol_type = other RNA

SEQ ID NO: 8199 - RNA, 5797 nt, synthetic construct; identical to SEQ ID NO: 6602
  modified_base 1..5797: mod_base = OTHER; note = Each t is m1f
  source 1..5797: mol_type = other RNA

SEQ ID NO: 8200 - RNA, 5797 nt, synthetic construct; identical to SEQ ID NO: 6603
  modified_base 1..5797: mod_base = OTHER; note = Each t is m1f
  source 1..5797: mol_type = other RNA

SEQ ID NO: 8201 - RNA, 5797 nt, synthetic construct; identical to SEQ ID NO: 6604
  modified_base 1..5797: mod_base = OTHER; note = Each t is m1f
  source 1..5797: mol_type = other RNA

SEQ ID NO: 8202 - RNA, 5797 nt, synthetic construct; identical to SEQ ID NO: 6605
  modified_base 1..5797: mod_base = OTHER; note = Each t is m1f
  source 1..5797: mol_type = other RNA

SEQ ID NO: 8203 - RNA, 5797 nt, synthetic construct; identical to SEQ ID NO: 6606
  modified_base 1..5797: mod_base = OTHER; note = Each t is m1f
  source 1..5797: mol_type = other RNA

SEQ ID NO: 8204 - RNA, 5797 nt, synthetic construct; identical to SEQ ID NO: 6607
  modified_base 1..5797: mod_base = OTHER; note = Each t is m1f
  source 1..5797: mol_type = other RNA

SEQ ID NO: 8205 - RNA, 5797 nt, synthetic construct; identical to SEQ ID NO: 6608
  modified_base 1..5797: mod_base = OTHER; note = Each t is m1f
  source 1..5797: mol_type = other RNA

SEQ ID NO: 8206 - RNA, 5797 nt, synthetic construct; identical to SEQ ID NO: 6609
  modified_base 1..5797: mod_base = OTHER; note = Each t is m1f
  source 1..5797: mol_type = other RNA

SEQ ID NO: 8207 - RNA, 5806 nt, synthetic construct; identical to SEQ ID NO: 6610
  modified_base 1..5797: mod_base = OTHER; note = Each t is m1f
  source 1..5806: mol_type = other RNA

SEQ ID NO: 8208 - RNA, 5797 nt, synthetic construct; identical to SEQ ID NO: 6611
  modified_base 1..5797: mod_base = OTHER; note = Each t is m1f
  source 1..5797: mol_type = other RNA

SEQ ID NO: 8209 - RNA, 5797 nt, synthetic construct; identical to SEQ ID NO: 6612
  modified_base 1..5797: mod_base = OTHER; note = Each t is m1f
  source 1..5797: mol_type = other RNA

SEQ ID NO: 8210 - RNA, 5797 nt, synthetic construct; identical to SEQ ID NO: 6613
  modified_base 1..5797: mod_base = OTHER; note = Each t is m1f
  source 1..5797: mol_type = other RNA

SEQ ID NO: 8211 - RNA, 5797 nt, synthetic construct; identical to SEQ ID NO: 6614
  modified_base 1..5797: mod_base = OTHER; note = Each t is m1f
  source 1..5797: mol_type = other RNA

SEQ ID NO: 8212 - RNA, 5797 nt, synthetic construct; identical to SEQ ID NO: 6615
  modified_base 1..5797: mod_base = OTHER; note = Each t is m1f
  source 1..5797: mol_type = other RNA

SEQ ID NO: 8213 - RNA, 5797 nt, synthetic construct; identical to SEQ ID NO: 6616
  modified_base 1..5797: mod_base = OTHER; note = Each t is m1f
  source 1..5797: mol_type = other RNA

SEQ ID NO: 8214 - RNA, 5797 nt, synthetic construct; identical to SEQ ID NO: 6617
  modified_base 1..5797: mod_base = OTHER; note = Each t is m1f
  source 1..5797: mol_type = other RNA

SEQ ID NO: 8215 - RNA, 5797 nt, synthetic construct; identical to SEQ ID NO: 6618
  modified_base 1..5797: mod_base = OTHER; note = Each t is m1f
  source 1..5797: mol_type = other RNA

SEQ ID NO: 8216 - RNA, 5797 nt, synthetic construct; identical to SEQ ID NO: 6619
  modified_base 1..5797: mod_base = OTHER; note = Each t is m1f
  source 1..5797: mol_type = other RNA

SEQ ID NO: 8217 - RNA, 5797 nt, synthetic construct; identical to SEQ ID NO: 6620
  modified_base 1..5797: mod_base = OTHER; note = Each t is m1f
  source 1..5797: mol_type = other RNA

SEQ ID NO: 8218 - RNA, 5797 nt, synthetic construct; identical to SEQ ID NO: 6621
  modified_base 1..5797: mod_base = OTHER; note = Each t is m1f
  source 1..5797: mol_type = other RNA

SEQ ID NO: 8219 - RNA, 5797 nt, synthetic construct; identical to SEQ ID NO: 6622
  modified_base 1..5797: mod_base = OTHER; note = Each t is m1f
  source 1..5797: mol_type = other RNA

SEQ ID NO: 8220 - RNA, 5797 nt, synthetic construct; identical to SEQ ID NO: 6623
  modified_base 1..5797: mod_base = OTHER; note = Each t is m1f
  source 1..5797: mol_type = other RNA

SEQ ID NO: 8221 - RNA, 5797 nt, synthetic construct; identical to SEQ ID NO: 6624
  modified_base 1..5797: mod_base = OTHER; note = Each t is m1f
  source 1..5797: mol_type = other RNA

SEQ ID NO: 8222 - RNA, 5794 nt, synthetic construct; identical to SEQ ID NO: 6625
  modified_base 1..5794: mod_base = OTHER; note = Each t is m1f
  source 1..5794: mol_type = other RNA

SEQ ID NO: 8223 - RNA, 5797 nt, synthetic construct; identical to SEQ ID NO: 6626
  modified_base 1..5797: mod_base = OTHER; note = Each t is m1f
  source 1..5797: mol_type = other RNA

SEQ ID NO: 8224 - RNA, 5797 nt, synthetic construct; identical to SEQ ID NO: 6627
  modified_base 1..5797: mod_base = OTHER; note = Each t is m1f
  source 1..5797: mol_type = other RNA

SEQ ID NO: 8225 - RNA, 5797 nt, synthetic construct; identical to SEQ ID NO: 6628
  modified_base 1..5797: mod_base = OTHER; note = Each t is m1f
  source 1..5797: mol_type = other RNA

SEQ ID NO: 8226 - RNA, 5797 nt, synthetic construct; identical to SEQ ID NO: 6629
  modified_base 1..5797: mod_base = OTHER; note = Each t is m1f
  source 1..5797: mol_type = other RNA

SEQ ID NO: 8227 - RNA, 5797 nt, synthetic construct; identical to SEQ ID NO: 6630
  modified_base 1..5797: mod_base = OTHER; note = Each t is m1f
  source 1..5797: mol_type = other RNA

SEQ ID NO: 8228 - RNA, 5797 nt, synthetic construct; identical to SEQ ID NO: 6631
  modified_base 1..5797: mod_base = OTHER; note = Each t is m1f
  source 1..5797: mol_type = other RNA

SEQ ID NO: 8229 - RNA, 5797 nt, synthetic construct; identical to SEQ ID NO: 6632
  modified_base 1..5797: mod_base = OTHER; note = Each t is m1f
  source 1..5797: mol_type = other RNA

SEQ ID NO: 8230 - RNA, 5797 nt, synthetic construct; identical to SEQ ID NO: 6633
  modified_base 1..5797: mod_base = OTHER; note = Each t is m1f
  source 1..5797: mol_type = other RNA

SEQ ID NO: 8231 - RNA, 5797 nt, synthetic construct; identical to SEQ ID NO: 6634
  modified_base 1..5797: mod_base = OTHER; note = Each t is m1f
  source 1..5797: mol_type = other RNA

SEQ ID NO: 8232 - RNA, 5797 nt, synthetic construct; identical to SEQ ID NO: 6635
  modified_base 1..5797: mod_base = OTHER; note = Each t is m1f
  source 1..5797: mol_type = other RNA

SEQ ID NO: 8233 - RNA, 5797 nt, synthetic construct; identical to SEQ ID NO: 6636
  modified_base 1..5797: mod_base = OTHER; note = Each t is m1f
  source 1..5797: mol_type = other RNA

SEQ ID NO: 8234 - RNA, 5797 nt, synthetic construct; identical to SEQ ID NO: 6637
  modified_base 1..5797: mod_base = OTHER; note = Each t is m1f
  source 1..5797: mol_type = other RNA

SEQ ID NO: 8235 - RNA, 5833 nt, synthetic construct; identical to SEQ ID NO: 6638
  modified_base 1..5797: mod_base = OTHER; note = Each t is m1f
  source 1..5833: mol_type = other RNA

SEQ ID NO: 8236 - RNA, 5797 nt, synthetic construct; identical to SEQ ID NO: 6639
  modified_base 1..5797: mod_base = OTHER; note = Each t is m1f
  source 1..5797: mol_type = other RNA

SEQ ID NO: 8237 - RNA, 5797 nt, synthetic construct; identical to SEQ ID NO: 6640
  modified_base 1..5797: mod_base = OTHER; note = Each t is m1f
  source 1..5797: mol_type = other RNA

SEQ ID NO: 8238 - RNA, 5797 nt, synthetic construct; identical to SEQ ID NO: 6641
  modified_base 1..5797: mod_base = OTHER; note = Each t is m1f
  source 1..5797: mol_type = other RNA

SEQ ID NO: 8239 - RNA, 5797 nt, synthetic construct; identical to SEQ ID NO: 6642
  modified_base 1..5797: mod_base = OTHER; note = Each t is m1f
  source 1..5797: mol_type = other RNA

SEQ ID NO: 8240 - RNA, 5797 nt, synthetic construct; identical to SEQ ID NO: 6643
  modified_base 1..5797: mod_base = OTHER; note = Each t is m1f
  source 1..5797: mol_type = other RNA

SEQ ID NO: 8241 - RNA, 5797 nt, synthetic construct; identical to SEQ ID NO: 6644
  modified_base 1..5797: mod_base = OTHER; note = Each t is m1f
  source 1..5797: mol_type = other RNA

SEQ ID NO: 8242 - RNA, 5797 nt, synthetic construct; identical to SEQ ID NO: 6645
  modified_base 1..5797: mod_base = OTHER; note = Each t is m1f
  source 1..5797: mol_type = other RNA

SEQ ID NO: 8243 - RNA, 5797 nt, synthetic construct; identical to SEQ ID NO: 6646
  modified_base 1..5797: mod_base = OTHER; note = Each t is m1f
  source 1..5797: mol_type = other RNA

SEQ ID NO: 8244 - RNA, 5797 nt, synthetic construct; identical to SEQ ID NO: 6647
  modified_base 1..5797: mod_base = OTHER; note = Each t is m1f
  source 1..5797: mol_type = other RNA

SEQ ID NO: 8245 - RNA, 5797 nt, synthetic construct; identical to SEQ ID NO: 6648
  modified_base 1..5797: mod_base = OTHER; note = Each t is m1f
  source 1..5797: mol_type = other RNA

SEQ ID NO: 8246 - RNA, 5797 nt, synthetic construct; identical to SEQ ID NO: 6649
  modified_base 1..5797: mod_base = OTHER; note = Each t is m1f
  source 1..5797: mol_type = other RNA

SEQ ID NO: 8247 - RNA, 5797 nt, synthetic construct; identical to SEQ ID NO: 6650
  modified_base 1..5797: mod_base = OTHER; note = Each t is m1f
  source 1..5797: mol_type = other RNA

SEQ ID NO: 8248 - RNA, 5797 nt, synthetic construct; identical to SEQ ID NO: 6651
  modified_base 1..5797: mod_base = OTHER; note = Each t is m1f
  source 1..5797: mol_type = other RNA

SEQ ID NO: 8249 - RNA, 5797 nt, synthetic construct; identical to SEQ ID NO: 6652
  modified_base 1..5797: mod_base = OTHER; note = Each t is m1f
  source 1..5797: mol_type = other RNA

SEQ ID NO: 8250 - RNA, 5797 nt, synthetic construct; identical to SEQ ID NO: 6653
  modified_base 1..5797: mod_base = OTHER; note = Each t is m1f
  source 1..5797: mol_type = other RNA

SEQ ID NO: 8251 - RNA, 5797 nt, synthetic construct; identical to SEQ ID NO: 6654
  modified_base 1..5797: mod_base = OTHER; note = Each t is m1f
  source 1..5797: mol_type = other RNA

SEQ ID NO: 8252 - RNA, 5797 nt, synthetic construct; identical to SEQ ID NO: 6655
  modified_base 1..5797: mod_base = OTHER; note = Each t is m1f
  source 1..5797: mol_type = other RNA

SEQ ID NO: 8253 - RNA, 5797 nt, synthetic construct; identical to SEQ ID NO: 6656
  modified_base 1..5797: mod_base = OTHER; note = Each t is m1f
  source 1..5797: mol_type = other RNA

SEQ ID NO: 8254 - RNA, 5797 nt, synthetic construct; identical to SEQ ID NO: 6657
  modified_base 1..5797: mod_base = OTHER; note = Each t is m1f
  source 1..5797: mol_type = other RNA

SEQ ID NO: 8255 - RNA, 5797 nt, synthetic construct; identical to SEQ ID NO: 6658
  modified_base 1..5797: mod_base = OTHER; note = Each t is m1f
  source 1..5797: mol_type = other RNA

SEQ ID NO: 8256 - RNA, 5797 nt, synthetic construct; identical to SEQ ID NO: 6659
  modified_base 1..5797: mod_base = OTHER; note = Each t is m1f
  source 1..5797: mol_type = other RNA

SEQ ID NO: 8257 - RNA, 5797 nt, synthetic construct; identical to SEQ ID NO: 6660
  modified_base 1..5797: mod_base = OTHER; note = Each t is m1f
  source 1..5797: mol_type = other RNA

SEQ ID NO: 8258 - RNA, 5797 nt, synthetic construct; identical to SEQ ID NO: 6661
  modified_base 1..5797: mod_base = OTHER; note = Each t is m1f
  source 1..5797: mol_type = other RNA

SEQ ID NO: 8259 - RNA, 5797 nt, synthetic construct; identical to SEQ ID NO: 6662
  modified_base 1..5797: mod_base = OTHER; note = Each t is m1f
  source 1..5797: mol_type = other RNA

SEQ ID NO: 8260 - RNA, 5797 nt, synthetic construct; identical to SEQ ID NO: 6663
  modified_base 1..5797: mod_base = OTHER; note = Each t is m1f
  source 1..5797: mol_type = other RNA

SEQ ID NO: 8261 - RNA, 5797 nt, synthetic construct; identical to SEQ ID NO: 6664
  modified_base 1..5797: mod_base = OTHER; note = Each t is m1f
  source 1..5797: mol_type = other RNA

SEQ ID NO: 8262 - RNA, 5797 nt, synthetic construct; identical to SEQ ID NO: 6665
  modified_base 1..5797: mod_base = OTHER; note = Each t is m1f
  source 1..5797: mol_type = other RNA

SEQ ID NO: 8263 - RNA, 5797 nt, synthetic construct; identical to SEQ ID NO: 6666
  modified_base 1..5797: mod_base = OTHER; note = Each t is m1f
  source 1..5797: mol_type = other RNA

SEQ ID NO: 8264 - RNA, 5797 nt, synthetic construct; identical to SEQ ID NO: 6667
  modified_base 1..5797: mod_base = OTHER; note = Each t is m1f
  source 1..5797: mol_type = other RNA

SEQ ID NO: 8265 - RNA, 5797 nt, synthetic construct; identical to SEQ ID NO: 6668
  modified_base 1..5797: mod_base = OTHER; note = Each t is m1f
  source 1..5797: mol_type = other RNA

SEQ ID NO: 8266 - RNA, 5797 nt, synthetic construct; identical to SEQ ID NO: 6669
  modified_base 1..5797: mod_base = OTHER; note = Each t is m1f
  source 1..5797: mol_type = other RNA

SEQ ID NO: 8267 - RNA, 5797 nt, synthetic construct; identical to SEQ ID NO: 6670
  modified_base 1..5797: mod_base = OTHER; note = Each t is m1f
  source 1..5797: mol_type = other RNA

SEQ ID NO: 8268 - RNA, 5797 nt, synthetic construct; identical to SEQ ID NO: 6671
  modified_base 1..5797: mod_base = OTHER; note = Each t is m1f
  source 1..5797: mol_type = other RNA

SEQ ID NO: 8269 - RNA, 5797 nt, synthetic construct; identical to SEQ ID NO: 6672
  modified_base 1..5797: mod_base = OTHER; note = Each t is m1f
  source 1..5797: mol_type = other RNA

SEQ ID NO: 8270 - RNA, 5797 nt, synthetic construct; identical to SEQ ID NO: 6673
  modified_base 1..5797: mod_base = OTHER; note = Each t is m1f
  source 1..5797: mol_type = other RNA

SEQ ID NO: 8271 - RNA, 5797 nt, synthetic construct; identical to SEQ ID NO: 6674
  modified_base 1..5797: mod_base = OTHER; note = Each t is m1f
  source 1..5797: mol_type = other RNA

SEQ ID NO: 8272 - RNA, 5797 nt, synthetic construct; identical to SEQ ID NO: 6675
  modified_base 1..5797: mod_base = OTHER; note = Each t is m1f
  source 1..5797: mol_type = other RNA

SEQ ID NO: 8273 - RNA, 5797 nt, synthetic construct; identical to SEQ ID NO: 6676
  modified_base 1..5797: mod_base = OTHER; note = Each t is m1f
  source 1..5797: mol_type = other RNA

SEQ ID NO: 8274 - RNA, 5797 nt, synthetic construct; identical to SEQ ID NO: 6677
  modified_base 1..5797: mod_base = OTHER; note = Each t is m1f
  source 1..5797: mol_type = other RNA

SEQ ID NO: 8275 - RNA, 5797 nt, synthetic construct; identical to SEQ ID NO: 6678
  modified_base 1..5797: mod_base = OTHER; note = Each t is m1f
  source 1..5797: mol_type = other RNA

SEQ ID NO: 8276 - RNA, 5797 nt, synthetic construct; identical to SEQ ID NO: 6679
  modified_base 1..5797: mod_base = OTHER; note = Each t is m1f
  source 1..5797: mol_type = other RNA

SEQ ID NO: 8277 - RNA, 5797 nt, synthetic construct; identical to SEQ ID NO: 6680
  modified_base 1..5797: mod_base = OTHER; note = Each t is m1f
  source 1..5797: mol_type = other RNA

SEQ ID NO: 8278 - RNA, 5797 nt, synthetic construct; identical to SEQ ID NO: 6681
  modified_base 1..5797: mod_base = OTHER; note = Each t is m1f
  source 1..5797: mol_type = other RNA

SEQ ID NO: 8279 - RNA, 5797 nt, synthetic construct; identical to SEQ ID NO: 6682
  modified_base 1..5797: mod_base = OTHER; note = Each t is m1f
  source 1..5797: mol_type = other RNA

SEQ ID NO: 8280 - RNA, 5797 nt, synthetic construct; identical to SEQ ID NO: 6683
  modified_base 1..5797: mod_base = OTHER; note = Each t is m1f
  source 1..5797: mol_type = other RNA

SEQ ID NO: 8281 - RNA, 5797 nt, synthetic construct; identical to SEQ ID NO: 6684
  modified_base 1..5797: mod_base = OTHER; note = Each t is m1f
  source 1..5797: mol_type = other RNA

SEQ ID NO: 8282 - RNA, 5797 nt, synthetic construct; identical to SEQ ID NO: 6685
  modified_base 1..5797: mod_base = OTHER; note = Each t is m1f
  source 1..5797: mol_type = other RNA

SEQ ID NO: 8283 - RNA, 5797 nt, synthetic construct; identical to SEQ ID NO: 6686
  modified_base 1..5797: mod_base = OTHER; note = Each t is m1f
  source 1..5797: mol_type = other RNA

SEQ ID NO: 8284 - RNA, 5797 nt, synthetic construct; identical to SEQ ID NO: 6687
  modified_base 1..5797: mod_base = OTHER; note = Each t is m1f
  source 1..5797: mol_type = other RNA

SEQ ID NO: 8285 - RNA, 5797 nt, synthetic construct; identical to SEQ ID NO: 6688
  modified_base 1..5797: mod_base = OTHER; note = Each t is m1f
  source 1..5797: mol_type = other RNA

SEQ ID NO: 8286 - RNA, 5797 nt, synthetic construct; identical to SEQ ID NO: 6689
  modified_base 1..5797: mod_base = OTHER; note = Each t is m1f
  source 1..5797: mol_type = other RNA

SEQ ID NO: 8287 - RNA, 5797 nt, synthetic construct; identical to SEQ ID NO: 6690
  modified_base 1..5797: mod_base = OTHER; note = Each t is m1f
  source 1..5797: mol_type = other RNA

SEQ ID NO: 8288 - RNA, 5797 nt, synthetic construct; identical to SEQ ID NO: 6691
  modified_base 1..5797: mod_base = OTHER; note = Each t is m1f
  source 1..5797: mol_type = other RNA

SEQ ID NO: 8289 - RNA, 5797 nt, synthetic construct; identical to SEQ ID NO: 6692
  modified_base 1..5797: mod_base = OTHER; note = Each t is m1f
  source 1..5797: mol_type = other RNA

SEQ ID NO: 8290 - RNA, 5797 nt, synthetic construct; identical to SEQ ID NO: 6693
  modified_base 1..5797: mod_base = OTHER; note = Each t is m1f
  source 1..5797: mol_type = other RNA

SEQ ID NO: 8291 - RNA, 5797 nt, synthetic construct; identical to SEQ ID NO: 6694
  modified_base 1..5797: mod_base = OTHER; note = Each t is m1f
  source 1..5797: mol_type = other RNA

SEQ ID NO: 8292 - RNA, 5797 nt, synthetic construct; identical to SEQ ID NO: 6695
  modified_base 1..5797: mod_base = OTHER; note = Each t is m1f
  source 1..5797: mol_type = other RNA

SEQ ID NO: 8293 - RNA, 5797 nt, synthetic construct; identical to SEQ ID NO: 6696
  modified_base 1..5797: mod_base = OTHER; note = Each t is m1f
  source 1..5797: mol_type = other RNA

SEQ ID NO: 8294 - RNA, 5797 nt, synthetic construct; identical to SEQ ID NO: 6697
  modified_base 1..5797: mod_base = OTHER; note = Each t is m1f
  source 1..5797: mol_type = other RNA

SEQ ID NO: 8295 - RNA, 5797 nt, synthetic construct; identical to SEQ ID NO: 6698
  modified_base 1..5797: mod_base = OTHER; note = Each t is m1f
  source 1..5797: mol_type = other RNA

SEQ ID NO: 8296 - RNA, 5797 nt, synthetic construct; identical to SEQ ID NO: 6699
  modified_base 1..5797: mod_base = OTHER; note = Each t is m1f
  source 1..5797: mol_type = other RNA

SEQ ID NO: 8297 - RNA, 5797 nt, synthetic construct; identical to SEQ ID NO: 6700
  modified_base 1..5797: mod_base = OTHER; note = Each t is m1f
  source 1..5797: mol_type = other RNA

SEQ ID NO: 8298 - RNA, 5797 nt, synthetic construct; identical to SEQ ID NO: 6701
  modified_base 1..5797: mod_base = OTHER; note = Each t is m1f
  source 1..5797: mol_type = other RNA

SEQ ID NO: 8299 - RNA, 5797 nt, synthetic construct; identical to SEQ ID NO: 6702
  modified_base 1..5797: mod_base = OTHER; note = Each t is m1f
  source 1..5797: mol_type = other RNA

SEQ ID NO: 8300 - RNA, 5797 nt, synthetic construct; identical to SEQ ID NO: 6703
  modified_base 1..5797: mod_base = OTHER; note = Each t is m1f
  source 1..5797: mol_type = other RNA

SEQ ID NO: 8301 - RNA, 5797 nt, synthetic construct; identical to SEQ ID NO: 6704
  modified_base 1..5797: mod_base = OTHER; note = Each t is m1f
  source 1..5797: mol_type = other RNA

SEQ ID NO: 8302 - RNA, 5797 nt, synthetic construct; identical to SEQ ID NO: 6705
  modified_base 1..5797: mod_base = OTHER; note = Each t is m1f
  source 1..5797: mol_type = other RNA

SEQ ID NO: 8303 - RNA, 5797 nt, synthetic construct; identical to SEQ ID NO: 6706
  modified_base 1..5797: mod_base = OTHER; note = Each t is m1f
  source 1..5797: mol_type = other RNA

SEQ ID NO: 8304 - RNA, 5797 nt, synthetic construct; identical to SEQ ID NO: 6707
  modified_base 1..5797: mod_base = OTHER; note = Each t is m1f
  source 1..5797: mol_type = other RNA

SEQ ID NO: 8305 - RNA, 5797 nt, synthetic construct; identical to SEQ ID NO: 6708
  modified_base 1..5797: mod_base = OTHER; note = Each t is m1f
  source 1..5797: mol_type = other RNA

SEQ ID NO: 8306 - RNA, 5797 nt, synthetic construct; identical to SEQ ID NO: 6709
  modified_base 1..5797: mod_base = OTHER; note = Each t is m1f
  source 1..5797: mol_type = other RNA

SEQ ID NO: 8307 - RNA, 5797 nt, synthetic construct; identical to SEQ ID NO: 6710
  modified_base 1..5797: mod_base = OTHER; note = Each t is m1f
  source 1..5797: mol_type = other RNA

SEQ ID NO: 8308 - RNA, 5797 nt, synthetic construct; identical to SEQ ID NO: 6711
  modified_base 1..5797: mod_base = OTHER; note = Each t is m1f
  source 1..5797: mol_type = other RNA

SEQ ID NO: 8309 - RNA, 5797 nt, synthetic construct; identical to SEQ ID NO: 6712
  modified_base 1..5797: mod_base = OTHER; note = Each t is m1f
  source 1..5797: mol_type = other RNA

SEQ ID NO: 8310 - RNA, 5797 nt, synthetic construct; identical to SEQ ID NO: 6713
  modified_base 1..5797: mod_base = OTHER; note = Each t is m1f
  source 1..5797: mol_type = other RNA

SEQ ID NO: 8311 - RNA, 5797 nt, synthetic construct; identical to SEQ ID NO: 6714
  modified_base 1..5797: mod_base = OTHER; note = Each t is m1f
  source 1..5797: mol_type = other RNA

SEQ ID NO: 8312 - RNA, 5797 nt, synthetic construct; identical to SEQ ID NO: 6715
  modified_base 1..5797: mod_base = OTHER; note = Each t is m1f
  source 1..5797: mol_type = other RNA

SEQ ID NO: 8313 - RNA, 5797 nt, synthetic construct; identical to SEQ ID NO: 6716
  modified_base 1..5797: mod_base = OTHER; note = Each t is m1f
  source 1..5797: mol_type = other RNA

SEQ ID NO: 8314 - RNA, 5797 nt, synthetic construct; identical to SEQ ID NO: 6717
  modified_base 1..5797: mod_base = OTHER; note = Each t is m1f
  source 1..5797: mol_type = other RNA

SEQ ID NO: 8315 - RNA, 5797 nt, synthetic construct; identical to SEQ ID NO: 6718
  modified_base 1..5797: mod_base = OTHER; note = Each t is m1f
  source 1..5797: mol_type = other RNA

SEQ ID NO: 8316 - RNA, 5797 nt, synthetic construct; identical to SEQ ID NO: 6719
  modified_base 1..5797: mod_base = OTHER; note = Each t is m1f
  source 1..5797: mol_type = other RNA

SEQ ID NO: 8317 - RNA, 5797 nt, synthetic construct; identical to SEQ ID NO: 6720
  modified_base 1..5797: mod_base = OTHER; note = Each t is m1f
  source 1..5797: mol_type = other RNA

SEQ ID NO: 8318 - RNA, 5797 nt, synthetic construct; identical to SEQ ID NO: 6721
  modified_base 1..5797: mod_base = OTHER; note = Each t is m1f
  source 1..5797: mol_type = other RNA

SEQ ID NO: 8319 - RNA, 5797 nt, synthetic construct; identical to SEQ ID NO: 6722
  modified_base 1..5797: mod_base = OTHER; note = Each t is m1f
  source 1..5797: mol_type = other RNA

SEQ ID NO: 8320 - RNA, 5797 nt, synthetic construct; identical to SEQ ID NO: 6723
  modified_base 1..5797: mod_base = OTHER; note = Each t is m1f
  source 1..5797: mol_type = other RNA

SEQ ID NO: 8321 - RNA, 5797 nt, synthetic construct; identical to SEQ ID NO: 6724
  modified_base 1..5797: mod_base = OTHER; note = Each t is m1f
  source 1..5797: mol_type = other RNA

SEQ ID NO: 8322 - RNA, 5797 nt, synthetic construct; identical to SEQ ID NO: 6725
  modified_base 1..5797: mod_base = OTHER; note = Each t is m1f
  source 1..5797: mol_type = other RNA

SEQ ID NO: 8323 - RNA, 5797 nt, synthetic construct; identical to SEQ ID NO: 6726
  modified_base 1..5797: mod_base = OTHER; note = Each t is m1f
  source 1..5797: mol_type = other RNA

SEQ ID NO: 8324 - RNA, 5797 nt, synthetic construct; identical to SEQ ID NO: 6727
  modified_base 1..5797: mod_base = OTHER; note = Each t is m1f
  source 1..5797: mol_type = other RNA

SEQ ID NO: 8325 - RNA, 5797 nt, synthetic construct; identical to SEQ ID NO: 6728
  modified_base 1..5797: mod_base = OTHER; note = Each t is m1f
  source 1..5797: mol_type = other RNA

SEQ ID NO: 8326 - RNA, 5797 nt, synthetic construct; identical to SEQ ID NO: 6729
  modified_base 1..5797: mod_base = OTHER; note = Each t is m1f
  source 1..5797: mol_type = other RNA

SEQ ID NO: 8327 - RNA, 5797 nt, synthetic construct; identical to SEQ ID NO: 6730
  modified_base 1..5797: mod_base = OTHER; note = Each t is m1f
  source 1..5797: mol_type = other RNA

SEQ ID NO: 8328 - RNA, 5797 nt, synthetic construct; identical to SEQ ID NO: 6731
  modified_base 1..5797: mod_base = OTHER; note = Each t is m1f
  source 1..5797: mol_type = other RNA

SEQ ID NO: 8329 - RNA, 5797 nt, synthetic construct; identical to SEQ ID NO: 6732
  modified_base 1..5797: mod_base = OTHER; note = Each t is m1f
  source 1..5797: mol_type = other RNA

SEQ ID NO: 8330 - RNA, 5797 nt, synthetic construct; identical to SEQ ID NO: 6733
  modified_base 1..5797: mod_base = OTHER; note = Each t is m1f
  source 1..5797: mol_type = other RNA

SEQ ID NO: 8331 - RNA, 5803 nt, synthetic construct; identical to SEQ ID NO: 6734
  modified_base 1..5797: mod_base = OTHER; note = Each t is m1f
  source 1..5803: mol_type = other RNA

SEQ ID NO: 8332 - RNA, 5797 nt, synthetic construct; identical to SEQ ID NO: 6735
  modified_base 1..5797: mod_base = OTHER; note = Each t is m1f
  source 1..5797: mol_type = other RNA

SEQ ID NO: 8333 - RNA, 5797 nt, synthetic construct; identical to SEQ ID NO: 6736
  modified_base 1..5797: mod_base = OTHER; note = Each t is m1f
  source 1..5797: mol_type = other RNA

SEQ ID NO: 8334 - RNA, 5797 nt, synthetic construct; identical to SEQ ID NO: 6737
  modified_base 1..5797: mod_base = OTHER; note = Each t is m1f
  source 1..5797: mol_type = other RNA

SEQ ID NO: 8335 - RNA, 5797 nt, synthetic construct; identical to SEQ ID NO: 6738
  modified_base 1..5797: mod_base = OTHER; note = Each t is m1f
  source 1..5797: mol_type = other RNA

SEQ ID NO: 8336 - RNA, 5797 nt, synthetic construct; identical to SEQ ID NO: 6739
  modified_base 1..5797: mod_base = OTHER; note = Each t is m1f
  source 1..5797: mol_type = other RNA

SEQ ID NO: 8337 - RNA, 5797 nt, synthetic construct; identical to SEQ ID NO: 6740
  modified_base 1..5797: mod_base = OTHER; note = Each t is m1f
  source 1..5797: mol_type = other RNA

SEQ ID NO: 8338 - RNA, 5797 nt, synthetic construct; identical to SEQ ID NO: 6741
  modified_base 1..5797: mod_base = OTHER; note = Each t is m1f
  source 1..5797: mol_type = other RNA

SEQ ID NO: 8339 - RNA, 5797 nt, synthetic construct; identical to SEQ ID NO: 6742
  modified_base 1..5797: mod_base = OTHER; note = Each t is m1f
  source 1..5797: mol_type = other RNA

SEQ ID NO: 8340 - RNA, 5797 nt, synthetic construct; identical to SEQ ID NO: 6743
  modified_base 1..5797: mod_base = OTHER; note = Each t is m1f
  source 1..5797: mol_type = other RNA

SEQ ID NO: 8341 - RNA, 5797 nt, synthetic construct; identical to SEQ ID NO: 6744
  modified_base 1..5797: mod_base = OTHER; note = Each t is m1f
  source 1..5797: mol_type = other RNA

SEQ ID NO: 8342 - RNA, 5797 nt, synthetic construct; identical to SEQ ID NO: 6745
  modified_base 1..5797: mod_base = OTHER; note = Each t is m1f
  source 1..5797: mol_type = other RNA

SEQ ID NO: 8343 - RNA, 5797 nt, synthetic construct; identical to SEQ ID NO: 6746
  modified_base 1..5797: mod_base = OTHER; note = Each t is m1f
  source 1..5797: mol_type = other RNA

SEQ ID NO: 8344 - RNA, 5797 nt, synthetic construct; identical to SEQ ID NO: 6747
  modified_base 1..5797: mod_base = OTHER; note = Each t is m1f
  source 1..5797: mol_type = other RNA

SEQ ID NO: 8345 - RNA, 5797 nt, synthetic construct; identical to SEQ ID NO: 6748
  modified_base 1..5797: mod_base = OTHER; note = Each t is m1f
  source 1..5797: mol_type = other RNA

SEQ ID NO: 8346 - RNA, 5797 nt, synthetic construct; identical to SEQ ID NO: 6749
  modified_base 1..5797: mod_base = OTHER; note = Each t is m1f
  source 1..5797: mol_type = other RNA

SEQ ID NO: 8347 - RNA, 5797 nt, synthetic construct; identical to SEQ ID NO: 6750
  modified_base 1..5797: mod_base = OTHER; note = Each t is m1f
  source 1..5797: mol_type = other RNA

SEQ ID NO: 8348 - RNA, 5797 nt, synthetic construct; identical to SEQ ID NO: 6751
  modified_base 1..5797: mod_base = OTHER; note = Each t is m1f
  source 1..5797: mol_type = other RNA

SEQ ID NO: 8349 - RNA, 5797 nt, synthetic construct; identical to SEQ ID NO: 6752
  modified_base 1..5797: mod_base = OTHER; note = Each t is m1f
  source 1..5797: mol_type = other RNA

SEQ ID NO: 8350 - RNA, 5797 nt, synthetic construct; identical to SEQ ID NO: 6753
  modified_base 1..5797: mod_base = OTHER; note = Each t is m1f
  source 1..5797: mol_type = other RNA

SEQ ID NO: 8351 - RNA, 5797 nt, synthetic construct; identical to SEQ ID NO: 6754
  modified_base 1..5797: mod_base = OTHER; note = Each t is m1f
  source 1..5797: mol_type = other RNA

SEQ ID NO: 8352 - RNA, 5797 nt, synthetic construct; identical to SEQ ID NO: 6755
  modified_base 1..5797: mod_base = OTHER; note = Each t is m1f
  source 1..5797: mol_type = other RNA

SEQ ID NO: 8353 - RNA, 5797 nt, synthetic construct; identical to SEQ ID NO: 6756
  modified_base 1..5797: mod_base = OTHER; note = Each t is m1f
  source 1..5797: mol_type = other RNA

SEQ ID NO: 8354 - RNA, 5797 nt, synthetic construct; identical to SEQ ID NO: 6757
  modified_base 1..5797: mod_base = OTHER; note = Each t is m1f
  source 1..5797: mol_type = other RNA

SEQ ID NO: 8355 - RNA, 5797 nt, synthetic construct; identical to SEQ ID NO: 6758
  modified_base 1..5797: mod_base = OTHER; note = Each t is m1f
  source 1..5797: mol_type = other RNA

SEQ ID NO: 8356 - RNA, 5797 nt, synthetic construct; identical to SEQ ID NO: 6759
  modified_base 1..5797: mod_base = OTHER; note = Each t is m1f
  source 1..5797: mol_type = other RNA

SEQ ID NO: 8357 - RNA, 5821 nt, synthetic construct; identical to SEQ ID NO: 6760
  modified_base 1..5797: mod_base = OTHER; note = Each t is m1f
  source 1..5821: mol_type = other RNA

SEQ ID NO: 8358 - RNA, 5797 nt, synthetic construct; identical to SEQ ID NO: 6761
  modified_base 1..5797: mod_base = OTHER; note = Each t is m1f
  source 1..5797: mol_type = other RNA

SEQ ID NO: 8359 - RNA, 5797 nt, synthetic construct; identical to SEQ ID NO: 6762
  modified_base 1..5797: mod_base = OTHER; note = Each t is m1f
  source 1..5797: mol_type = other RNA

SEQ ID NO: 8360 - RNA, 5797 nt, synthetic construct; identical to SEQ ID NO: 6763
  modified_base 1..5797: mod_base = OTHER; note = Each t is m1f
  source 1..5797: mol_type = other RNA

SEQ ID NO: 8361 - RNA, 5797 nt, synthetic construct; identical to SEQ ID NO: 6764
  modified_base 1..5797: mod_base = OTHER; note = Each t is m1f
  source 1..5797: mol_type = other RNA

SEQ ID NO: 8362 - RNA, 5794 nt, synthetic construct; identical to SEQ ID NO: 6765
  modified_base 1..5794: mod_base = OTHER; note = Each t is m1f
  source 1..5794: mol_type = other RNA

SEQ ID NO: 8363 - RNA, 5797 nt, synthetic construct; identical to SEQ ID NO: 6766
  modified_base 1..5797: mod_base = OTHER; note = Each t is m1f
  source 1..5797: mol_type = other RNA

SEQ ID NO: 8364 - RNA, 5797 nt, synthetic construct; identical to SEQ ID NO: 6767
  modified_base 1..5797: mod_base = OTHER; note = Each t is m1f
  source 1..5797: mol_type = other RNA

SEQ ID NO: 8365 - RNA, 5797 nt, synthetic construct; identical to SEQ ID NO: 6768
  modified_base 1..5797: mod_base = OTHER; note = Each t is m1f
  source 1..5797: mol_type = other RNA

SEQ ID NO: 8366 - RNA, 5797 nt, synthetic construct; identical to SEQ ID NO: 6769
  modified_base 1..5797: mod_base = OTHER; note = Each t is m1f
  source 1..5797: mol_type = other RNA

SEQ ID NO: 8367 - RNA, 5797 nt, synthetic construct; identical to SEQ ID NO: 6770
  modified_base 1..5797: mod_base = OTHER; note = Each t is m1f
  source 1..5797: mol_type = other RNA

SEQ ID NO: 8368 - RNA, 5797 nt, synthetic construct; identical to SEQ ID NO: 6771
  modified_base 1..5797: mod_base = OTHER; note = Each t is m1f
  source 1..5797: mol_type = other RNA

SEQ ID NO: 8369 - RNA, 5797 nt, synthetic construct; identical to SEQ ID NO: 6772
  modified_base 1..5797: mod_base = OTHER; note = Each t is m1f
  source 1..5797: mol_type = other RNA

SEQ ID NO: 8370 - RNA, 5797 nt, synthetic construct; identical to SEQ ID NO: 6773
  modified_base 1..5797: mod_base = OTHER; note = Each t is m1f
  source 1..5797: mol_type = other RNA

SEQ ID NO: 8371 - RNA, 5797 nt, synthetic construct; identical to SEQ ID NO: 6774
  modified_base 1..5797: mod_base = OTHER; note = Each t is m1f
  source 1..5797: mol_type = other RNA

SEQ ID NO: 8372 - RNA, 5797 nt, synthetic construct; identical to SEQ ID NO: 6775
  modified_base 1..5797: mod_base = OTHER; note = Each t is m1f
  source 1..5797: mol_type = other RNA

SEQ ID NO: 8373 - RNA, 5797 nt, synthetic construct; identical to SEQ ID NO: 6776
  modified_base 1..5797: mod_base = OTHER; note = Each t is m1f
  source 1..5797: mol_type = other RNA

SEQ ID NO: 8374 - RNA, 5797 nt, synthetic construct; identical to SEQ ID NO: 6777
  modified_base 1..5797: mod_base = OTHER; note = Each t is m1f
  source 1..5797: mol_type = other RNA

SEQ ID NO: 8375 - RNA, 5797 nt, synthetic construct; identical to SEQ ID NO: 6778
  modified_base 1..5797: mod_base = OTHER; note = Each t is m1f
  source 1..5797: mol_type = other RNA

SEQ ID NO: 8376 - RNA, 5797 nt, synthetic construct; identical to SEQ ID NO: 6779
  modified_base 1..5797: mod_base = OTHER; note = Each t is m1f
  source 1..5797: mol_type = other RNA

SEQ ID NO: 8377 - RNA, 5797 nt, synthetic construct; identical to SEQ ID NO: 6780
  modified_base 1..5797: mod_base = OTHER; note = Each t is m1f
  source 1..5797: mol_type = other RNA

SEQ ID NO: 8378 - RNA, 5797 nt, synthetic construct; identical to SEQ ID NO: 6781
  modified_base 1..5797: mod_base = OTHER; note = Each t is m1f
  source 1..5797: mol_type = other RNA

SEQ ID NO: 8379 - RNA, 5797 nt, synthetic construct; identical to SEQ ID NO: 6782
  modified_base 1..5797: mod_base = OTHER; note = Each t is m1f
  source 1..5797: mol_type = other RNA

SEQ ID NO: 8380 - RNA, 5797 nt, synthetic construct; identical to SEQ ID NO: 6783
  modified_base 1..5797: mod_base = OTHER; note = Each t is m1f
  source 1..5797: mol_type = other RNA

SEQ ID NO: 8381 - RNA, 5797 nt, synthetic construct; identical to SEQ ID NO: 6784
  modified_base 1..5797: mod_base = OTHER; note = Each t is m1f
  source 1..5797: mol_type = other RNA

SEQ ID NO: 8382 - RNA, 5797 nt, synthetic construct; identical to SEQ ID NO: 6785
  modified_base 1..5797: mod_base = OTHER; note = Each t is m1f
  source 1..5797: mol_type = other RNA

SEQ ID NO: 8383 - RNA, 5797 nt, synthetic construct; identical to SEQ ID NO: 6786
  modified_base 1..5797: mod_base = OTHER; note = Each t is m1f
  source 1..5797: mol_type = other RNA

SEQ ID NO: 8384 - RNA, 5797 nt, synthetic construct; identical to SEQ ID NO: 6787
  modified_base 1..5797: mod_base = OTHER; note = Each t is m1f
  source 1..5797: mol_type = other RNA

SEQ ID NO: 8385 - RNA, 5797 nt, synthetic construct; identical to SEQ ID NO: 6788
  modified_base 1..5797: mod_base = OTHER; note = Each t is m1f
  source 1..5797: mol_type = other RNA

SEQ ID NO: 8386 - RNA, 5797 nt, synthetic construct; identical to SEQ ID NO: 6789
  modified_base 1..5797: mod_base = OTHER; note = Each t is m1f
  source 1..5797: mol_type = other RNA

SEQ ID NO: 8387 - RNA, 5797 nt, synthetic construct; identical to SEQ ID NO: 6790
  modified_base 1..5797: mod_base = OTHER; note = Each t is m1f
  source 1..5797: mol_type = other RNA

SEQ ID NO: 8388 - RNA, 5797 nt, synthetic construct; identical to SEQ ID NO: 6791
  modified_base 1..5797: mod_base = OTHER; note = Each t is m1f
  source 1..5797: mol_type = other RNA

SEQ ID NO: 8389 - RNA, 5797 nt, synthetic construct; identical to SEQ ID NO: 6792
  modified_base 1..5797: mod_base = OTHER; note = Each t is m1f
  source 1..5797: mol_type = other RNA

SEQ ID NO: 8390 - RNA, 5797 nt, synthetic construct; identical to SEQ ID NO: 6793
  modified_base 1..5797: mod_base = OTHER; note = Each t is m1f
  source 1..5797: mol_type = other RNA

SEQ ID NO: 8391 - RNA, 5797 nt, synthetic construct; identical to SEQ ID NO: 6794
  modified_base 1..5797: mod_base = OTHER; note = Each t is m1f
  source 1..5797: mol_type = other RNA

SEQ ID NO: 8392 - RNA, 5797 nt, synthetic construct; identical to SEQ ID NO: 6795
  modified_base 1..5797: mod_base = OTHER; note = Each t is m1f
  source 1..5797: mol_type = other RNA

SEQ ID NO: 8393 - RNA, 5797 nt, synthetic construct; identical to SEQ ID NO: 6796
  modified_base 1..5797: mod_base = OTHER; note = Each t is m1f
  source 1..5797: mol_type = other RNA

SEQ ID NO: 8394 - RNA, 5797 nt, synthetic construct; identical to SEQ ID NO: 6797
  modified_base 1..5797: mod_base = OTHER; note = Each t is m1f
  source 1..5797: mol_type = other RNA

SEQ ID NO: 8395 - RNA, 5797 nt, synthetic construct; identical to SEQ ID NO: 6798
  modified_base 1..5797: mod_base = OTHER; note = Each t is m1f
  source 1..5797: mol_type = other RNA

SEQ ID NO: 8396 - RNA, 5797 nt, synthetic construct; identical to SEQ ID NO: 6799
  modified_base 1..5797: mod_base = OTHER; note = Each t is m1f
  source 1..5797: mol_type = other RNA

SEQ ID NO: 8397 - RNA, 5797 nt, synthetic construct; identical to SEQ ID NO: 6800
  modified_base 1..5797: mod_base = OTHER; note = Each t is m1f
  source 1..5797: mol_type = other RNA

SEQ ID NO: 8398 - RNA, 5797 nt, synthetic construct; identical to SEQ ID NO: 6801
  modified_base 1..5797: mod_base = OTHER; note = Each t is m1f
  source 1..5797: mol_type = other RNA

SEQ ID NO: 8399 - RNA, 5797 nt, synthetic construct; identical to SEQ ID NO: 6802
  modified_base 1..5797: mod_base = OTHER; note = Each t is m1f
  source 1..5797: mol_type = other RNA

SEQ ID NO: 8400 - RNA, 5797 nt, synthetic construct; identical to SEQ ID NO: 6803
  modified_base 1..5797: mod_base = OTHER; note = Each t is m1f
  source 1..5797: mol_type = other RNA

SEQ ID NO: 8401 - RNA, 5797 nt, synthetic construct; identical to SEQ ID NO: 6804
  modified_base 1..5797: mod_base = OTHER; note = Each t is m1f
  source 1..5797: mol_type = other RNA

SEQ ID NO: 8402 - RNA, 5797 nt, synthetic construct; identical to SEQ ID NO: 6805
  modified_base 1..5797: mod_base = OTHER; note = Each t is m1f
  source 1..5797: mol_type = other RNA

SEQ ID NO: 8403 - RNA, 5797 nt, synthetic construct; identical to SEQ ID NO: 6806
  modified_base 1..5797: mod_base = OTHER; note = Each t is m1f
  source 1..5797: mol_type = other RNA

SEQ ID NO: 8404 - RNA, 5797 nt, synthetic construct; identical to SEQ ID NO: 6807
  modified_base 1..5797: mod_base = OTHER; note = Each t is m1f
  source 1..5797: mol_type = other RNA

SEQ ID NO: 8405 - RNA, 5797 nt, synthetic construct; identical to SEQ ID NO: 6808
  modified_base 1..5797: mod_base = OTHER; note = Each t is m1f
  source 1..5797: mol_type = other RNA

SEQ ID NO: 8406 - RNA, 5797 nt, synthetic construct; identical to SEQ ID NO: 6809
  modified_base 1..5797: mod_base = OTHER; note = Each t is m1f
  source 1..5797: mol_type = other RNA

SEQ ID NO: 8407 - RNA, 5797 nt, synthetic construct; identical to SEQ ID NO: 6810
  modified_base 1..5797: mod_base = OTHER; note = Each t is m1f
  source 1..5797: mol_type = other RNA

SEQ ID NO: 8408 - RNA, 5797 nt, synthetic construct; identical to SEQ ID NO: 6811
  modified_base 1..5797: mod_base = OTHER; note = Each t is m1f
  source 1..5797: mol_type = other RNA

SEQ ID NO: 8409 - RNA, 5797 nt, synthetic construct; identical to SEQ ID NO: 6812
  modified_base 1..5797: mod_base = OTHER; note = Each t is m1f
  source 1..5797: mol_type = other RNA

SEQ ID NO: 8410 - RNA, 5797 nt, synthetic construct; identical to SEQ ID NO: 6813
  modified_base 1..5797: mod_base = OTHER; note = Each t is m1f
  source 1..5797: mol_type = other RNA

SEQ ID NO: 8411 - RNA, 5797 nt, synthetic construct; identical to SEQ ID NO: 6814
  modified_base 1..5797: mod_base = OTHER; note = Each t is m1f
  source 1..5797: mol_type = other RNA

SEQ ID NO: 8412 - RNA, 5797 nt, synthetic construct; identical to SEQ ID NO: 6815
  modified_base 1..5797: mod_base = OTHER; note = Each t is m1f
  source 1..5797: mol_type = other RNA

SEQ ID NO: 8413 - RNA, 5797 nt, synthetic construct; identical to SEQ ID NO: 6816
  modified_base 1..5797: mod_base = OTHER; note = Each t is m1f
  source 1..5797: mol_type = other RNA

SEQ ID NO: 8414 - RNA, 5797 nt, synthetic construct; identical to SEQ ID NO: 6817
  modified_base 1..5797: mod_base = OTHER; note = Each t is m1f
  source 1..5797: mol_type = other RNA

SEQ ID NO: 8415 - RNA, 5797 nt, synthetic construct; identical to SEQ ID NO: 6818
  modified_base 1..5797: mod_base = OTHER; note = Each t is m1f
  source 1..5797: mol_type = other RNA

SEQ ID NO: 8416 - RNA, 5797 nt, synthetic construct; identical to SEQ ID NO: 6819
  modified_base 1..5797: mod_base = OTHER; note = Each t is m1f
  source 1..5797: mol_type = other RNA

SEQ ID NO: 8417 - RNA, 5797 nt, synthetic construct; identical to SEQ ID NO: 6820
  modified_base 1..5797: mod_base = OTHER; note = Each t is m1f
  source 1..5797: mol_type = other RNA

SEQ ID NO: 8418 - RNA, 5797 nt, synthetic construct; identical to SEQ ID NO: 6821
  modified_base 1..5797: mod_base = OTHER; note = Each t is m1f
  source 1..5797: mol_type = other RNA

SEQ ID NO: 8419 - RNA, 5797 nt, synthetic construct; identical to SEQ ID NO: 6822
  modified_base 1..5797: mod_base = OTHER; note = Each t is m1f
  source 1..5797: mol_type = other RNA

SEQ ID NO: 8420 - RNA, 5797 nt, synthetic construct; identical to SEQ ID NO: 6823
  modified_base 1..5797: mod_base = OTHER; note = Each t is m1f
  source 1..5797: mol_type = other RNA

SEQ ID NO: 8421 - RNA, 5797 nt, synthetic construct; identical to SEQ ID NO: 6824
  modified_base 1..5797: mod_base = OTHER; note = Each t is m1f
  source 1..5797: mol_type = other RNA

SEQ ID NO: 8422 - RNA, 5797 nt, synthetic construct; identical to SEQ ID NO: 6825
  modified_base 1..5797: mod_base = OTHER; note = Each t is m1f
  source 1..5797: mol_type = other RNA

SEQ ID NO: 8423 - RNA, 5797 nt, synthetic construct; identical to SEQ ID NO: 6826
  modified_base 1..5797: mod_base = OTHER; note = Each t is m1f
  source 1..5797: mol_type = other RNA

SEQ ID NO: 8424 - RNA, 5797 nt, synthetic construct; identical to SEQ ID NO: 6827
  modified_base 1..5797: mod_base = OTHER; note = Each t is m1f
  source 1..5797: mol_type = other RNA

SEQ ID NO: 8425 - RNA, 5797 nt, synthetic construct; identical to SEQ ID NO: 6828
  modified_base 1..5797: mod_base = OTHER; note = Each t is m1f
  source 1..5797: mol_type = other RNA

SEQ ID NO: 8426 - RNA, 5797 nt, synthetic construct; identical to SEQ ID NO: 6829
  modified_base 1..5797: mod_base = OTHER; note = Each t is m1f
  source 1..5797: mol_type = other RNA

SEQ ID NO: 8427 - RNA, 5797 nt, synthetic construct; identical to SEQ ID NO: 6830
  modified_base 1..5797: mod_base = OTHER; note = Each t is m1f
  source 1..5797: mol_type = other RNA

SEQ ID NO: 8428 - RNA, 5797 nt, synthetic construct; identical to SEQ ID NO: 6831
  modified_base 1..5797: mod_base = OTHER; note = Each t is m1f
  source 1..5797: mol_type = other RNA

SEQ ID NO: 8429 - RNA, 5797 nt, synthetic construct; identical to SEQ ID NO: 6832
  modified_base 1..5797: mod_base = OTHER; note = Each t is m1f
  source 1..5797: mol_type = other RNA

SEQ ID NO: 8430 - RNA, 5797 nt, synthetic construct; identical to SEQ ID NO: 6833
  modified_base 1..5797: mod_base = OTHER; note = Each t is m1f
  source 1..5797: mol_type = other RNA

SEQ ID NO: 8431 - RNA, 5797 nt, synthetic construct; identical to SEQ ID NO: 6834
  modified_base 1..5797: mod_base = OTHER; note = Each t is m1f
  source 1..5797: mol_type = other RNA

SEQ ID NO: 8432 - RNA, 5797 nt, synthetic construct; identical to SEQ ID NO: 6835
  modified_base 1..5797: mod_base = OTHER; note = Each t is m1f
  source 1..5797: mol_type = other RNA

SEQ ID NO: 8433 - RNA, 5797 nt, synthetic construct; identical to SEQ ID NO: 6836
  modified_base 1..5797: mod_base = OTHER; note = Each t is m1f
  source 1..5797: mol_type = other RNA

SEQ ID NO: 8434 - RNA, 5797 nt, synthetic construct; identical to SEQ ID NO: 6837
  modified_base 1..5797: mod_base = OTHER; note = Each t is m1f
  source 1..5797: mol_type = other RNA

SEQ ID NO: 8435 - RNA, 5797 nt, synthetic construct; identical to SEQ ID NO: 6838
  modified_base 1..5797: mod_base = OTHER; note = Each t is m1f
  source 1..5797: mol_type = other RNA

SEQ ID NO: 8436 - RNA, 5797 nt, synthetic construct; identical to SEQ ID NO: 6839
  modified_base 1..5797: mod_base = OTHER; note = Each t is m1f
  source 1..5797: mol_type = other RNA

SEQ ID NO: 8437 - RNA, 5797 nt, synthetic construct; identical to SEQ ID NO: 6840
  modified_base 1..5797: mod_base = OTHER; note = Each t is m1f
  source 1..5797: mol_type = other RNA

SEQ ID NO: 8438 - RNA, 5797 nt, synthetic construct; identical to SEQ ID NO: 6841
  modified_base 1..5797: mod_base = OTHER; note = Each t is m1f
  source 1..5797: mol_type = other RNA

SEQ ID NO: 8439 - RNA, 5797 nt, synthetic construct; identical to SEQ ID NO: 6842
  modified_base 1..5797: mod_base = OTHER; note = Each t is m1f
  source 1..5797: mol_type = other RNA

SEQ ID NO: 8440 - RNA, 5797 nt, synthetic construct; identical to SEQ ID NO: 6843
  modified_base 1..5797: mod_base = OTHER; note = Each t is m1f
  source 1..5797: mol_type = other RNA

SEQ ID NO: 8441 - RNA, 5797 nt, synthetic construct; identical to SEQ ID NO: 6844
  modified_base 1..5797: mod_base = OTHER; note = Each t is m1f
  source 1..5797: mol_type = other RNA

SEQ ID NO: 8442 - RNA, 5797 nt, synthetic construct; identical to SEQ ID NO: 6845
  modified_base 1..5797: mod_base = OTHER; note = Each t is m1f
  source 1..5797: mol_type = other RNA

SEQ ID NO: 8443 - RNA, 5797 nt, synthetic construct; identical to SEQ ID NO: 6846
  modified_base 1..5797: mod_base = OTHER; note = Each t is m1f
  source 1..5797: mol_type = other RNA

SEQ ID NO: 8444 - RNA, 5797 nt, synthetic construct; identical to SEQ ID NO: 6847
  modified_base 1..5797: mod_base = OTHER; note = Each t is m1f
  source 1..5797: mol_type = other RNA

SEQ ID NO: 8445 - RNA, 5797 nt, synthetic construct; identical to SEQ ID NO: 6848
  modified_base 1..5797: mod_base = OTHER; note = Each t is m1f
  source 1..5797: mol_type = other RNA

SEQ ID NO: 8446 - RNA, 5797 nt, synthetic construct; identical to SEQ ID NO: 6849
  modified_base 1..5797: mod_base = OTHER; note = Each t is m1f
  source 1..5797: mol_type = other RNA

SEQ ID NO: 8447 - RNA, 5797 nt, synthetic construct; identical to SEQ ID NO: 6850
  modified_base 1..5797: mod_base = OTHER; note = Each t is m1f
  source 1..5797: mol_type = other RNA

SEQ ID NO: 8448 - RNA, 5797 nt, synthetic construct; identical to SEQ ID NO: 6851
  modified_base 1..5797: mod_base = OTHER; note = Each t is m1f
  source 1..5797: mol_type = other RNA

SEQ ID NO: 8449 - RNA, 5797 nt, synthetic construct; identical to SEQ ID NO: 6852
  modified_base 1..5797: mod_base = OTHER; note = Each t is m1f
  source 1..5797: mol_type = other RNA

SEQ ID NO: 8450 - RNA, 5797 nt, synthetic construct; identical to SEQ ID NO: 6853
  modified_base 1..5797: mod_base = OTHER; note = Each t is m1f
  source 1..5797: mol_type = other RNA

SEQ ID NO: 8451 - RNA, 5797 nt, synthetic construct; identical to SEQ ID NO: 6854
  modified_base 1..5797: mod_base = OTHER; note = Each t is m1f
  source 1..5797: mol_type = other RNA

SEQ ID NO: 8452 - RNA, 5797 nt, synthetic construct; identical to SEQ ID NO: 6855
  modified_base 1..5797: mod_base = OTHER; note = Each t is m1f
  source 1..5797: mol_type = other RNA

SEQ ID NO: 8453 - RNA, 5797 nt, synthetic construct; identical to SEQ ID NO: 6856
  modified_base 1..5797: mod_base = OTHER; note = Each t is m1f
  source 1..5797: mol_type = other RNA

SEQ ID NO: 8454 - RNA, 5797 nt, synthetic construct; identical to SEQ ID NO: 6857
  modified_base 1..5797: mod_base = OTHER; note = Each t is m1f
  source 1..5797: mol_type = other RNA

SEQ ID NO: 8455 - RNA, 5797 nt, synthetic construct; identical to SEQ ID NO: 6858
  modified_base 1..5797: mod_base = OTHER; note = Each t is m1f
  source 1..5797: mol_type = other RNA

SEQ ID NO: 8456 - RNA, 5797 nt, synthetic construct; identical to SEQ ID NO: 6859
  modified_base 1..5797: mod_base = OTHER; note = Each t is m1f
  source 1..5797: mol_type = other RNA

SEQ ID NO: 8457 - RNA, 5797 nt, synthetic construct; identical to SEQ ID NO: 6860
  modified_base 1..5797: mod_base = OTHER; note = Each t is m1f
  source 1..5797: mol_type = other RNA

SEQ ID NO: 8458 - RNA, 5797 nt, synthetic construct; identical to SEQ ID NO: 6861
  modified_base 1..5797: mod_base = OTHER; note = Each t is m1f
  source 1..5797: mol_type = other RNA

SEQ ID NO: 8459 - RNA, 5797 nt, synthetic construct; identical to SEQ ID NO: 6862
  modified_base 1..5797: mod_base = OTHER; note = Each t is m1f
  source 1..5797: mol_type = other RNA

SEQ ID NO: 8460 - RNA, 5797 nt, synthetic construct; identical to SEQ ID NO: 6863
  modified_base 1..5797: mod_base = OTHER; note = Each t is m1f
  source 1..5797: mol_type = other RNA

SEQ ID NO: 8461 - RNA, 5797 nt, synthetic construct; identical to SEQ ID NO: 6864
  modified_base 1..5797: mod_base = OTHER; note = Each t is m1f
  source 1..5797: mol_type = other RNA

SEQ ID NO: 8462 - RNA, 5797 nt, synthetic construct; identical to SEQ ID NO: 6865
  modified_base 1..5797: mod_base = OTHER; note = Each t is m1f
  source 1..5797: mol_type = other RNA

SEQ ID NO: 8463 - RNA, 5797 nt, synthetic construct; identical to SEQ ID NO: 6866
  modified_base 1..5797: mod_base = OTHER; note = Each t is m1f
  source 1..5797: mol_type = other RNA

SEQ ID NO: 8464 - RNA, 5797 nt, synthetic construct; identical to SEQ ID NO: 6867
  modified_base 1..5797: mod_base = OTHER; note = Each t is m1f
  source 1..5797: mol_type = other RNA

SEQ ID NO: 8465 - RNA, 5797 nt, synthetic construct; identical to SEQ ID NO: 6868
  modified_base 1..5797: mod_base = OTHER; note = Each t is m1f
  source 1..5797: mol_type = other RNA

SEQ ID NO: 8466 - RNA, 5797 nt, synthetic construct; identical to SEQ ID NO: 6869
  modified_base 1..5797: mod_base = OTHER; note = Each t is m1f
  source 1..5797: mol_type = other RNA

SEQ ID NO: 8467 - RNA, 5797 nt, synthetic construct; identical to SEQ ID NO: 6870
  modified_base 1..5797: mod_base = OTHER; note = Each t is m1f
  source 1..5797: mol_type = other RNA

SEQ ID NO: 8468 - RNA, 5797 nt, synthetic construct; identical to SEQ ID NO: 6871
  modified_base 1..5797: mod_base = OTHER; note = Each t is m1f
  source 1..5797: mol_type = other RNA

SEQ ID NO: 8469 - RNA, 5830 nt, synthetic construct; identical to SEQ ID NO: 6872
  modified_base 1..5797: mod_base = OTHER; note = Each t is m1f
  source 1..5830: mol_type = other RNA

SEQ ID NO: 8470 - RNA, 5797 nt, synthetic construct; identical to SEQ ID NO: 6873
  modified_base 1..5797: mod_base = OTHER; note = Each t is m1f
  source 1..5797: mol_type = other RNA

SEQ ID NO: 8471 - RNA, 5794 nt, synthetic construct; identical to SEQ ID NO: 6874
  modified_base 1..5794: mod_base = OTHER; note = Each t is m1f
  source 1..5794: mol_type = other RNA

SEQ ID NO: 8472 - RNA, 5797 nt, synthetic construct; identical to SEQ ID NO: 6875
  modified_base 1..5797: mod_base = OTHER; note = Each t is m1f
  source 1..5797: mol_type = other RNA

SEQ ID NO: 8473 - RNA, 5797 nt, synthetic construct; identical to SEQ ID NO: 6876
  modified_base 1..5797: mod_base = OTHER; note = Each t is m1f
  source 1..5797: mol_type = other RNA

SEQ ID NO: 8474 - RNA, 5797 nt, synthetic construct; identical to SEQ ID NO: 6877
  modified_base 1..5797: mod_base = OTHER; note = Each t is m1f
  source 1..5797: mol_type = other RNA

SEQ ID NO: 8475 - RNA, 5797 nt, synthetic construct; identical to SEQ ID NO: 6878
  modified_base 1..5797: mod_base = OTHER; note = Each t is m1f
  source 1..5797: mol_type = other RNA

SEQ ID NO: 8476 - RNA, 5797 nt, synthetic construct; identical to SEQ ID NO: 6879
  modified_base 1..5797: mod_base = OTHER; note = Each t is m1f
  source 1..5797: mol_type = other RNA

SEQ ID NO: 8477 - RNA, 5797 nt, synthetic construct; identical to SEQ ID NO: 6880
  modified_base 1..5797: mod_base = OTHER; note = Each t is m1f
  source 1..5797: mol_type = other RNA

SEQ ID NO: 8478 - RNA, 5797 nt, synthetic construct; identical to SEQ ID NO: 6881
  modified_base 1..5797: mod_base = OTHER; note = Each t is m1f
  source 1..5797: mol_type = other RNA

SEQ ID NO: 8479 - RNA, 5797 nt, synthetic construct; identical to SEQ ID NO: 6882
  modified_base 1..5797: mod_base = OTHER; note = Each t is m1f
  source 1..5797: mol_type = other RNA

SEQ ID NO: 8480 - RNA, 5797 nt, synthetic construct; identical to SEQ ID NO: 6883
  modified_base 1..5797: mod_base = OTHER; note = Each t is m1f
  source 1..5797: mol_type = other RNA

SEQ ID NO: 8481 - RNA, 5797 nt, synthetic construct; identical to SEQ ID NO: 6884
  modified_base 1..5797: mod_base = OTHER; note = Each t is m1f
  source 1..5797: mol_type = other RNA

SEQ ID NO: 8482 - RNA, 5797 nt, synthetic construct; identical to SEQ ID NO: 6885
  modified_base 1..5797: mod_base = OTHER; note = Each t is m1f
  source 1..5797: mol_type = other RNA

SEQ ID NO: 8483 - RNA, 5797 nt, synthetic construct; identical to SEQ ID NO: 6886
  modified_base 1..5797: mod_base = OTHER; note = Each t is m1f
  source 1..5797: mol_type = other RNA

SEQ ID NO: 8484 - RNA, 5797 nt, synthetic construct; identical to SEQ ID NO: 6887
  modified_base 1..5797: mod_base = OTHER; note = Each t is m1f
  source 1..5797: mol_type = other RNA

SEQ ID NO: 8485 - RNA, 5797 nt, synthetic construct; identical to SEQ ID NO: 6888
  modified_base 1..5797: mod_base = OTHER; note = Each t is m1f
  source 1..5797: mol_type = other RNA

SEQ ID NO: 8486 - RNA, 5797 nt, synthetic construct; identical to SEQ ID NO: 6889
  modified_base 1..5797: mod_base = OTHER; note = Each t is m1f
  source 1..5797: mol_type = other RNA

SEQ ID NO: 8487 - RNA, 5800 nt, synthetic construct; identical to SEQ ID NO: 6890
  modified_base 1..5797: mod_base = OTHER; note = Each t is m1f
  source 1..5800: mol_type = other RNA

SEQ ID NO: 8488 - RNA, 5797 nt, synthetic construct; identical to SEQ ID NO: 6891
  modified_base 1..5797: mod_base = OTHER; note = Each t is m1f
  source 1..5797: mol_type = other RNA

SEQ ID NO: 8489 - RNA, 5797 nt, synthetic construct; identical to SEQ ID NO: 6892
  modified_base 1..5797: mod_base = OTHER; note = Each t is m1f
  source 1..5797: mol_type = other RNA

SEQ ID NO: 8490 - RNA, 5797 nt, synthetic construct; identical to SEQ ID NO: 6893
  modified_base 1..5797: mod_base = OTHER; note = Each t is m1f
  source 1..5797: mol_type = other RNA

SEQ ID NO: 8491 - RNA, 5797 nt, synthetic construct; identical to SEQ ID NO: 6894
  modified_base 1..5797: mod_base = OTHER; note = Each t is m1f
  source 1..5797: mol_type = other RNA

SEQ ID NO: 8492 - RNA, 5797 nt, synthetic construct; identical to SEQ ID NO: 6895
  modified_base 1..5797: mod_base = OTHER; note = Each t is m1f
  source 1..5797: mol_type = other RNA

SEQ ID NO: 8493 - RNA, 5797 nt, synthetic construct; identical to SEQ ID NO: 6896
  modified_base 1..5797: mod_base = OTHER; note = Each t is m1f
  source 1..5797: mol_type = other RNA

SEQ ID NO: 8494 - RNA, 5797 nt, synthetic construct; identical to SEQ ID NO: 6897
  modified_base 1..5797: mod_base = OTHER; note = Each t is m1f
  source 1..5797: mol_type = other RNA

SEQ ID NO: 8495 - RNA, 5797 nt, synthetic construct; identical to SEQ ID NO: 6898
  modified_base 1..5797: mod_base = OTHER; note = Each t is m1f
  source 1..5797: mol_type = other RNA

SEQ ID NO: 8496 - RNA, 5797 nt, synthetic construct; identical to SEQ ID NO: 6899
  modified_base 1..5797: mod_base = OTHER; note = Each t is m1f
  source 1..5797: mol_type = other RNA

SEQ ID NO: 8497 - RNA, 5797 nt, synthetic construct; identical to SEQ ID NO: 6900
  modified_base 1..5797: mod_base = OTHER; note = Each t is m1f
  source 1..5797: mol_type = other RNA

SEQ ID NO: 8498 - RNA, 5797 nt, synthetic construct; identical to SEQ ID NO: 6901
  modified_base 1..5797: mod_base = OTHER; note = Each t is m1f
  source 1..5797: mol_type = other RNA

SEQ ID NO: 8499 - RNA, 5797 nt, synthetic construct; identical to SEQ ID NO: 6902
  modified_base 1..5797: mod_base = OTHER; note = Each t is m1f
  source 1..5797: mol_type = other RNA

SEQ ID NO: 8500 - RNA, 5797 nt, synthetic construct; identical to SEQ ID NO: 6903
  modified_base 1..5797: mod_base = OTHER; note = Each t is m1f
  source 1..5797: mol_type = other RNA

SEQ ID NO: 8501 - RNA, 5797 nt, synthetic construct; identical to SEQ ID NO: 6904
  modified_base 1..5797: mod_base = OTHER; note = Each t is m1f
  source 1..5797: mol_type = other RNA

SEQ ID NO: 8502 - RNA, 5797 nt, synthetic construct; identical to SEQ ID NO: 6905
  modified_base 1..5797: mod_base = OTHER; note = Each t is m1f
  source 1..5797: mol_type = other RNA

SEQ ID NO: 8503 - RNA, 5797 nt, synthetic construct; identical to SEQ ID NO: 6906
  modified_base 1..5797: mod_base = OTHER; note = Each t is m1f
  source 1..5797: mol_type = other RNA

SEQ ID NO: 8504 - RNA, 5797 nt, synthetic construct; identical to SEQ ID NO: 6907
  modified_base 1..5797: mod_base = OTHER; note = Each t is m1f
  source 1..5797: mol_type = other RNA

SEQ ID NO: 8505 - RNA, 5797 nt, synthetic construct; identical to SEQ ID NO: 6908
  modified_base 1..5797: mod_base = OTHER; note = Each t is m1f
  source 1..5797: mol_type = other RNA

SEQ ID NO: 8506 - RNA, 5797 nt, synthetic construct; identical to SEQ ID NO: 6909
  modified_base 1..5797: mod_base = OTHER; note = Each t is m1f
  source 1..5797: mol_type = other RNA

SEQ ID NO: 8507 - RNA, 5797 nt, synthetic construct; identical to SEQ ID NO: 6910
  modified_base 1..5797: mod_base = OTHER; note = Each t is m1f
  source 1..5797: mol_type = other RNA

SEQ ID NO: 8508 - RNA, 5797 nt, synthetic construct; identical to SEQ ID NO: 6911
  modified_base 1..5797: mod_base = OTHER; note = Each t is m1f
  source 1..5797: mol_type = other RNA

SEQ ID NO: 8509 - RNA, 5797 nt, synthetic construct; identical to SEQ ID NO: 6912
  modified_base 1..5797: mod_base = OTHER; note = Each t is m1f
  source 1..5797: mol_type = other RNA

SEQ ID NO: 8510 - RNA, 5797 nt, synthetic construct; identical to SEQ ID NO: 6913
  modified_base 1..5797: mod_base = OTHER; note = Each t is m1f
  source 1..5797: mol_type = other RNA

SEQ ID NO: 8511 - RNA, 5797 nt, synthetic construct; identical to SEQ ID NO: 6914
  modified_base 1..5797: mod_base = OTHER; note = Each t is m1f
  source 1..5797: mol_type = other RNA

SEQ ID NO: 8512 - RNA, 5797 nt, synthetic construct; identical to SEQ ID NO: 6915
  modified_base 1..5797: mod_base = OTHER; note = Each t is m1f
  source 1..5797: mol_type = other RNA

SEQ ID NO: 8513 - RNA, 5797 nt, synthetic construct; identical to SEQ ID NO: 6916
  modified_base 1..5797: mod_base = OTHER; note = Each t is m1f
  source 1..5797: mol_type = other RNA

SEQ ID NO: 8514 - RNA, 5797 nt, synthetic construct; identical to SEQ ID NO: 6917
  modified_base 1..5797: mod_base = OTHER; note = Each t is m1f
  source 1..5797: mol_type = other RNA

SEQ ID NO: 8515 - RNA, 5797 nt, synthetic construct; identical to SEQ ID NO: 6918
  modified_base 1..5797: mod_base = OTHER; note = Each t is m1f
  source 1..5797: mol_type = other RNA

SEQ ID NO: 8516 - RNA, 5797 nt, synthetic construct; identical to SEQ ID NO: 6919
  modified_base 1..5797: mod_base = OTHER; note = Each t is m1f
  source 1..5797: mol_type = other RNA

SEQ ID NO: 8517 - RNA, 5797 nt, synthetic construct; identical to SEQ ID NO: 6920
  modified_base 1..5797: mod_base = OTHER; note = Each t is m1f
  source 1..5797: mol_type = other RNA

SEQ ID NO: 8518 - RNA, 5797 nt, synthetic construct; identical to SEQ ID NO: 6921
  modified_base 1..5797: mod_base = OTHER; note = Each t is m1f
  source 1..5797: mol_type = other RNA

SEQ ID NO: 8519 - RNA, 5797 nt, synthetic construct; identical to SEQ ID NO: 6922
  modified_base 1..5797: mod_base = OTHER; note = Each t is m1f
  source 1..5797: mol_type = other RNA

SEQ ID NO: 8520 - RNA, 5797 nt, synthetic construct; identical to SEQ ID NO: 6923
  modified_base 1..5797: mod_base = OTHER; note = Each t is m1f
  source 1..5797: mol_type = other RNA

SEQ ID NO: 8521 - RNA, 5797 nt, synthetic construct; identical to SEQ ID NO: 6924
  modified_base 1..5797: mod_base = OTHER; note = Each t is m1f
  source 1..5797: mol_type = other RNA

SEQ ID NO: 8522 - RNA, 5797 nt, synthetic construct; identical to SEQ ID NO: 6925
  modified_base 1..5797: mod_base = OTHER; note = Each t is m1f
  source 1..5797: mol_type = other RNA

SEQ ID NO: 8523 - RNA, 5797 nt, synthetic construct; identical to SEQ ID NO: 6926
  modified_base 1..5797: mod_base = OTHER; note = Each t is m1f
  source 1..5797: mol_type = other RNA

SEQ ID NO: 8524 - RNA, 5797 nt, synthetic construct; identical to SEQ ID NO: 6927
  modified_base 1..5797: mod_base = OTHER; note = Each t is m1f
  source 1..5797: mol_type = other RNA

SEQ ID NO: 8525 - RNA, 5797 nt, synthetic construct; identical to SEQ ID NO: 6928
  modified_base 1..5797: mod_base = OTHER; note = Each t is m1f
  source 1..5797: mol_type = other RNA

SEQ ID NO: 8526 - RNA, 5797 nt, synthetic construct; identical to SEQ ID NO: 6929
  modified_base 1..5797: mod_base = OTHER; note = Each t is m1f
  source 1..5797: mol_type = other RNA

SEQ ID NO: 8527 - RNA, 5797 nt, synthetic construct; identical to SEQ ID NO: 6930
  modified_base 1..5797: mod_base = OTHER; note = Each t is m1f
  source 1..5797: mol_type = other RNA

SEQ ID NO: 8528 - RNA, 5797 nt, synthetic construct; identical to SEQ ID NO: 6931
  modified_base 1..5797: mod_base = OTHER; note = Each t is m1f
  source 1..5797: mol_type = other RNA

SEQ ID NO: 8529 - RNA, 5797 nt, synthetic construct; identical to SEQ ID NO: 6932
  modified_base 1..5797: mod_base = OTHER; note = Each t is m1f
  source 1..5797: mol_type = other RNA

SEQ ID NO: 8530 - RNA, 5797 nt, synthetic construct; identical to SEQ ID NO: 6933
  modified_base 1..5797: mod_base = OTHER; note = Each t is m1f
  source 1..5797: mol_type = other RNA

SEQ ID NO: 8531 - RNA, 5797 nt, synthetic construct; identical to SEQ ID NO: 6934
  modified_base 1..5797: mod_base = OTHER; note = Each t is m1f
  source 1..5797: mol_type = other RNA

SEQ ID NO: 8532 - RNA, 5797 nt, synthetic construct; identical to SEQ ID NO: 6935
  modified_base 1..5797: mod_base = OTHER; note = Each t is m1f
  source 1..5797: mol_type = other RNA

SEQ ID NO: 8533 - RNA, 5797 nt, synthetic construct; identical to SEQ ID NO: 6936
  modified_base 1..5797: mod_base = OTHER; note = Each t is m1f
  source 1..5797: mol_type = other RNA

SEQ ID NO: 8534 - RNA, 5797 nt, synthetic construct; identical to SEQ ID NO: 6937
  modified_base 1..5797: mod_base = OTHER; note = Each t is m1f
  source 1..5797: mol_type = other RNA

SEQ ID NO: 8535 - RNA, 5797 nt, synthetic construct; identical to SEQ ID NO: 6938
  modified_base 1..5797: mod_base = OTHER; note = Each t is m1f
  source 1..5797: mol_type = other RNA

SEQ ID NO: 8536 - RNA, 5797 nt, synthetic construct; identical to SEQ ID NO: 6939
  modified_base 1..5797: mod_base = OTHER; note = Each t is m1f
  source 1..5797: mol_type = other RNA

SEQ ID NO: 8537 - RNA, 5797 nt, synthetic construct; identical to SEQ ID NO: 6940
  modified_base 1..5797: mod_base = OTHER; note = Each t is m1f
  source 1..5797: mol_type = other RNA

SEQ ID NO: 8538 - RNA, 5794 nt, synthetic construct; identical to SEQ ID NO: 6941
  modified_base 1..5794: mod_base = OTHER; note = Each t is m1f
  source 1..5794: mol_type = other RNA

SEQ ID NO: 8539 - RNA, 5797 nt, synthetic construct; identical to SEQ ID NO: 6942
  modified_base 1..5797: mod_base = OTHER; note = Each t is m1f
  source 1..5797: mol_type = other RNA

SEQ ID NO: 8540 - RNA, 5797 nt, synthetic construct; identical to SEQ ID NO: 6943
  modified_base 1..5797: mod_base = OTHER; note = Each t is m1f
  source 1..5797: mol_type = other RNA

SEQ ID NO: 8541 - RNA, 5797 nt, synthetic construct; identical to SEQ ID NO: 6944
  modified_base 1..5797: mod_base = OTHER; note = Each t is m1f
  source 1..5797: mol_type = other RNA

SEQ ID NO: 8542 - RNA, 5797 nt, synthetic construct; identical to SEQ ID NO: 6945
  modified_base 1..5797: mod_base = OTHER; note = Each t is m1f
  source 1..5797: mol_type = other RNA

SEQ ID NO: 8543 - RNA, 5797 nt, synthetic construct; identical to SEQ ID NO: 6946
  modified_base 1..5797: mod_base = OTHER; note = Each t is m1f
  source 1..5797: mol_type = other RNA

SEQ ID NO: 8544 - RNA, 5797 nt, synthetic construct; identical to SEQ ID NO: 6947
  modified_base 1..5797: mod_base = OTHER; note = Each t is m1f
  source 1..5797: mol_type = other RNA

SEQ ID NO: 8545 - RNA, 5797 nt, synthetic construct; identical to SEQ ID NO: 6948
  modified_base 1..5797: mod_base = OTHER; note = Each t is m1f
  source 1..5797: mol_type = other RNA

SEQ ID NO: 8546 - RNA, 5797 nt, synthetic construct; identical to SEQ ID NO: 6949
  modified_base 1..5797: mod_base = OTHER; note = Each t is m1f
  source 1..5797: mol_type = other RNA

SEQ ID NO: 8547 - RNA, 5797 nt, synthetic construct; identical to SEQ ID NO: 6950
  modified_base 1..5797: mod_base = OTHER; note = Each t is m1f
  source 1..5797: mol_type = other RNA

SEQ ID NO: 8548 - RNA, 5797 nt, synthetic construct; identical to SEQ ID NO: 6951
  modified_base 1..5797: mod_base = OTHER; note = Each t is m1f
  source 1..5797: mol_type = other RNA

SEQ ID NO: 8549 - RNA, 5797 nt, synthetic construct; identical to SEQ ID NO: 6952
  modified_base 1..5797: mod_base = OTHER; note = Each t is m1f
  source 1..5797: mol_type = other RNA

SEQ ID NO: 8550 - RNA, 5797 nt, synthetic construct; identical to SEQ ID NO: 6953
  modified_base 1..5797: mod_base = OTHER; note = Each t is m1f
  source 1..5797: mol_type = other RNA

SEQ ID NO: 8551 - RNA, 5797 nt, synthetic construct; identical to SEQ ID NO: 6954
  modified_base 1..5797: mod_base = OTHER; note = Each t is m1f
  source 1..5797: mol_type = other RNA

SEQ ID NO: 8552 - RNA, 5797 nt, synthetic construct; identical to SEQ ID NO: 6955
  modified_base 1..5797: mod_base = OTHER; note = Each t is m1f
  source 1..5797: mol_type = other RNA

SEQ ID NO: 8553 - RNA, 5797 nt, synthetic construct; identical to SEQ ID NO: 6956
  modified_base 1..5797: mod_base = OTHER; note = Each t is m1f
  source 1..5797: mol_type = other RNA

SEQ ID NO: 8554 - RNA, 5797 nt, synthetic construct; identical to SEQ ID NO: 6957
  modified_base 1..5797: mod_base = OTHER; note = Each t is m1f
  source 1..5797: mol_type = other RNA

SEQ ID NO: 8555 - RNA, 5797 nt, synthetic construct; identical to SEQ ID NO: 6958
  modified_base 1..5797: mod_base = OTHER; note = Each t is m1f
  source 1..5797: mol_type = other RNA

SEQ ID NO: 8556 - RNA, 5797 nt, synthetic construct; identical to SEQ ID NO: 6959
  modified_base 1..5797: mod_base = OTHER; note = Each t is m1f
  source 1..5797: mol_type = other RNA

SEQ ID NO: 8557 - RNA, 5797 nt, synthetic construct; identical to SEQ ID NO: 6960
  modified_base 1..5797: mod_base = OTHER; note = Each t is m1f
  source 1..5797: mol_type = other RNA

SEQ ID NO: 8558 - RNA, 5797 nt, synthetic construct; identical to SEQ ID NO: 6961
  modified_base 1..5797: mod_base = OTHER; note = Each t is m1f
  source 1..5797: mol_type = other RNA

SEQ ID NO: 8559 - RNA, 5797 nt, synthetic construct; identical to SEQ ID NO: 6962
  modified_base 1..5797: mod_base = OTHER; note = Each t is m1f
  source 1..5797: mol_type = other RNA

SEQ ID NO: 8560 - RNA, 5797 nt, synthetic construct; identical to SEQ ID NO: 6963
  modified_base 1..5797: mod_base = OTHER; note = Each t is m1f
  source 1..5797: mol_type = other RNA

SEQ ID NO: 8561 - RNA, 5797 nt, synthetic construct; identical to SEQ ID NO: 6964
  modified_base 1..5797: mod_base = OTHER; note = Each t is m1f
  source 1..5797: mol_type = other RNA

SEQ ID NO: 8562 - RNA, 5797 nt, synthetic construct; identical to SEQ ID NO: 6965
  modified_base 1..5797: mod_base = OTHER; note = Each t is m1f
  source 1..5797: mol_type = other RNA

SEQ ID NO: 8563 - RNA, 5797 nt, synthetic construct; identical to SEQ ID NO: 6966
  modified_base 1..5797: mod_base = OTHER; note = Each t is m1f
  source 1..5797: mol_type = other RNA

SEQ ID NO: 8564 - RNA, 5797 nt, synthetic construct; identical to SEQ ID NO: 6967
  modified_base 1..5797: mod_base = OTHER; note = Each t is m1f
  source 1..5797: mol_type = other RNA

SEQ ID NO: 8565 - RNA, 5797 nt, synthetic construct; identical to SEQ ID NO: 6968
  modified_base 1..5797: mod_base = OTHER; note = Each t is m1f
  source 1..5797: mol_type = other RNA

SEQ ID NO: 8566 - RNA, 5797 nt, synthetic construct; identical to SEQ ID NO: 6969
  modified_base 1..5797: mod_base = OTHER; note = Each t is m1f
  source 1..5797: mol_type = other RNA

SEQ ID NO: 8567 - RNA, 5797 nt, synthetic construct; identical to SEQ ID NO: 6970
  modified_base 1..5797: mod_base = OTHER; note = Each t is m1f
  source 1..5797: mol_type = other RNA

SEQ ID NO: 8568 - RNA, 5797 nt, synthetic construct; identical to SEQ ID NO: 6971
  modified_base 1..5797: mod_base = OTHER; note = Each t is m1f
  source 1..5797: mol_type = other RNA

SEQ ID NO: 8569 - RNA, 5797 nt, synthetic construct; identical to SEQ ID NO: 6972
  modified_base 1..5797: mod_base = OTHER; note = Each t is m1f
  source 1..5797: mol_type = other RNA

SEQ ID NO: 8570 - RNA, 5797 nt, synthetic construct; identical to SEQ ID NO: 6973
  modified_base 1..5797: mod_base = OTHER; note = Each t is m1f
  source 1..5797: mol_type = other RNA

SEQ ID NO: 8571 - RNA, 5797 nt, synthetic construct; identical to SEQ ID NO: 6974
  modified_base 1..5797: mod_base = OTHER; note = Each t is m1f
  source 1..5797: mol_type = other RNA

SEQ ID NO: 8572 - RNA, 5797 nt, synthetic construct; identical to SEQ ID NO: 6975
  modified_base 1..5797: mod_base = OTHER; note = Each t is m1f
  source 1..5797: mol_type = other RNA

SEQ ID NO: 8573 - RNA, 5797 nt, synthetic construct; identical to SEQ ID NO: 6976
  modified_base 1..5797: mod_base = OTHER; note = Each t is m1f
  source 1..5797: mol_type = other RNA

SEQ ID NO: 8574 - RNA, 5797 nt, synthetic construct; identical to SEQ ID NO: 6977
  modified_base 1..5797: mod_base = OTHER; note = Each t is m1f
  source 1..5797: mol_type = other RNA

SEQ ID NO: 8575 - RNA, 5797 nt, synthetic construct; identical to SEQ ID NO: 6978
  modified_base 1..5797: mod_base = OTHER; note = Each t is m1f
  source 1..5797: mol_type = other RNA

SEQ ID NO: 8576 - RNA, 5797 nt, synthetic construct; identical to SEQ ID NO: 6979
  modified_base 1..5797: mod_base = OTHER; note = Each t is m1f
  source 1..5797: mol_type = other RNA

SEQ ID NO: 8577 - RNA, 5797 nt, synthetic construct; identical to SEQ ID NO: 6980
  modified_base 1..5797: mod_base = OTHER; note = Each t is m1f
  source 1..5797: mol_type = other RNA

SEQ ID NO: 8578 - RNA, 5797 nt, synthetic construct; identical to SEQ ID NO: 6981
  modified_base 1..5797: mod_base = OTHER; note = Each t is m1f
  source 1..5797: mol_type = other RNA

SEQ ID NO: 8579 - RNA, 5797 nt, synthetic construct; identical to SEQ ID NO: 6982
  modified_base 1..5797: mod_base = OTHER; note = Each t is m1f
  source 1..5797: mol_type = other RNA

SEQ ID NO: 8580 - RNA, 5797 nt, synthetic construct; identical to SEQ ID NO: 6983
  modified_base 1..5797: mod_base = OTHER; note = Each t is m1f
  source 1..5797: mol_type = other RNA

SEQ ID NO: 8581 - RNA, 5797 nt, synthetic construct; identical to SEQ ID NO: 6984
  modified_base 1..5797: mod_base = OTHER; note = Each t is m1f
  source 1..5797: mol_type = other RNA

SEQ ID NO: 8582 - RNA, 5797 nt, synthetic construct; identical to SEQ ID NO: 6985
  modified_base 1..5797: mod_base = OTHER; note = Each t is m1f
  source 1..5797: mol_type = other RNA

SEQ ID NO: 8583 - RNA, 5797 nt, synthetic construct; identical to SEQ ID NO: 6986
  modified_base 1..5797: mod_base = OTHER; note = Each t is m1f
  source 1..5797: mol_type = other RNA

SEQ ID NO: 8584 - RNA, 5797 nt, synthetic construct; identical to SEQ ID NO: 6987
  modified_base 1..5797: mod_base = OTHER; note = Each t is m1f
  source 1..5797: mol_type = other RNA

SEQ ID NO: 8585 - RNA, 5797 nt, synthetic construct; identical to SEQ ID NO: 6988
  modified_base 1..5797: mod_base = OTHER; note = Each t is m1f
  source 1..5797: mol_type = other RNA

SEQ ID NO: 8586 - RNA, 5797 nt, synthetic construct; identical to SEQ ID NO: 6989
  modified_base 1..5797: mod_base = OTHER; note = Each t is m1f
  source 1..5797: mol_type = other RNA

SEQ ID NO: 8587 - RNA, 5797 nt, synthetic construct; identical to SEQ ID NO: 6990
  modified_base 1..5797: mod_base = OTHER; note = Each t is m1f
  source 1..5797: mol_type = other RNA

SEQ ID NO: 8588 - RNA, 5797 nt, synthetic construct; identical to SEQ ID NO: 6991
  modified_base 1..5797: mod_base = OTHER; note = Each t is m1f
  source 1..5797: mol_type = other RNA

SEQ ID NO: 8589 - RNA, 5797 nt, synthetic construct; identical to SEQ ID NO: 6992
  modified_base 1..5797: mod_base = OTHER; note = Each t is m1f
  source 1..5797: mol_type = other RNA

SEQ ID NO: 8590 - RNA, 5794 nt, synthetic construct; identical to SEQ ID NO: 6993
  modified_base 1..5794: mod_base = OTHER; note = Each t is m1f
  source 1..5794: mol_type = other RNA

SEQ ID NO: 8591 - RNA, 5797 nt, synthetic construct; identical to SEQ ID NO: 6994
  modified_base 1..5797: mod_base = OTHER; note = Each t is m1f
  source 1..5797: mol_type = other RNA

SEQ ID NO: 8592 - RNA, 5797 nt, synthetic construct; identical to SEQ ID NO: 6995
  modified_base 1..5797: mod_base = OTHER; note = Each t is m1f
  source 1..5797: mol_type = other RNA

SEQ ID NO: 8593 - RNA, 5797 nt, synthetic construct; identical to SEQ ID NO: 6996
  modified_base 1..5797: mod_base = OTHER; note = Each t is m1f
  source 1..5797: mol_type = other RNA

SEQ ID NO: 8594 - RNA, 5797 nt, synthetic construct; identical to SEQ ID NO: 6997
  modified_base 1..5797: mod_base = OTHER; note = Each t is m1f
  source 1..5797: mol_type = other RNA

SEQ ID NO: 8595 - RNA, 5797 nt, synthetic construct; identical to SEQ ID NO: 6998
  modified_base 1..5797: mod_base = OTHER; note = Each t is m1f
  source 1..5797: mol_type = other RNA

SEQ ID NO: 8596 - RNA, 5797 nt, synthetic construct; identical to SEQ ID NO: 6999
  modified_base 1..5797: mod_base = OTHER; note = Each t is m1f
  source 1..5797: mol_type = other RNA

SEQ ID NO: 8597 - RNA, 5797 nt, synthetic construct; identical to SEQ ID NO: 7000
  modified_base 1..5797: mod_base = OTHER; note = Each t is m1f
  source 1..5797: mol_type = other RNA

SEQ ID NO: 8598 - RNA, 5797 nt, synthetic construct; identical to SEQ ID NO: 7001
  modified_base 1..5797: mod_base = OTHER; note = Each t is m1f
  source 1..5797: mol_type = other RNA

SEQ ID NO: 8599 - RNA, 5797 nt, synthetic construct; identical to SEQ ID NO: 7002
  modified_base 1..5797: mod_base = OTHER; note = Each t is m1f
  source 1..5797: mol_type = other RNA

SEQ ID NO: 8600 - RNA, 5797 nt, synthetic construct; identical to SEQ ID NO: 7003
  modified_base 1..5797: mod_base = OTHER; note = Each t is m1f
  source 1..5797: mol_type = other RNA

SEQ ID NO: 8601 - RNA, 5797 nt, synthetic construct; identical to SEQ ID NO: 7004
  modified_base 1..5797: mod_base = OTHER; note = Each t is m1f
  source 1..5797: mol_type = other RNA

SEQ ID NO: 8602 - RNA, 5797 nt, synthetic construct; identical to SEQ ID NO: 7005
  modified_base 1..5797: mod_base = OTHER; note = Each t is m1f
  source 1..5797: mol_type = other RNA

SEQ ID NO: 8603 - RNA, 5797 nt, synthetic construct; identical to SEQ ID NO: 7006
  modified_base 1..5797: mod_base = OTHER; note = Each t is m1f
  source 1..5797: mol_type = other RNA

SEQ ID NO: 8604 - RNA, 5797 nt, synthetic construct; identical to SEQ ID NO: 7007
  modified_base 1..5797: mod_base = OTHER; note = Each t is m1f
  source 1..5797: mol_type = other RNA

SEQ ID NO: 8605 - RNA, 5797 nt, synthetic construct; identical to SEQ ID NO: 7008
  modified_base 1..5797: mod_base = OTHER; note = Each t is m1f
  source 1..5797: mol_type = other RNA

SEQ ID NO: 8606 - RNA, 5797 nt, synthetic construct; identical to SEQ ID NO: 7009
  modified_base 1..5797: mod_base = OTHER; note = Each t is m1f
  source 1..5797: mol_type = other RNA

SEQ ID NO: 8607 - RNA, 5797 nt, synthetic construct; identical to SEQ ID NO: 7010
  modified_base 1..5797: mod_base = OTHER; note = Each t is m1f
  source 1..5797: mol_type = other RNA

SEQ ID NO: 8608 - RNA, 5797 nt, synthetic construct; identical to SEQ ID NO: 7011
  modified_base 1..5797: mod_base = OTHER; note = Each t is m1f
  source 1..5797: mol_type = other RNA

SEQ ID NO: 8609 - RNA, 5797 nt, synthetic construct; identical to SEQ ID NO: 7012
  modified_base 1..5797: mod_base = OTHER; note = Each t is m1f
  source 1..5797: mol_type = other RNA

SEQ ID NO: 8610 - RNA, 5797 nt, synthetic construct; identical to SEQ ID NO: 7013
  modified_base 1..5797: mod_base = OTHER; note = Each t is m1f
  source 1..5797: mol_type = other RNA

SEQ ID NO: 8611 - RNA, 5797 nt, synthetic construct; identical to SEQ ID NO: 7014
  modified_base 1..5797: mod_base = OTHER; note = Each t is m1f
  source 1..5797: mol_type = other RNA

SEQ ID NO: 8612 - RNA, 5797 nt, synthetic construct; identical to SEQ ID NO: 7015
  modified_base 1..5797: mod_base = OTHER; note = Each t is m1f
  source 1..5797: mol_type = other RNA

SEQ ID NO: 8613 - RNA, 5797 nt, synthetic construct; identical to SEQ ID NO: 7016
  modified_base 1..5797: mod_base = OTHER; note = Each t is m1f
  source 1..5797: mol_type = other RNA

SEQ ID NO: 8614 - RNA, 5797 nt, synthetic construct; identical to SEQ ID NO: 7017
  modified_base 1..5797: mod_base = OTHER; note = Each t is m1f
  source 1..5797: mol_type = other RNA

SEQ ID NO: 8615 - RNA, 5797 nt, synthetic construct; identical to SEQ ID NO: 7018
  modified_base 1..5797: mod_base = OTHER; note = Each t is m1f
  source 1..5797: mol_type = other RNA

SEQ ID NO: 8616 - RNA, 5797 nt, synthetic construct; identical to SEQ ID NO: 7019
  modified_base 1..5797: mod_base = OTHER; note = Each t is m1f
  source 1..5797: mol_type = other RNA

SEQ ID NO: 8617 - RNA, 5797 nt, synthetic construct; identical to SEQ ID NO: 7020
  modified_base 1..5797: mod_base = OTHER; note = Each t is m1f
  source 1..5797: mol_type = other RNA

SEQ ID NO: 8618 - RNA, 5797 nt, synthetic construct; identical to SEQ ID NO: 7021
  modified_base 1..5797: mod_base = OTHER; note = Each t is m1f
  source 1..5797: mol_type = other RNA

SEQ ID NO: 8619 - RNA, 5797 nt, synthetic construct; identical to SEQ ID NO: 7022
  modified_base 1..5797: mod_base = OTHER; note = Each t is m1f
  source 1..5797: mol_type = other RNA

SEQ ID NO: 8620 - RNA, 5797 nt, synthetic construct; identical to SEQ ID NO: 7023
  modified_base 1..5797: mod_base = OTHER; note = Each t is m1f
  source 1..5797: mol_type = other RNA

SEQ ID NO: 8621 - RNA, 5797 nt, synthetic construct; identical to SEQ ID NO: 7024
  modified_base 1..5797: mod_base = OTHER; note = Each t is m1f
  source 1..5797: mol_type = other RNA

SEQ ID NO: 8622 - RNA, 5797 nt, synthetic construct; identical to SEQ ID NO: 7025
  modified_base 1..5797: mod_base = OTHER; note = Each t is m1f
  source 1..5797: mol_type = other RNA

SEQ ID NO: 8623 - RNA, 5797 nt, synthetic construct; identical to SEQ ID NO: 7026
  modified_base 1..5797: mod_base = OTHER; note = Each t is m1f
  source 1..5797: mol_type = other RNA

SEQ ID NO: 8624 - RNA, 5797 nt, synthetic construct; identical to SEQ ID NO: 7027
  modified_base 1..5797: mod_base = OTHER; note = Each t is m1f
  source 1..5797: mol_type = other RNA

SEQ ID NO: 8625 - RNA, 5797 nt, synthetic construct; identical to SEQ ID NO: 7028
  modified_base 1..5797: mod_base = OTHER; note = Each t is m1f
  source 1..5797: mol_type = other RNA

SEQ ID NO: 8626 - RNA, 5797 nt, synthetic construct; identical to SEQ ID NO: 7029
  modified_base 1..5797: mod_base = OTHER; note = Each t is m1f
  source 1..5797: mol_type = other RNA

SEQ ID NO: 8627 - RNA, 5797 nt, synthetic construct; identical to SEQ ID NO: 7030
  modified_base 1..5797: mod_base = OTHER; note = Each t is m1f
  source 1..5797: mol_type = other RNA

SEQ ID NO: 8628 - RNA, 5797 nt, synthetic construct; identical to SEQ ID NO: 7031
  modified_base 1..5797: mod_base = OTHER; note = Each t is m1f
  source 1..5797: mol_type = other RNA

SEQ ID NO: 8629 - RNA, 5803 nt, synthetic construct; identical to SEQ ID NO: 7032
  modified_base 1..5797: mod_base = OTHER; note = Each t is m1f
  source 1..5803: mol_type = other RNA

SEQ ID NO: 8630 - RNA, 5797 nt, synthetic construct; identical to SEQ ID NO: 7033
  modified_base 1..5797: mod_base = OTHER; note = Each t is m1f
  source 1..5797: mol_type = other RNA

SEQ ID NO: 8631 - RNA, 5797 nt, synthetic construct; identical to SEQ ID NO: 7034
  modified_base 1..5797: mod_base = OTHER; note = Each t is m1f
  source 1..5797: mol_type = other RNA

SEQ ID NO: 8632 - RNA, 5797 nt, synthetic construct; identical to SEQ ID NO: 7035
  modified_base 1..5797: mod_base = OTHER; note = Each t is m1f
  source 1..5797: mol_type = other RNA

SEQ ID NO: 8633 - RNA, 5797 nt, synthetic construct; identical to SEQ ID NO: 7036
  modified_base 1..5797: mod_base = OTHER; note = Each t is m1f
  source 1..5797: mol_type = other RNA

SEQ ID NO: 8634 - RNA, 5797 nt, synthetic construct; identical to SEQ ID NO: 7037
  modified_base 1..5797: mod_base = OTHER; note = Each t is m1f
  source 1..5797: mol_type = other RNA

SEQ ID NO: 8635 - RNA, 5797 nt, synthetic construct; identical to SEQ ID NO: 7038
  modified_base 1..5797: mod_base = OTHER; note = Each t is m1f
  source 1..5797: mol_type = other RNA

SEQ ID NO: 8636 - RNA, 5797 nt, synthetic construct; identical to SEQ ID NO: 7039
  modified_base 1..5797: mod_base = OTHER; note = Each t is m1f
  source 1..5797: mol_type = other RNA

SEQ ID NO: 8637 - RNA, 5797 nt, synthetic construct; identical to SEQ ID NO: 7040
  modified_base 1..5797: mod_base = OTHER; note = Each t is m1f
  source 1..5797: mol_type = other RNA

SEQ ID NO: 8638 - RNA, 5797 nt, synthetic construct; identical to SEQ ID NO: 7041
  modified_base 1..5797: mod_base = OTHER; note = Each t is m1f
  source 1..5797: mol_type = other RNA

SEQ ID NO: 8639 - RNA, 5797 nt, synthetic construct; identical to SEQ ID NO: 7042
  modified_base 1..5797: mod_base = OTHER; note = Each t is m1f
  source 1..5797: mol_type = other RNA

SEQ ID NO: 8640 - RNA, 5797 nt, synthetic construct; identical to SEQ ID NO: 7043
  modified_base 1..5797: mod_base = OTHER; note = Each t is m1f
  source 1..5797: mol_type = other RNA

SEQ ID NO: 8641 - RNA, 5797 nt, synthetic construct; identical to SEQ ID NO: 7044
  modified_base 1..5797: mod_base = OTHER; note = Each t is m1f
  source 1..5797: mol_type = other RNA

SEQ ID NO: 8642 - RNA, 5797 nt, synthetic construct; identical to SEQ ID NO: 7045
  modified_base 1..5797: mod_base = OTHER; note = Each t is m1f
  source 1..5797: mol_type = other RNA

SEQ ID NO: 8643 - RNA, 5797 nt, synthetic construct; identical to SEQ ID NO: 7046
  modified_base 1..5797: mod_base = OTHER; note = Each t is m1f
  source 1..5797: mol_type = other RNA

SEQ ID NO: 8644 - RNA, 5797 nt, synthetic construct; identical to SEQ ID NO: 7047
  modified_base 1..5797: mod_base = OTHER; note = Each t is m1f
  source 1..5797: mol_type = other RNA

SEQ ID NO: 8645 - RNA, 5794 nt, synthetic construct; identical to SEQ ID NO: 7048
  modified_base 1..5794: mod_base = OTHER; note = Each t is m1f
  source 1..5794: mol_type = other RNA

SEQ ID NO: 8646 - RNA, 5797 nt, synthetic construct; identical to SEQ ID NO: 7049
  modified_base 1..5797: mod_base = OTHER; note = Each t is m1f
  source 1..5797: mol_type = other RNA

SEQ ID NO: 8647 - RNA, 5797 nt, synthetic construct; identical to SEQ ID NO: 7050
  modified_base 1..5797: mod_base = OTHER; note = Each t is m1f
  source 1..5797: mol_type = other RNA

SEQ ID NO: 8648 - RNA, 5797 nt, synthetic construct; identical to SEQ ID NO: 7051
  modified_base 1..5797: mod_base = OTHER; note = Each t is m1f
  source 1..5797: mol_type = other RNA

SEQ ID NO: 8649 - RNA, 5797 nt, synthetic construct; identical to SEQ ID NO: 7052
  modified_base 1..5797: mod_base = OTHER; note = Each t is m1f
  source 1..5797: mol_type = other RNA

SEQ ID NO: 8650 - RNA, 5797 nt, synthetic construct; identical to SEQ ID NO: 7053
  modified_base 1..5797: mod_base = OTHER; note = Each t is m1f
  source 1..5797: mol_type = other RNA

SEQ ID NO: 8651 - RNA, 5797 nt, synthetic construct; identical to SEQ ID NO: 7054
  modified_base 1..5797: mod_base = OTHER; note = Each t is m1f
  source 1..5797: mol_type = other RNA

SEQ ID NO: 8652 - RNA, 5797 nt, synthetic construct; identical to SEQ ID NO: 7055
  modified_base 1..5797: mod_base = OTHER; note = Each t is m1f
  source 1..5797: mol_type = other RNA

SEQ ID NO: 8653 - RNA, 5797 nt, synthetic construct; identical to SEQ ID NO: 7056
  modified_base 1..5797: mod_base = OTHER; note = Each t is m1f
  source 1..5797: mol_type = other RNA

SEQ ID NO: 8654 - RNA, 5833 nt, synthetic construct; identical to SEQ ID NO: 7057
  modified_base 1..5797: mod_base = OTHER; note = Each t is m1f
  source 1..5833: mol_type = other RNA

SEQ ID NO: 8655 - RNA, 5797 nt, synthetic construct; identical to SEQ ID NO: 7058
  modified_base 1..5797: mod_base = OTHER; note = Each t is m1f
  source 1..5797: mol_type = other RNA

SEQ ID NO: 8656 - RNA, 5797 nt, synthetic construct; identical to SEQ ID NO: 7059
  modified_base 1..5797: mod_base = OTHER; note = Each t is m1f
  source 1..5797: mol_type = other RNA

SEQ ID NO: 8657 - RNA, 5797 nt, synthetic construct; identical to SEQ ID NO: 7060
  modified_base 1..5797: mod_base = OTHER; note = Each t is m1f
  source 1..5797: mol_type = other RNA

SEQ ID NO: 8658 - RNA, 5797 nt, synthetic construct; identical to SEQ ID NO: 7061
  modified_base 1..5797: mod_base = OTHER; note = Each t is m1f
  source 1..5797: mol_type = other RNA

SEQ ID NO: 8659 - RNA, 5797 nt, synthetic construct; identical to SEQ ID NO: 7062
  modified_base 1..5797: mod_base = OTHER; note = Each t is m1f
  source 1..5797: mol_type = other RNA

SEQ ID NO: 8660 - RNA, 5797 nt, synthetic construct; identical to SEQ ID NO: 7063
  modified_base 1..5797: mod_base = OTHER; note = Each t is m1f
  source 1..5797: mol_type = other RNA

SEQ ID NO: 8661 - RNA, 5797 nt, synthetic construct; identical to SEQ ID NO: 7064
  modified_base 1..5797: mod_base = OTHER; note = Each t is m1f
  source 1..5797: mol_type = other RNA

SEQ ID NO: 8662 - RNA, 5797 nt, synthetic construct; identical to SEQ ID NO: 7065
  modified_base 1..5797: mod_base = OTHER; note = Each t is m1f
  source 1..5797: mol_type = other RNA

SEQ ID NO: 8663 - RNA, 5797 nt, synthetic construct; identical to SEQ ID NO: 7066
  modified_base 1..5797: mod_base = OTHER; note = Each t is m1f
  source 1..5797: mol_type = other RNA

SEQ ID NO: 8664 - RNA, 5797 nt, synthetic construct; identical to SEQ ID NO: 7067
  modified_base 1..5797: mod_base = OTHER; note = Each t is m1f
  source 1..5797: mol_type = other RNA

SEQ ID NO: 8665 - RNA, 5896 nt, synthetic construct; identical to SEQ ID NO: 7068
  modified_base 1..5797: mod_base = OTHER; note = Each t is m1f
  source 1..5896: mol_type = other RNA

SEQ ID NO: 8666 - RNA, 5797 nt, synthetic construct; identical to SEQ ID NO: 7069
  modified_base 1..5797: mod_base = OTHER; note = Each t is m1f
  source 1..5797: mol_type = other RNA

SEQ ID NO: 8667 - RNA, 5797 nt, synthetic construct; identical to SEQ ID NO: 7070
  modified_base 1..5797: mod_base = OTHER; note = Each t is m1f
  source 1..5797: mol_type = other RNA

SEQ ID NO: 8668 - RNA, 5797 nt, synthetic construct; identical to SEQ ID NO: 7071
  modified_base 1..5797: mod_base = OTHER; note = Each t is m1f
  source 1..5797: mol_type = other RNA

SEQ ID NO: 8669 - RNA, 5797 nt, synthetic construct; identical to SEQ ID NO: 7072
  modified_base 1..5797: mod_base = OTHER; note = Each t is m1f
  source 1..5797: mol_type = other RNA

SEQ ID NO: 8670 - RNA, 5797 nt, synthetic construct; identical to SEQ ID NO: 7073
  modified_base 1..5797: mod_base = OTHER; note = Each t is m1f
  source 1..5797: mol_type = other RNA

SEQ ID NO: 8671 - RNA, 5797 nt, synthetic construct; identical to SEQ ID NO: 7074
  modified_base 1..5797: mod_base = OTHER; note = Each t is m1f
  source 1..5797: mol_type = other RNA

SEQ ID NO: 8672 - RNA, 5797 nt, synthetic construct; identical to SEQ ID NO: 7075
  modified_base 1..5797: mod_base = OTHER; note = Each t is m1f
  source 1..5797: mol_type = other RNA

SEQ ID NO: 8673 - RNA, 5797 nt, synthetic construct; identical to SEQ ID NO: 7076
  modified_base 1..5797: mod_base = OTHER; note = Each t is m1f
  source 1..5797: mol_type = other RNA

SEQ ID NO: 8674 - RNA, 5797 nt, synthetic construct; identical to SEQ ID NO: 7077
  modified_base 1..5797: mod_base = OTHER; note = Each t is m1f
  source 1..5797: mol_type = other RNA

SEQ ID NO: 8675 - RNA, 5797 nt, synthetic construct; identical to SEQ ID NO: 7078
  modified_base 1..5797: mod_base = OTHER; note = Each t is m1f
  source 1..5797: mol_type = other RNA

SEQ ID NO: 8676 - RNA, 5797 nt, synthetic construct; identical to SEQ ID NO: 7079
  modified_base 1..5797: mod_base = OTHER; note = Each t is m1f
  source 1..5797: mol_type = other RNA

SEQ ID NO: 8677 - RNA, 5797 nt, synthetic construct; identical to SEQ ID NO: 7080
  modified_base 1..5797: mod_base = OTHER; note = Each t is m1f
  source 1..5797: mol_type = other RNA

SEQ ID NO: 8678 - RNA, 5797 nt, synthetic construct; identical to SEQ ID NO: 7081
  modified_base 1..5797: mod_base = OTHER; note = Each t is m1f
  source 1..5797: mol_type = other RNA

SEQ ID NO: 8679 - RNA, 5797 nt, synthetic construct; identical to SEQ ID NO: 7082
  modified_base 1..5797: mod_base = OTHER; note = Each t is m1f
  source 1..5797: mol_type = other RNA

SEQ ID NO: 8680 - RNA, 5797 nt, synthetic construct; identical to SEQ ID NO: 7083
  modified_base 1..5797: mod_base = OTHER; note = Each t is m1f
  source 1..5797: mol_type = other RNA

SEQ ID NO: 8681 - RNA, 5797 nt, synthetic construct; identical to SEQ ID NO: 7084
  modified_base 1..5797: mod_base = OTHER; note = Each t is m1f
  source 1..5797: mol_type = other RNA

SEQ ID NO: 8682 - RNA, 5794 nt, synthetic construct; identical to SEQ ID NO: 7085
  modified_base 1..5794: mod_base = OTHER; note = Each t is m1f
  source 1..5794: mol_type = other RNA

SEQ ID NO: 8683 - RNA, 5797 nt, synthetic construct; identical to SEQ ID NO: 7086
  modified_base 1..5797: mod_base = OTHER; note = Each t is m1f
  source 1..5797: mol_type = other RNA

SEQ ID NO: 8684 - RNA, 5797 nt, synthetic construct; identical to SEQ ID NO: 7087
  modified_base 1..5797: mod_base = OTHER; note = Each t is m1f
  source 1..5797: mol_type = other RNA

SEQ ID NO: 8685 - RNA, 5797 nt, synthetic construct; identical to SEQ ID NO: 7088
  modified_base 1..5797: mod_base = OTHER; note = Each t is m1f
  source 1..5797: mol_type = other RNA

SEQ ID NO: 8686 - RNA, 5797 nt, synthetic construct; identical to SEQ ID NO: 7089
  modified_base 1..5797: mod_base = OTHER; note = Each t is m1f
  source 1..5797: mol_type = other RNA

SEQ ID NO: 8687 - RNA, 5797 nt, synthetic construct; identical to SEQ ID NO: 7090
  modified_base 1..5797: mod_base = OTHER; note = Each t is m1f
  source 1..5797: mol_type = other RNA

SEQ ID NO: 8688 - RNA, 5797 nt, synthetic construct; identical to SEQ ID NO: 7091
  modified_base 1..5797: mod_base = OTHER; note = Each t is m1f
  source 1..5797: mol_type = other RNA

SEQ ID NO: 8689 - RNA, 5797 nt, synthetic construct; identical to SEQ ID NO: 7092
  modified_base 1..5797: mod_base = OTHER; note = Each t is m1f
  source 1..5797: mol_type = other RNA

SEQ ID NO: 8690 - RNA, 5797 nt, synthetic construct; identical to SEQ ID NO: 7093
  modified_base 1..5797: mod_base = OTHER; note = Each t is m1f
  source 1..5797: mol_type = other RNA

SEQ ID NO: 8691 - RNA, 5797 nt, synthetic construct; identical to SEQ ID NO: 7094
  modified_base 1..5797: mod_base = OTHER; note = Each t is m1f
  source 1..5797: mol_type = other RNA

SEQ ID NO: 8692 - RNA, 5797 nt, synthetic construct; identical to SEQ ID NO: 7095
  modified_base 1..5797: mod_base = OTHER; note = Each t is m1f
  source 1..5797: mol_type = other RNA

SEQ ID NO: 8693 - RNA, 5797 nt, synthetic construct; identical to SEQ ID NO: 7096
  modified_base 1..5797: mod_base = OTHER; note = Each t is m1f
  source 1..5797: mol_type = other RNA

SEQ ID NO: 8694 - RNA, 5797 nt, synthetic construct; identical to SEQ ID NO: 7097
  modified_base 1..5797: mod_base = OTHER; note = Each t is m1f
  source 1..5797: mol_type = other RNA

SEQ ID NO: 8695 - RNA, 5797 nt, synthetic construct; identical to SEQ ID NO: 7098
  modified_base 1..5797: mod_base = OTHER; note = Each t is m1f
  source 1..5797: mol_type = other RNA

SEQ ID NO: 8696 - RNA, 5797 nt, synthetic construct; identical to SEQ ID NO: 7099
  modified_base 1..5797: mod_base = OTHER; note = Each t is m1f
  source 1..5797: mol_type = other RNA

SEQ ID NO: 8697 - RNA, 5797 nt, synthetic construct; identical to SEQ ID NO: 7100
  modified_base 1..5797: mod_base = OTHER; note = Each t is m1f
  source 1..5797: mol_type = other RNA

SEQ ID NO: 8698 - RNA, 5797 nt, synthetic construct; identical to SEQ ID NO: 7101
  modified_base 1..5797: mod_base = OTHER; note = Each t is m1f
  source 1..5797: mol_type = other RNA

SEQ ID NO: 8699 - RNA, 5797 nt, synthetic construct; identical to SEQ ID NO: 7102
  modified_base 1..5797: mod_base = OTHER; note = Each t is m1f
  source 1..5797: mol_type = other RNA

SEQ ID NO: 8700 - RNA, 5797 nt, synthetic construct; identical to SEQ ID NO: 7103
  modified_base 1..5797: mod_base = OTHER; note = Each t is m1f
  source 1..5797: mol_type = other RNA

SEQ ID NO: 8701 - RNA, 5797 nt, synthetic construct; identical to SEQ ID NO: 7104
  modified_base 1..5797: mod_base = OTHER; note = Each t is m1f
  source 1..5797: mol_type = other RNA

SEQ ID NO: 8702 - RNA, 5797 nt, synthetic construct; identical to SEQ ID NO: 7105
  modified_base 1..5797: mod_base = OTHER; note = Each t is m1f
  source 1..5797: mol_type = other RNA

SEQ ID NO: 8703 - RNA, 5797 nt, synthetic construct; identical to SEQ ID NO: 7106
  modified_base 1..5797: mod_base = OTHER; note = Each t is m1f
  source 1..5797: mol_type = other RNA

SEQ ID NO: 8704 - RNA, 5797 nt, synthetic construct; identical to SEQ ID NO: 7107
  modified_base 1..5797: mod_base = OTHER; note = Each t is m1f
  source 1..5797: mol_type = other RNA

SEQ ID NO: 8705 - RNA, 5797 nt, synthetic construct; identical to SEQ ID NO: 7108
  modified_base 1..5797: mod_base = OTHER; note = Each t is m1f
  source 1..5797: mol_type = other RNA

SEQ ID NO: 8706 - RNA, 5797 nt, synthetic construct; identical to SEQ ID NO: 7109
  modified_base 1..5797: mod_base = OTHER; note = Each t is m1f
  source 1..5797: mol_type = other RNA

SEQ ID NO: 8707 - RNA, 5797 nt, synthetic construct; identical to SEQ ID NO: 7110
  modified_base 1..5797: mod_base = OTHER; note = Each t is m1f
  source 1..5797: mol_type = other RNA

SEQ ID NO: 8708 - RNA, 5797 nt, synthetic construct; identical to SEQ ID NO: 7111
  modified_base 1..5797: mod_base = OTHER; note = Each t is m1f
  source 1..5797: mol_type = other RNA

SEQ ID NO: 8709 - RNA, 5797 nt, synthetic construct; identical to SEQ ID NO: 7112
  modified_base 1..5797: mod_base = OTHER; note = Each t is m1f
  source 1..5797: mol_type = other RNA

SEQ ID NO: 8710 - RNA, 5797 nt, synthetic construct; identical to SEQ ID NO: 7113
  modified_base 1..5797: mod_base = OTHER; note = Each t is m1f
  source 1..5797: mol_type = other RNA

SEQ ID NO: 8711 - RNA, 5797 nt, synthetic construct; identical to SEQ ID NO: 7114
  modified_base 1..5797: mod_base = OTHER; note = Each t is m1f
  source 1..5797: mol_type = other RNA

SEQ ID NO: 8712 - RNA, 5797 nt, synthetic construct; identical to SEQ ID NO: 7115
  modified_base 1..5797: mod_base = OTHER; note = Each t is m1f
  source 1..5797: mol_type = other RNA

SEQ ID NO: 8713 - RNA, 5797 nt, synthetic construct; identical to SEQ ID NO: 7116
  modified_base 1..5797: mod_base = OTHER; note = Each t is m1f
  source 1..5797: mol_type = other RNA

SEQ ID NO: 8714 - RNA, 5797 nt, synthetic construct; identical to SEQ ID NO: 7117
  modified_base 1..5797: mod_base = OTHER; note = Each t is m1f
  source 1..5797: mol_type = other RNA

SEQ ID NO: 8715 - RNA, 5797 nt, synthetic construct; identical to SEQ ID NO: 7118
  modified_base 1..5797: mod_base = OTHER; note = Each t is m1f
  source 1..5797: mol_type = other RNA

SEQ ID NO: 8716 - RNA, 5797 nt, synthetic construct; identical to SEQ ID NO: 7119
  modified_base 1..5797: mod_base = OTHER; note = Each t is m1f
  source 1..5797: mol_type = other RNA

SEQ ID NO: 8717 - RNA, 5797 nt, synthetic construct; identical to SEQ ID NO: 7120
  modified_base 1..5797: mod_base = OTHER; note = Each t is m1f
  source 1..5797: mol_type = other RNA

SEQ ID NO: 8718 - RNA, 5797 nt, synthetic construct; identical to SEQ ID NO: 7121
  modified_base 1..5797: mod_base = OTHER; note = Each t is m1f
  source 1..5797: mol_type = other RNA

SEQ ID NO: 8719 - RNA, 5797 nt, synthetic construct; identical to SEQ ID NO: 7122
  modified_base 1..5797: mod_base = OTHER; note = Each t is m1f
  source 1..5797: mol_type = other RNA

SEQ ID NO: 8720 - RNA, 5797 nt, synthetic construct; identical to SEQ ID NO: 7123
  modified_base 1..5797: mod_base = OTHER; note = Each t is m1f
  source 1..5797: mol_type = other RNA

SEQ ID NO: 8721 - RNA, 5815 nt, synthetic construct; identical to SEQ ID NO: 7124
  modified_base 1..5797: mod_base = OTHER; note = Each t is m1f
  source 1..5815: mol_type = other RNA

SEQ ID NO: 8722 - RNA, 5797 nt, synthetic construct; identical to SEQ ID NO: 7125
  modified_base 1..5797: mod_base = OTHER; note = Each t is m1f
  source 1..5797: mol_type = other RNA

SEQ ID NO: 8723 - RNA, 5797 nt, synthetic construct; identical to SEQ ID NO: 7126
  modified_base 1..5797: mod_base = OTHER; note = Each t is m1f
  source 1..5797: mol_type = other RNA

SEQ ID NO: 8724 - RNA, 5797 nt, synthetic construct; identical to SEQ ID NO: 7127
  modified_base 1..5797: mod_base = OTHER; note = Each t is m1f
  source 1..5797: mol_type = other RNA

SEQ ID NO: 8725 - RNA, 5797 nt, synthetic construct; identical to SEQ ID NO: 7128
  modified_base 1..5797: mod_base = OTHER; note = Each t is m1f
  source 1..5797: mol_type = other RNA

SEQ ID NO: 8726 - RNA, 5797 nt, synthetic construct; identical to SEQ ID NO: 7129
  modified_base 1..5797: mod_base = OTHER; note = Each t is m1f
  source 1..5797: mol_type = other RNA

SEQ ID NO: 8727 - RNA, 5797 nt, synthetic construct; identical to SEQ ID NO: 7130
  modified_base 1..5797: mod_base = OTHER; note = Each t is m1f
  source 1..5797: mol_type = other RNA

SEQ ID NO: 8728 - RNA, 5794 nt, synthetic construct; identical to SEQ ID NO: 7131
  modified_base 1..5794: mod_base = OTHER; note = Each t is m1f
  source 1..5794: mol_type = other RNA

SEQ ID NO: 8729 - RNA, 5797 nt, synthetic construct; identical to SEQ ID NO: 7132
  modified_base 1..5797: mod_base = OTHER; note = Each t is m1f
  source 1..5797: mol_type = other RNA

SEQ ID NO: 8730 - RNA, 5797 nt, synthetic construct; identical to SEQ ID NO: 7133
  modified_base 1..5797: mod_base = OTHER; note = Each t is m1f
  source 1..5797: mol_type = other RNA

SEQ ID NO: 8731 - RNA, 5797 nt, synthetic construct; identical to SEQ ID NO: 7134
  modified_base 1..5797: mod_base = OTHER; note = Each t is m1f
  source 1..5797: mol_type = other RNA

SEQ ID NO: 8732 - RNA, 5797 nt, synthetic construct; identical to SEQ ID NO: 7135
  modified_base 1..5797: mod_base = OTHER; note = Each t is m1f
  source 1..5797: mol_type = other RNA

SEQ ID NO: 8733 - RNA, 5797 nt, synthetic construct; identical to SEQ ID NO: 7136
  modified_base 1..5797: mod_base = OTHER; note = Each t is m1f
  source 1..5797: mol_type = other RNA

SEQ ID NO: 8734 - RNA, 5797 nt, synthetic construct; identical to SEQ ID NO: 7137
  modified_base 1..5797: mod_base = OTHER; note = Each t is m1f
  source 1..5797: mol_type = other RNA

SEQ ID NO: 8735 - RNA, 5797 nt, synthetic construct; identical to SEQ ID NO: 7138
  modified_base 1..5797: mod_base = OTHER; note = Each t is m1f
  source 1..5797: mol_type = other RNA

SEQ ID NO: 8736 - RNA, 5797 nt, synthetic construct; identical to SEQ ID NO: 7139
  modified_base 1..5797: mod_base = OTHER; note = Each t is m1f
  source 1..5797: mol_type = other RNA

SEQ ID NO: 8737 - RNA, 5794 nt, synthetic construct; identical to SEQ ID NO: 7140
  modified_base 1..5794: mod_base = OTHER; note = Each t is m1f
  source 1..5794: mol_type = other RNA

SEQ ID NO: 8738 - RNA, 5797 nt, synthetic construct; identical to SEQ ID NO: 7141
  modified_base 1..5797: mod_base = OTHER; note = Each t is m1f
  source 1..5797: mol_type = other RNA

SEQ ID NO: 8739 - RNA, 5797 nt, synthetic construct; identical to SEQ ID NO: 7142
  modified_base 1..5797: mod_base = OTHER; note = Each t is m1f
  source 1..5797: mol_type = other RNA

SEQ ID NO: 8740 - RNA, 5806 nt, synthetic construct; identical to SEQ ID NO: 7143
  modified_base 1..5797: mod_base = OTHER; note = Each t is m1f
  source 1..5806: mol_type = other RNA

SEQ ID NO: 8741 - RNA, 5797 nt, synthetic construct; identical to SEQ ID NO: 7144
  modified_base 1..5797: mod_base = OTHER; note = Each t is m1f
  source 1..5797: mol_type = other RNA

SEQ ID NO: 8742 - RNA, 5794 nt, synthetic construct; identical to SEQ ID NO: 7145
  modified_base 1..5794: mod_base = OTHER; note = Each t is m1f
  source 1..5794: mol_type = other RNA

SEQ ID NO: 8743 - RNA, 5797 nt, synthetic construct; identical to SEQ ID NO: 7146
  modified_base 1..5797: mod_base = OTHER; note = Each t is m1f
  source 1..5797: mol_type = other RNA

SEQ ID NO: 8744 - RNA, 5797 nt, synthetic construct; identical to SEQ ID NO: 7147
  modified_base 1..5797: mod_base = OTHER; note = Each t is m1f
  source 1..5797: mol_type = other RNA

SEQ ID NO: 8745 - RNA, 5797 nt, synthetic construct; identical to SEQ ID NO: 7148
  modified_base 1..5797: mod_base = OTHER; note = Each t is m1f
  source 1..5797: mol_type = other RNA

SEQ ID NO: 8746 - RNA, 5797 nt, synthetic construct; identical to SEQ ID NO: 7149
  modified_base 1..5797: mod_base = OTHER; note = Each t is m1f
  source 1..5797: mol_type = other RNA

SEQ ID NO: 8747 - RNA, 5797 nt, synthetic construct; identical to SEQ ID NO: 7150
  modified_base 1..5797: mod_base = OTHER; note = Each t is m1f
  source 1..5797: mol_type = other RNA

SEQ ID NO: 8748 - RNA, 5797 nt, synthetic construct; identical to SEQ ID NO: 7151
  modified_base 1..5797: mod_base = OTHER; note = Each t is m1f
  source 1..5797: mol_type = other RNA

SEQ ID NO: 8749 - RNA, 5797 nt, synthetic construct; identical to SEQ ID NO: 7152
  modified_base 1..5797: mod_base = OTHER; note = Each t is m1f
  source 1..5797: mol_type = other RNA

SEQ ID NO: 8750 - RNA, 5797 nt, synthetic construct; identical to SEQ ID NO: 7153
  modified_base 1..5797: mod_base = OTHER; note = Each t is m1f
  source 1..5797: mol_type = other RNA

SEQ ID NO: 8751 - RNA, 5797 nt, synthetic construct; identical to SEQ ID NO: 7154
  modified_base 1..5797: mod_base = OTHER; note = Each t is m1f
  source 1..5797: mol_type = other RNA

SEQ ID NO: 8752 - RNA, 5797 nt, synthetic construct; identical to SEQ ID NO: 7155
  modified_base 1..5797: mod_base = OTHER; note = Each t is m1f
  source 1..5797: mol_type = other RNA

SEQ ID NO: 8753 - RNA, 5797 nt, synthetic construct; identical to SEQ ID NO: 7156
  modified_base 1..5797: mod_base = OTHER; note = Each t is m1f
  source 1..5797: mol_type = other RNA

SEQ ID NO: 8754 - RNA, 5797 nt, synthetic construct; identical to SEQ ID NO: 7157
  modified_base 1..5797: mod_base = OTHER; note = Each t is m1f
  source 1..5797: mol_type = other RNA

SEQ ID NO: 8755 - RNA, 5797 nt, synthetic construct; identical to SEQ ID NO: 7158
  modified_base 1..5797: mod_base = OTHER; note = Each t is m1f
  source 1..5797: mol_type = other RNA

SEQ ID NO: 8756 - RNA, 5806 nt, synthetic construct; identical to SEQ ID NO: 7159
  modified_base 1..5797: mod_base = OTHER; note = Each t is m1f
  source 1..5806: mol_type = other RNA

SEQ ID NO: 8757 - RNA, 5797 nt, synthetic construct; identical to SEQ ID NO: 7160
  modified_base 1..5797: mod_base = OTHER; note = Each t is m1f
  source 1..5797: mol_type = other RNA

SEQ ID NO: 8758 - RNA, 5797 nt, synthetic construct; identical to SEQ ID NO: 7161
  modified_base 1..5797: mod_base = OTHER; note = Each t is m1f
  source 1..5797: mol_type = other RNA

SEQ ID NO: 8759 - RNA, 5797 nt, synthetic construct; identical to SEQ ID NO: 7162
  modified_base 1..5797: mod_base = OTHER; note = Each t is m1f
  source 1..5797: mol_type = other RNA

SEQ ID NO: 8760 - RNA, 5797 nt, synthetic construct; identical to SEQ ID NO: 7163
  modified_base 1..5797: mod_base = OTHER; note = Each t is m1f
  source 1..5797: mol_type = other RNA

SEQ ID NO: 8761 - RNA, 5797 nt, synthetic construct; identical to SEQ ID NO: 7164
  modified_base 1..5797: mod_base = OTHER; note = Each t is m1f
  source 1..5797: mol_type = other RNA

SEQ ID NO: 8762 - RNA, 5797 nt, synthetic construct; identical to SEQ ID NO: 7165
  modified_base 1..5797: mod_base = OTHER; note = Each t is m1f
  source 1..5797: mol_type = other RNA

SEQ ID NO: 8763 - RNA, 5797 nt, synthetic construct; identical to SEQ ID NO: 7166
  modified_base 1..5797: mod_base = OTHER; note = Each t is m1f
  source 1..5797: mol_type = other RNA

SEQ ID NO: 8764 - RNA, 5797 nt, synthetic construct; identical to SEQ ID NO: 7167
  modified_base 1..5797: mod_base = OTHER; note = Each t is m1f
  source 1..5797: mol_type = other RNA

SEQ ID NO: 8765 - RNA, 5797 nt, synthetic construct; identical to SEQ ID NO: 7168
  modified_base 1..5797: mod_base = OTHER; note = Each t is m1f
  source 1..5797: mol_type = other RNA

SEQ ID NO: 8766 - RNA, 5797 nt, synthetic construct; identical to SEQ ID NO: 7169
  modified_base 1..5797: mod_base = OTHER; note = Each t is m1f
  source 1..5797: mol_type = other RNA

SEQ ID NO: 8767 - RNA, 5797 nt, synthetic construct; identical to SEQ ID NO: 7170
  modified_base 1..5797: mod_base = OTHER; note = Each t is m1f
  source 1..5797: mol_type = other RNA

SEQ ID NO: 8768 - RNA, 5797 nt, synthetic construct; identical to SEQ ID NO: 7171
  modified_base 1..5797: mod_base = OTHER; note = Each t is m1f
  source 1..5797: mol_type = other RNA

SEQ ID NO: 8769 - RNA, 5797 nt, synthetic construct; identical to SEQ ID NO: 7172
  modified_base 1..5797: mod_base = OTHER; note = Each t is m1f
  source 1..5797: mol_type = other RNA

SEQ ID NO: 8770 - RNA, 5797 nt, synthetic construct; identical to SEQ ID NO: 7173
  modified_base 1..5797: mod_base = OTHER; note = Each t is m1f
  source 1..5797: mol_type = other RNA

SEQ ID NO: 8771 - RNA, 5797 nt, synthetic construct; identical to SEQ ID NO: 7174
  modified_base 1..5797: mod_base = OTHER; note = Each t is m1f
  source 1..5797: mol_type = other RNA

SEQ ID NO: 8772 - RNA, 5797 nt, synthetic construct; identical to SEQ ID NO: 7175
  modified_base 1..5797: mod_base = OTHER; note = Each t is m1f
  source 1..5797: mol_type = other RNA

SEQ ID NO: 8773 - RNA, 5797 nt, synthetic construct; identical to SEQ ID NO: 7176
  modified_base 1..5797: mod_base = OTHER; note = Each t is m1f
  source 1..5797: mol_type = other RNA

SEQ ID NO: 8774 - RNA, 5797 nt, synthetic construct; identical to SEQ ID NO: 7177
  modified_base 1..5797: mod_base = OTHER; note = Each t is m1f
  source 1..5797: mol_type = other RNA

SEQ ID NO: 8775 - RNA, 5797 nt, synthetic construct; identical to SEQ ID NO: 7178
  modified_base 1..5797: mod_base = OTHER; note = Each t is m1f
  source 1..5797: mol_type = other RNA

SEQ ID NO: 8776 - RNA, 5797 nt, synthetic construct; identical to SEQ ID NO: 7179
  modified_base 1..5797: mod_base = OTHER; note = Each t is m1f
  source 1..5797: mol_type = other RNA

SEQ ID NO: 8777 - RNA, 5797 nt, synthetic construct; identical to SEQ ID NO: 7180
  modified_base 1..5797: mod_base = OTHER; note = Each t is m1f
  source 1..5797: mol_type = other RNA

SEQ ID NO: 8778 - RNA, 5797 nt, synthetic construct; identical to SEQ ID NO: 7181
  modified_base 1..5797: mod_base = OTHER; note = Each t is m1f
  source 1..5797: mol_type = other RNA

SEQ ID NO: 8779 - RNA, 5797 nt, synthetic construct; identical to SEQ ID NO: 7182
  modified_base 1..5797: mod_base = OTHER; note = Each t is m1f
  source 1..5797: mol_type = other RNA

SEQ ID NO: 8780 - RNA, 5797 nt, synthetic construct; identical to SEQ ID NO: 7183
  modified_base 1..5797: mod_base = OTHER; note = Each t is m1f
  source 1..5797: mol_type = other RNA

SEQ ID NO: 8781 - RNA, 5797 nt, synthetic construct; identical to SEQ ID NO: 7184
  modified_base 1..5797: mod_base = OTHER; note = Each t is m1f
  source 1..5797: mol_type = other RNA

SEQ ID NO: 8782 - RNA, 5797 nt, synthetic construct; identical to SEQ ID NO: 7185
  modified_base 1..5797: mod_base = OTHER; note = Each t is m1f
  source 1..5797: mol_type = other RNA

SEQ ID NO: 8783 - RNA, 5797 nt, synthetic construct; identical to SEQ ID NO: 7186
  modified_base 1..5797: mod_base = OTHER; note = Each t is m1f
  source 1..5797: mol_type = other RNA

SEQ ID NO: 8784 - RNA, 5797 nt, synthetic construct; identical to SEQ ID NO: 7187
  modified_base 1..5797: mod_base = OTHER; note = Each t is m1f
  source 1..5797: mol_type = other RNA

SEQ ID NO: 8785 - RNA, 5797 nt, synthetic construct; identical to SEQ ID NO: 7188
  modified_base 1..5797: mod_base = OTHER; note = Each t is m1f
  source 1..5797: mol_type = other RNA

SEQ ID NO: 8786 - RNA, 5797 nt, synthetic construct; identical to SEQ ID NO: 7189
  modified_base 1..5797: mod_base = OTHER; note = Each t is m1f
  source 1..5797: mol_type = other RNA

SEQ ID NO: 8787 - RNA, 5797 nt, synthetic construct; identical to SEQ ID NO: 7190
  modified_base 1..5797: mod_base = OTHER; note = Each t is m1f
  source 1..5797: mol_type = other RNA

SEQ ID NO: 8788 - RNA, 5797 nt, synthetic construct; identical to SEQ ID NO: 7191
  modified_base 1..5797: mod_base = OTHER; note = Each t is m1f
  source 1..5797: mol_type = other RNA

SEQ ID NO: 8789 - RNA, 5797 nt, synthetic construct; identical to SEQ ID NO: 7192
  modified_base 1..5797: mod_base = OTHER; note = Each t is m1f
  source 1..5797: mol_type = other RNA

SEQ ID NO: 8790 - RNA, 5797 nt, synthetic construct; identical to SEQ ID NO: 7193
  modified_base 1..5797: mod_base = OTHER; note = Each t is m1f
  source 1..5797: mol_type = other RNA

SEQ ID NO: 8791 - RNA, 5797 nt, synthetic construct; identical to SEQ ID NO: 7194
  modified_base 1..5797: mod_base = OTHER; note = Each t is m1f
  source 1..5797: mol_type = other RNA

SEQ ID NO: 8792 - RNA, 5797 nt, synthetic construct; identical to SEQ ID NO: 7195
  modified_base 1..5797: mod_base = OTHER; note = Each t is m1f
  source 1..5797: mol_type = other RNA

SEQ ID NO: 8793 - RNA, 5797 nt, synthetic construct; identical to SEQ ID NO: 7196
  modified_base 1..5797: mod_base = OTHER; note = Each t is m1f
  source 1..5797: mol_type = other RNA

SEQ ID NO: 8794 - RNA, 5797 nt, synthetic construct; identical to SEQ ID NO: 7197
  modified_base 1..5797: mod_base = OTHER; note = Each t is m1f
  source 1..5797: mol_type = other RNA

SEQ ID NO: 8795 - RNA, 5797 nt, synthetic construct; identical to SEQ ID NO: 7198
  modified_base 1..5797: mod_base = OTHER; note = Each t is m1f
  source 1..5797: mol_type = other RNA

SEQ ID NO: 8796 - RNA, 5797 nt, synthetic construct; identical to SEQ ID NO: 7199
  modified_base 1..5797: mod_base = OTHER; note = Each t is m1f
  source 1..5797: mol_type = other RNA

SEQ ID NO: 8797 - RNA, 5797 nt, synthetic construct; identical to SEQ ID NO: 7200
  modified_base 1..5797: mod_base = OTHER; note = Each t is m1f
  source 1..5797: mol_type = other RNA

SEQ ID NO: 8798 - RNA, 5797 nt, synthetic construct; identical to SEQ ID NO: 7201
  modified_base 1..5797: mod_base = OTHER; note = Each t is m1f
  source 1..5797: mol_type = other RNA

SEQ ID NO: 8799 - RNA, 5797 nt, synthetic construct; identical to SEQ ID NO: 7202
  modified_base 1..5797: mod_base = OTHER; note = Each t is m1f
  source 1..5797: mol_type = other RNA

SEQ ID NO: 8800 - RNA, 5797 nt, synthetic construct; identical to SEQ ID NO: 7203
  modified_base 1..5797: mod_base = OTHER; note = Each t is m1f
  source 1..5797: mol_type = other RNA

SEQ ID NO: 8801 - RNA, 5797 nt, synthetic construct; identical to SEQ ID NO: 7204
  modified_base 1..5797: mod_base = OTHER; note = Each t is m1f
  source 1..5797: mol_type = other RNA

SEQ ID NO: 8802 - RNA, 5797 nt, synthetic construct; identical to SEQ ID NO: 7205
  modified_base 1..5797: mod_base = OTHER; note = Each t is m1f
  source 1..5797: mol_type = other RNA

SEQ ID NO: 8803 - RNA, 5797 nt, synthetic construct; identical to SEQ ID NO: 7206
  modified_base 1..5797: mod_base = OTHER; note = Each t is m1f
  source 1..5797: mol_type = other RNA

SEQ ID NO: 8804 - RNA, 5797 nt, synthetic construct; identical to SEQ ID NO: 7207
  modified_base 1..5797: mod_base = OTHER; note = Each t is m1f
  source 1..5797: mol_type = other RNA

SEQ ID NO: 8805 - RNA, 5797 nt, synthetic construct; identical to SEQ ID NO: 7208
  modified_base 1..5797: mod_base = OTHER; note = Each t is m1f
  source 1..5797: mol_type = other RNA

SEQ ID NO: 8806 - RNA, 5797 nt, synthetic construct; identical to SEQ ID NO: 7209
  modified_base 1..5797: mod_base = OTHER; note = Each t is m1f
  source 1..5797: mol_type = other RNA

SEQ ID NO: 8807 - RNA, 5797 nt, synthetic construct; identical to SEQ ID NO: 7210
  modified_base 1..5797: mod_base = OTHER; note = Each t is m1f
  source 1..5797: mol_type = other RNA

SEQ ID NO: 8808 - RNA, 5797 nt, synthetic construct; identical to SEQ ID NO: 7211
  modified_base 1..5797: mod_base = OTHER; note = Each t is m1f
  source 1..5797: mol_type = other RNA

SEQ ID NO: 8809 - RNA, 5797 nt, synthetic construct; identical to SEQ ID NO: 7212
  modified_base 1..5797: mod_base = OTHER; note = Each t is m1f
  source 1..5797: mol_type = other RNA

SEQ ID NO: 8810 - RNA, 5797 nt, synthetic construct; identical to SEQ ID NO: 7213
  modified_base 1..5797: mod_base = OTHER; note = Each t is m1f
  source 1..5797: mol_type = other RNA

SEQ ID NO: 8811 - RNA, 5797 nt, synthetic construct; identical to SEQ ID NO: 7214
  modified_base 1..5797: mod_base = OTHER; note = Each t is m1f
  source 1..5797: mol_type = other RNA

SEQ ID NO: 8812 - RNA, 5797 nt, synthetic construct; identical to SEQ ID NO: 7215
  modified_base 1..5797: mod_base = OTHER; note = Each t is m1f
  source 1..5797: mol_type = other RNA

SEQ ID NO: 8813 - RNA, 5797 nt, synthetic construct; identical to SEQ ID NO: 7216
  modified_base 1..5797: mod_base = OTHER; note = Each t is m1f
  source 1..5797: mol_type = other RNA

SEQ ID NO: 8814 - RNA, 5797 nt, synthetic construct; identical to SEQ ID NO: 7217
  modified_base 1..5797: mod_base = OTHER; note = Each t is m1f
  source 1..5797: mol_type = other RNA

SEQ ID NO: 8815 - RNA, 5797 nt, synthetic construct; identical to SEQ ID NO: 7218
  modified_base 1..5797: mod_base = OTHER; note = Each t is m1f
  source 1..5797: mol_type = other RNA

SEQ ID NO: 8816 - RNA, 5797 nt, synthetic construct; identical to SEQ ID NO: 7219
  modified_base 1..5797: mod_base = OTHER; note = Each t is m1f
  source 1..5797: mol_type = other RNA

SEQ ID NO: 8817 - RNA, 5797 nt, synthetic construct; identical to SEQ ID NO: 7220
  modified_base 1..5797: mod_base = OTHER; note = Each t is m1f
  source 1..5797: mol_type = other RNA

SEQ ID NO: 8818 - RNA, 5797 nt, synthetic construct; identical to SEQ ID NO: 7221
  modified_base 1..5797: mod_base = OTHER; note = Each t is m1f
  source 1..5797: mol_type = other RNA

SEQ ID NO: 8819 - RNA, 5797 nt, synthetic construct; identical to SEQ ID NO: 7222
  modified_base 1..5797: mod_base = OTHER; note = Each t is m1f
  source 1..5797: mol_type = other RNA

SEQ ID NO: 8820 - RNA, 5797 nt, synthetic construct; identical to SEQ ID NO: 7223
  modified_base 1..5797: mod_base = OTHER; note = Each t is m1f
  source 1..5797: mol_type = other RNA

SEQ ID NO: 8821 - RNA, 5797 nt, synthetic construct; identical to SEQ ID NO: 7224
  modified_base 1..5797: mod_base = OTHER; note = Each t is m1f
  source 1..5797: mol_type = other RNA

SEQ ID NO: 8822 - RNA, 5797 nt, synthetic construct; identical to SEQ ID NO: 7225
  modified_base 1..5797: mod_base = OTHER; note = Each t is m1f
  source 1..5797: mol_type = other RNA

SEQ ID NO: 8823 - RNA, 5797 nt, synthetic construct; identical to SEQ ID NO: 7226
  modified_base 1..5797: mod_base = OTHER; note = Each t is m1f
  source 1..5797: mol_type = other RNA

SEQ ID NO: 8824 - RNA, 5797 nt, synthetic construct; identical to SEQ ID NO: 7227
  modified_base 1..5797: mod_base = OTHER; note = Each t is m1f
  source 1..5797: mol_type = other RNA

SEQ ID NO: 8825 - RNA, 5797 nt, synthetic construct; identical to SEQ ID NO: 7228
  modified_base 1..5797: mod_base = OTHER; note = Each t is m1f
  source 1..5797: mol_type = other RNA

SEQ ID NO: 8826 - RNA, 5797 nt, synthetic construct; identical to SEQ ID NO: 7229
  modified_base 1..5797: mod_base = OTHER; note = Each t is m1f
  source 1..5797: mol_type = other RNA

SEQ ID NO: 8827 - RNA, 5797 nt, synthetic construct; identical to SEQ ID NO: 7230
  modified_base 1..5797: mod_base = OTHER; note = Each t is m1f
  source 1..5797: mol_type = other RNA

SEQ ID NO: 8828 - RNA, 5797 nt, synthetic construct; identical to SEQ ID NO: 7231
  modified_base 1..5797: mod_base = OTHER; note = Each t is m1f
  source 1..5797: mol_type = other RNA

SEQ ID NO: 8829 - RNA, 5797 nt, synthetic construct; identical to SEQ ID NO: 7232
  modified_base 1..5797: mod_base = OTHER; note = Each t is m1f
  source 1..5797: mol_type = other RNA

SEQ ID NO: 8830 - RNA, 5797 nt, synthetic construct; identical to SEQ ID NO: 7233
  modified_base 1..5797: mod_base = OTHER; note = Each t is m1f
  source 1..5797: mol_type = other RNA

SEQ ID NO: 8831 - RNA, 5797 nt, synthetic construct; identical to SEQ ID NO: 7234
  modified_base 1..5797: mod_base = OTHER; note = Each t is m1f
  source 1..5797: mol_type = other RNA

SEQ ID NO: 8832 - RNA, 5797 nt, synthetic construct; identical to SEQ ID NO: 7235
  modified_base 1..5797: mod_base = OTHER; note = Each t is m1f
  source 1..5797: mol_type = other RNA

SEQ ID NO: 8833 - RNA, 5797 nt, synthetic construct; identical to SEQ ID NO: 7236
  modified_base 1..5797: mod_base = OTHER; note = Each t is m1f
  source 1..5797: mol_type = other RNA

SEQ ID NO: 8834 - RNA, 5797 nt, synthetic construct; identical to SEQ ID NO: 7237
  modified_base 1..5797: mod_base = OTHER; note = Each t is m1f
  source 1..5797: mol_type = other RNA

SEQ ID NO: 8835 - RNA, 5797 nt, synthetic construct; identical to SEQ ID NO: 7238
  modified_base 1..5797: mod_base = OTHER; note = Each t is m1f
  source 1..5797: mol_type = other RNA

SEQ ID NO: 8836 - RNA, 5797 nt, synthetic construct; identical to SEQ ID NO: 7239
  modified_base 1..5797: mod_base = OTHER; note = Each t is m1f
  source 1..5797: mol_type = other RNA

SEQ ID NO: 8837 - RNA, 5797 nt, synthetic construct; identical to SEQ ID NO: 7240
  modified_base 1..5797: mod_base = OTHER; note = Each t is m1f
  source 1..5797: mol_type = other RNA

SEQ ID NO: 8838 - RNA, 5797 nt, synthetic construct; identical to SEQ ID NO: 7241
  modified_base 1..5797: mod_base = OTHER; note = Each t is m1f
  source 1..5797: mol_type = other RNA

SEQ ID NO: 8839 - RNA, 5797 nt, synthetic construct; identical to SEQ ID NO: 7242
  modified_base 1..5797: mod_base = OTHER; note = Each t is m1f
  source 1..5797: mol_type = other RNA

SEQ ID NO: 8840 - RNA, 5797 nt, synthetic construct; identical to SEQ ID NO: 7243
  modified_base 1..5797: mod_base = OTHER; note = Each t is m1f
  source 1..5797: mol_type = other RNA

SEQ ID NO: 8841 - RNA, 5797 nt, synthetic construct; identical to SEQ ID NO: 7244
  modified_base 1..5797: mod_base = OTHER; note = Each t is m1f
  source 1..5797: mol_type = other RNA

SEQ ID NO: 8842 - RNA, 5797 nt, synthetic construct; identical to SEQ ID NO: 7245
  modified_base 1..5797: mod_base = OTHER; note = Each t is m1f
  source 1..5797: mol_type = other RNA

SEQ ID NO: 8843 - RNA, 5797 nt, synthetic construct; identical to SEQ ID NO: 7246
  modified_base 1..5797: mod_base = OTHER; note = Each t is m1f
  source 1..5797: mol_type = other RNA

SEQ ID NO: 8844 - RNA, 5797 nt, synthetic construct; identical to SEQ ID NO: 7247
  modified_base 1..5797: mod_base = OTHER; note = Each t is m1f
  source 1..5797: mol_type = other RNA

SEQ ID NO: 8845 - RNA, 5797 nt, synthetic construct; identical to SEQ ID NO: 7248
  modified_base 1..5797: mod_base = OTHER; note = Each t is m1f
  source 1..5797: mol_type = other RNA

SEQ ID NO: 8846 - RNA, 5797 nt, synthetic construct; identical to SEQ ID NO: 7249
  modified_base 1..5797: mod_base = OTHER; note = Each t is m1f
  source 1..5797: mol_type = other RNA

SEQ ID NO: 8847 - RNA, 5797 nt, synthetic construct; identical to SEQ ID NO: 7250
  modified_base 1..5797: mod_base = OTHER; note = Each t is m1f
  source 1..5797: mol_type = other RNA

SEQ ID NO: 8848 - RNA, 5797 nt, synthetic construct; identical to SEQ ID NO: 7251
  modified_base 1..5797: mod_base = OTHER; note = Each t is m1f
  source 1..5797: mol_type = other RNA

SEQ ID NO: 8849 - RNA, 5797 nt, synthetic construct; identical to SEQ ID NO: 7252
  modified_base 1..5797: mod_base = OTHER; note = Each t is m1f
  source 1..5797: mol_type = other RNA

SEQ ID NO: 8850 - RNA, 5797 nt, synthetic construct; identical to SEQ ID NO: 7253
  modified_base 1..5797: mod_base = OTHER; note = Each t is m1f
  source 1..5797: mol_type = other RNA

SEQ ID NO: 8851 - RNA, 5797 nt, synthetic construct; identical to SEQ ID NO: 7254
  modified_base 1..5797: mod_base = OTHER; note = Each t is m1f
  source 1..5797: mol_type = other RNA

SEQ ID NO: 8852 - RNA, 5797 nt, synthetic construct; identical to SEQ ID NO: 7255
  modified_base 1..5797: mod_base = OTHER; note = Each t is m1f
  source 1..5797: mol_type = other RNA

SEQ ID NO: 8853 - RNA, 5797 nt, synthetic construct; identical to SEQ ID NO: 7256
  modified_base 1..5797: mod_base = OTHER; note = Each t is m1f
  source 1..5797: mol_type = other RNA

SEQ ID NO: 8854 - RNA, 5797 nt, synthetic construct; identical to SEQ ID NO: 7257
  modified_base 1..5797: mod_base = OTHER; note = Each t is m1f
  source 1..5797: mol_type = other RNA

SEQ ID NO: 8855 - RNA, 5797 nt, synthetic construct; identical to SEQ ID NO: 7258
  modified_base 1..5797: mod_base = OTHER; note = Each t is m1f
  source 1..5797: mol_type = other RNA

SEQ ID NO: 8856 - RNA, 5797 nt, synthetic construct; identical to SEQ ID NO: 7259
  modified_base 1..5797: mod_base = OTHER; note = Each t is m1f
  source 1..5797: mol_type = other RNA

SEQ ID NO: 8857 - RNA, 5797 nt, synthetic construct; identical to SEQ ID NO: 7260
  modified_base 1..5797: mod_base = OTHER; note = Each t is m1f
  source 1..5797: mol_type = other RNA

SEQ ID NO: 8858 - RNA, 5797 nt, synthetic construct; identical to SEQ ID NO: 7261
  modified_base 1..5797: mod_base = OTHER; note = Each t is m1f
  source 1..5797: mol_type = other RNA

SEQ ID NO: 8859 - RNA, 5797 nt, synthetic construct; identical to SEQ ID NO: 7262
  modified_base 1..5797: mod_base = OTHER; note = Each t is m1f
  source 1..5797: mol_type = other RNA

SEQ ID NO: 8860 - RNA, 5797 nt, synthetic construct; identical to SEQ ID NO: 7263
  modified_base 1..5797: mod_base = OTHER; note = Each t is m1f
  source 1..5797: mol_type = other RNA

SEQ ID NO: 8861 - RNA, 5797 nt, synthetic construct; identical to SEQ ID NO: 7264
  modified_base 1..5797: mod_base = OTHER; note = Each t is m1f
  source 1..5797: mol_type = other RNA

SEQ ID NO: 8862 - RNA, 5797 nt, synthetic construct; identical to SEQ ID NO: 7265
  modified_base 1..5797: mod_base = OTHER; note = Each t is m1f
  source 1..5797: mol_type = other RNA

SEQ ID NO: 8863 - RNA, 5797 nt, synthetic construct; identical to SEQ ID NO: 7266
  modified_base 1..5797: mod_base = OTHER; note = Each t is m1f
  source 1..5797: mol_type = other RNA

SEQ ID NO: 8864 - RNA, 5797 nt, synthetic construct; identical to SEQ ID NO: 7267
  modified_base 1..5797: mod_base = OTHER; note = Each t is m1f
  source 1..5797: mol_type = other RNA

SEQ ID NO: 8865 - RNA, 5797 nt, synthetic construct; identical to SEQ ID NO: 7268
  modified_base 1..5797: mod_base = OTHER; note = Each t is m1f
  source 1..5797: mol_type = other RNA

SEQ ID NO: 8866 - RNA, 5797 nt, synthetic construct; identical to SEQ ID NO: 7269
  modified_base 1..5797: mod_base = OTHER; note = Each t is m1f
  source 1..5797: mol_type = other RNA

SEQ ID NO: 8867 - RNA, 5797 nt, synthetic construct; identical to SEQ ID NO: 7270
  modified_base 1..5797: mod_base = OTHER; note = Each t is m1f
  source 1..5797: mol_type = other RNA

SEQ ID NO: 8868 - RNA, 5797 nt, synthetic construct; identical to SEQ ID NO: 7271
  modified_base 1..5797: mod_base = OTHER; note = Each t is m1f
  source 1..5797: mol_type = other RNA

SEQ ID NO: 8869 - RNA, 5797 nt, synthetic construct; identical to SEQ ID NO: 7272
  modified_base 1..5797: mod_base = OTHER; note = Each t is m1f
  source 1..5797: mol_type = other RNA

SEQ ID NO: 8870 - RNA, 5797 nt, synthetic construct; identical to SEQ ID NO: 7273
  modified_base 1..5797: mod_base = OTHER; note = Each t is m1f
  source 1..5797: mol_type = other RNA

SEQ ID NO: 8871 - RNA, 5797 nt, synthetic construct; identical to SEQ ID NO: 7274
  modified_base 1..5797: mod_base = OTHER; note = Each t is m1f
  source 1..5797: mol_type = other RNA

SEQ ID NO: 8872 - RNA, 5797 nt, synthetic construct; identical to SEQ ID NO: 7275
  modified_base 1..5797: mod_base = OTHER; note = Each t is m1f
  source 1..5797: mol_type = other RNA

SEQ ID NO: 8873 - RNA, 5797 nt, synthetic construct; identical to SEQ ID NO: 7276
  modified_base 1..5797: mod_base = OTHER; note = Each t is m1f
  source 1..5797: mol_type = other RNA

SEQ ID NO: 8874 - RNA, 5797 nt, synthetic construct; identical to SEQ ID NO: 7277
  modified_base 1..5797: mod_base = OTHER; note = Each t is m1f
  source 1..5797: mol_type = other RNA

SEQ ID NO: 8875 - RNA, 5797 nt, synthetic construct; identical to SEQ ID NO: 7278
  modified_base 1..5797: mod_base = OTHER; note = Each t is m1f
  source 1..5797: mol_type = other RNA

SEQ ID NO: 8876 - RNA, 5794 nt, synthetic construct; identical to SEQ ID NO: 7279
  modified_base 1..5794: mod_base = OTHER; note = Each t is m1f
  source 1..5794: mol_type = other RNA

SEQ ID NO: 8877 - RNA, 5797 nt, synthetic construct; identical to SEQ ID NO: 7280
  modified_base 1..5797: mod_base = OTHER; note = Each t is m1f
  source 1..5797: mol_type = other RNA

SEQ ID NO: 8878 - RNA, 5797 nt, synthetic construct; identical to SEQ ID NO: 7281
  modified_base 1..5797: mod_base = OTHER; note = Each t is m1f
  source 1..5797: mol_type = other RNA

SEQ ID NO: 8879 - RNA, 5797 nt, synthetic construct; identical to SEQ ID NO: 7282
  modified_base 1..5797: mod_base = OTHER; note = Each t is m1f
  source 1..5797: mol_type = other RNA

SEQ ID NO: 8880 - RNA, 5797 nt, synthetic construct; identical to SEQ ID NO: 7283
  modified_base 1..5797: mod_base = OTHER; note = Each t is m1f
  source 1..5797: mol_type = other RNA

SEQ ID NO: 8881 - RNA, 5797 nt, synthetic construct; identical to SEQ ID NO: 7284
  modified_base 1..5797: mod_base = OTHER; note = Each t is m1f
  source 1..5797: mol_type = other RNA

SEQ ID NO: 8882 - RNA, 5797 nt, synthetic construct; identical to SEQ ID NO: 7285
  modified_base 1..5797: mod_base = OTHER; note = Each t is m1f
  source 1..5797: mol_type = other RNA

SEQ ID NO: 8883 - RNA, 5797 nt, synthetic construct; identical to SEQ ID NO: 7286
  modified_base 1..5797: mod_base = OTHER; note = Each t is m1f
  source 1..5797: mol_type = other RNA

SEQ ID NO: 8884 - RNA, 5797 nt, synthetic construct; identical to SEQ ID NO: 7287
  modified_base 1..5797: mod_base = OTHER; note = Each t is m1f
  source 1..5797: mol_type = other RNA

SEQ ID NO: 8885 - RNA, 5797 nt, synthetic construct; identical to SEQ ID NO: 7288
  modified_base 1..5797: mod_base = OTHER; note = Each t is m1f
  source 1..5797: mol_type = other RNA

SEQ ID NO: 8886 - RNA, 5797 nt, synthetic construct; identical to SEQ ID NO: 7289
  modified_base 1..5797: mod_base = OTHER; note = Each t is m1f
  source 1..5797: mol_type = other RNA

SEQ ID NO: 8887 - RNA, 5797 nt, synthetic construct; identical to SEQ ID NO: 7290
  modified_base 1..5797: mod_base = OTHER; note = Each t is m1f
  source 1..5797: mol_type = other RNA

SEQ ID NO: 8888 - RNA, 5797 nt, synthetic construct; identical to SEQ ID NO: 7291
  modified_base 1..5797: mod_base = OTHER; note = Each t is m1f
  source 1..5797: mol_type = other RNA

SEQ ID NO: 8889 - RNA, 5797 nt, synthetic construct; identical to SEQ ID NO: 7292
  modified_base 1..5797: mod_base = OTHER; note = Each t is m1f
  source 1..5797: mol_type = other RNA

SEQ ID NO: 8890 - RNA, 5797 nt, synthetic construct; identical to SEQ ID NO: 7293
  modified_base 1..5797: mod_base = OTHER; note = Each t is m1f
  source 1..5797: mol_type = other RNA

SEQ ID NO: 8891 - RNA, 5797 nt, synthetic construct; identical to SEQ ID NO: 7294
  modified_base 1..5797: mod_base = OTHER; note = Each t is m1f
  source 1..5797: mol_type = other RNA

SEQ ID NO: 8892 - RNA, 5797 nt, synthetic construct; identical to SEQ ID NO: 7295
  modified_base 1..5797: mod_base = OTHER; note = Each t is m1f
  source 1..5797: mol_type = other RNA

SEQ ID NO: 8893 - RNA, 5797 nt, synthetic construct; identical to SEQ ID NO: 7296
  modified_base 1..5797: mod_base = OTHER; note = Each t is m1f
  source 1..5797: mol_type = other RNA

SEQ ID NO: 8894 - RNA, 5797 nt, synthetic construct; identical to SEQ ID NO: 7297
  modified_base 1..5797: mod_base = OTHER; note = Each t is m1f
  source 1..5797: mol_type = other RNA

SEQ ID NO: 8895 - RNA, 5797 nt, synthetic construct; identical to SEQ ID NO: 7298
  modified_base 1..5797: mod_base = OTHER; note = Each t is m1f
  source 1..5797: mol_type = other RNA

SEQ ID NO: 8896 - RNA, 5797 nt, synthetic construct; identical to SEQ ID NO: 7299
  modified_base 1..5797: mod_base = OTHER; note = Each t is m1f
  source 1..5797: mol_type = other RNA

SEQ ID NO: 8897 - RNA, 5797 nt, synthetic construct; identical to SEQ ID NO: 7300
  modified_base 1..5797: mod_base = OTHER; note = Each t is m1f
  source 1..5797: mol_type = other RNA

SEQ ID NO: 8898 - RNA, 5797 nt, synthetic construct; identical to SEQ ID NO: 7301
  modified_base 1..5797: mod_base = OTHER; note = Each t is m1f
  source 1..5797: mol_type = other RNA

SEQ ID NO: 8899 - RNA, 5797 nt, synthetic construct; identical to SEQ ID NO: 7302
  modified_base 1..5797: mod_base = OTHER; note = Each t is m1f
  source 1..5797: mol_type = other RNA

SEQ ID NO: 8900 - RNA, 5797 nt, synthetic construct; identical to SEQ ID NO: 7303
  modified_base 1..5797: mod_base = OTHER; note = Each t is m1f
  source 1..5797: mol_type = other RNA

SEQ ID NO: 8901 - RNA, 5797 nt, synthetic construct; identical to SEQ ID NO: 7304
  modified_base 1..5797: mod_base = OTHER; note = Each t is m1f
  source 1..5797: mol_type = other RNA

SEQ ID NO: 8902 - RNA, 5815 nt, synthetic construct; identical to SEQ ID NO: 7305
  modified_base 1..5797: mod_base = OTHER; note = Each t is m1f
  source 1..5815: mol_type = other RNA

SEQ ID NO: 8903 - RNA, 5806 nt, synthetic construct; identical to SEQ ID NO: 7306
  modified_base 1..5797: mod_base = OTHER; note = Each t is m1f
  source 1..5806: mol_type = other RNA

SEQ ID NO: 8904 - RNA, 5797 nt, synthetic construct; identical to SEQ ID NO: 7307
  modified_base 1..5797: mod_base = OTHER; note = Each t is m1f
  source 1..5797: mol_type = other RNA

SEQ ID NO: 8905 - RNA, 5797 nt, synthetic construct; identical to SEQ ID NO: 7308
  modified_base 1..5797: mod_base = OTHER; note = Each t is m1f
  source 1..5797: mol_type = other RNA

SEQ ID NO: 8906 - RNA, 5797 nt, synthetic construct; identical to SEQ ID NO: 7309
  modified_base 1..5797: mod_base = OTHER; note = Each t is m1f
  source 1..5797: mol_type = other RNA

SEQ ID NO: 8907 - RNA, 5827 nt, synthetic construct; identical to SEQ ID NO: 7310
  modified_base 1..5827: mod_base = OTHER; note = Each t is m1f
  source 1..5827: mol_type = other RNA

SEQ ID NO: 8908 - RNA, 5845 nt, synthetic construct; identical to SEQ ID NO: 7311
  modified_base 1..5845: mod_base = OTHER; note = Each t is m1f
  source 1..5845: mol_type = other RNA

SEQ ID NO: 8909 - RNA, 8787 nt, synthetic construct
  source 1..8787: mol_type = other RNA
aggaaataagagagaaaagaagagtaagaagaaatataagagccaccatggcccctaagaagaagcgtaaagtgagccggatgaaccacgaccaggagttcgacccccctaaggtgtaccctcccgtccccgccgagaagagaaagcccatccgggtcctgagcctgttcgatggcatcgccaccggtctgctggtgctgaaggacctgggcatccaggtggataggtacattgcctccgaggtgtgcgaggactccatcaccgtgggaatggtgcgtcatcagggcaagatcatgtacgtgggcgacgtgcggagcgtgacacagaagcatatccaggagtggggccctttcgacctggtgatcggcggcagcccttgcaatgacctgagcatcgtgaacccagcccggaagggcctgtacgagggaaccggcagactgttcttcgagttttacagactgctgcacgacgcccggcctaaggaaggcgacgaccggcccttcttttggctgttcgagaatgtggtggccatgggagtcagcgacaagcgggatattagccggttcctggagagcaaccccgtgatgatcgatgccaaggaagtgagcgccgcccaccgggccagatacttctggggcaatctgcctggcatgaacagacccctggccagcaccgtgaacgacaagctggagctgcaggagtgcctggagcacggccggatcgccaagttcagcaaggtgagaaccatcaccacccgaagcaacagcatcaaacaaggcaaggaccagcactttcctgtgttcatgaacgagaaggaggacatcctgtggtgtaccgagatggagagagtgttcgggttcccagtccactacacagatgtcagcaacatgtctagactggccagacagagactgctgggaagaagctggtccgtccctgtgatcagacacctgttcgcccctctgaaggagtacttcgcctgcgtgagcagcggcaacagcaacgccaacagccggggccccagcttctctagcggcctggtgccactgtccctgagagggagccacatgggccccatggagatctacaaaaccgtgagcgcctggaagcggcagcctgtgcgcgtgctgagcctgtttcggaatatcgataaagtcctgaaaagcctgggattcctggagagcggctctggctccggcggtggcaccctgaagtacgtggaggatgtgacaaacgtggtcagacgggatgtggagaagtggggccccttcgatctggtgtacggcagcacccaacccctgggcagctcttgtgaccggtgccctggctggtacatgtttcagttccaccggatcctgcagtacgccctgccgagacaggagtcccagcggccattcttttggattttcatggacaacttgctgctgaccgaggatgaccaggaaactaccactcggttcctgcagaccgaagccgtgaccctgcaggacgtgagaggccgggactaccagaacgccatgcgggtgtggtccaacatccctggactgaaaagcaagcacgcacctctgacccctaaagaagaggagtacctgcaggcccaggtgcggagcagaagcaagctggacgcccctaaggtggatctgctggtgaagaattgcctcctgcccctgagagagtacttcaagtatttcagccagaatagtctgcccctgggaggcagcggcggcggcagccagagccccctgaccttcggcgacgtggccgtggagttcagcggcgaggagtgggcctggctggacagcgcccagaggagcctgcacaggagcgtgatgctggagaactacaggaacctggccagcctgggcctgtgcctgagcaagcccgagatgatcagcagcctggagcagaggaaggagccctgggccgtgaagaggaagagcaccaggggcatgcaccccgacagccagaccctgggcggcccaagcagcggcgcccctcctcccagcggcggcaggcggcccaagcagcggcgcccctcctcccagcggcggcagcccagccggctccccaacctctaccgaggagggcacctctgagtccgccacccccgagagcggccctggcacctccaccgagcccagcgagggcagcgcacccggcagccctgccggcagccccacctccacagaggagggaaccagcaccgagcccagcgaaggcagcgccccaggcaccagcaccgagcctagtgagcaggagattaaacggatcaacaagatcagaagaagacttgtgaaagacagcaacaccaagaaggccggcaagacaggccccatgaaaaccctgctggttagagtgatgacacccgatctgagagagcggctggaaaacctgagaaagaagcctgaaaatatcccccagcccatcagcaatacatctagagccaacctgaataagctgctgaccgattacaccgaaatgaagaaggcgatcctgcatgtgtactgggaagagttccagaaggaccctgtgggcctgatgagccgggtggcccagcctgccagcaagaagatcgatcagaacaagctgaaacctgagatggacgagaagggcaacctgaccaccgccggctttgcctgctctcagtgtggccagcccctgttcgtgtacaagctggagcaggtgtctgagaagggcaaggcttacaccaactacttcggacggtgcaatgtggccgagcacgaaaagctgatcctgctggcccagctgaagcccgagaaggatagcgacgaagccgtgacatatagcctgggaaagtttgggcagagggccctggatttctacagcattcatgtgaccaaggagtccacccaccccgtgaagcccctggcccagatcgccggaaacagatacgcctccggacctgtgggaaaggccctgagcgacgcatgtatgggcacaatcgcctccttcctgtctaagtaccaggacatcatcatcgaacaccagaaggtggtgaagggcaaccagaagagactggagagcctgcgggagctggccggcaaggaaaacctggaataccctagcgtgaccctgccacctcagcctcacaccaaggagggcgttgatgcctacaacgaagtgatcgcccgggtgcgaatgtgggtgaacctgaacctgtggcagaagctgaagctaagcagagatgatgccaagcctctgctgagactgaagggattcccttcctttcctctggtcgagagacaggccaacgaagtggactggtgggacatggtgtgtaacgtgaagaagctgatcaacgagaaaaaggaggatggcaaggtgttttggcagaatctggctggctacaagagacaggaagccctgagaccatacctgagcagcgaggaagatcggaagaagggaaagaaattcgctcggtaccagctgggcgacctgctgctgcacctggaaaagaagcacggcgaggactggggaaaggtgtacgacgaggcctgggagcggattgacaagaaagtggaaggcctgagcaagcacatcaagctggaagaggaacggagaagcgaggacgcccagagcaaggccgccctgaccgactggctgcgggctaaggccagcttcgtgatcgagggcctgaaggaggccgacaaggacgagttctgcagatgcgagctgaagctgcagaagtggtacggggacctgcggggaaagcccttcgccatcgaagccgagaacagcatcctggacatcagcggcttcagcaagcagtacaactgtgccttcatctggcagaaggacggcgtgaagaagctgaacctgtacctgatcatcaactacttcaagggcggcaagctgcggttcaagaagatcaaacctgaagccttcgaagccaacagattctacaccgtgatcaacaaaaagagcggcgagatcgtgcccatggaggtgaacttcaacttcgacgaccccaacctgatcatcctgcctctggcctttggcaagagacagggcagagaattcatctggaacgacctgctgtccctggaaaccggcagcctgaagctggccaacggaagagtgatcgagaagacactgtacaacagaagaacccggcaggatgagcctgccctgttcgtggccctgaccttcgagcggcgggaggtcctggactcctccaatatcaaaccaatgaacctgatcggcgtggcaagaggcgaaaacatccccgccgtgatcgccctgaccgaccccgagggctgcccactgagccggtttaaggatagcctgggaaacccaacccacatcctgagaatcggcgagagctataaggagaagcagcggaccatccaggccaagaaggaggtggagcagcggagagccggcggctacagccggaagtacgccagcaaagccaagaatctggcagacgatatggtgagaaacaccgctagagatctgctgtactacgccgtgacccaggatgccatgctgatcttcgccaacctgagccggggcttcggccggcagggcaagcggaccttcatggccgagagacagtacacacggatggaggactggctgaccgccaagctggcctacgagggcctgagcaagacctacctgtccaagacactggcccagtacacctccaagacatgcagcaactgtgggtttaccatcaccagcgccgactacgacagggtgctggagaagctgaagaagacagcaacaggctggatgaccacaattaacggcaaggagctgaaggtggagggccagattacctactacaacagatacaagagacagaacgtagtcaaggacctgtccgtcgagctggatagactgagcgaagaatctgtgaacaacgacatctcctcctggacaaagggcagaagcggagaagctctgagcctcctgaagaaaagattctcccatagacccgtgcaggagaagttcgtgtgcctgaactgcggcttcgagacacacgcagccgagcaagccgccctgaacatcgccagatcctggctgttcctgcggagccaggagtacaagaaataccagacaaacaagacaaccggcaacaccgataagagagccttcgtcgagacctggcagtccttttaccggaagaagcttaaggaggtgtggaaacctgccgtgcggtctggcggatctggcggaggctccaccagccccaagaaaaagagaaaagtctaagctgccttctgcggggcttgccttctggccatgcccttcttctctcccttgcacctgtacctcttggtctttgaataaagcctgagtaggaaggctagcaaaaaaaaaaaaaaaaaaaaaaaaaaaaaaaaaaaaaaaaaaaaaaaaaaaaaaaaaaaaaaaaaaaaaaaaaaaaaaaagcccagccggctccccaacctctaccgaggagggcacctctgagtccgccacccccgagagcggccctggcacctccaccgagcccagcgagggcagcgcacccggcagccctgccggcagccccacctccacagaggagggaaccagcaccgagcccagcgaaggcagcgccccaggcaccagcaccgagcctagtgagcaggagattaaacggatcaacaagatcagaagaagacttgtgaaagacagcaacaccaagaaggccggcaagacaggccccatgaaaaccctgctggttagagtgatgacacccgatctgagagagcggctggaaaacctgagaaagaagcctgaaaatatcccccagcccatcagcaatacatctagagccaacctgaataagctgctgaccgattacaccgaaatgaagaaggcgatcctgcatgtgtactgggaagagttccagaaggaccctgtgggcctgatgagccgggtggcccagcctgccagcaagaagatcgatcagaacaagctgaaacctgagatggacgagaagggcaacctgaccaccgccggctttgcctgctctcagtgtggccagcccctgttcgtgtacaagctggagcaggtgtctgagaagggcaaggcttacaccaactacttcggacggtgcaatgtggccgagcacgaaaagctgatcctgctggcccagctgaagcccgagaaggatagcgacgaagccgtgacatatagcctgggaaagtttgggcagagggccctggatttctacagcattcatgtgaccaaggagtccacccaccccgtgaagcccctggcccagatcgccggaaacagatacgcctccggacctgtgggaaaggccctgagcgacgcatgtatgggcacaatcgcctccttcctgtctaagtaccaggacatcatcatcgaacaccagaaggtggtgaagggcaaccagaagagactggagagcctgcgggagctggccggcaaggaaaacctggaataccctagcgtgaccctgccacctcagcctcacaccaaggagggcgttgatgcctacaacgaagtgatcgcccgggtgcgaatgtgggtgaacctgaacctgtggcagaagctgaagctaagcagagatgatgccaagcctctgctgagactgaagggattcccttcctttcctctggtcgagagacaggccaacgaagtggactggtgggacatggtgtgtaacgtgaagaagctgatcaacgagaaaaaggaggatggcaaggtgttttggcagaatctggctggctacaagagacaggaagccctgagaccatacctgagcagcgaggaagatcggaagaagggaaagaaattcgctcggtaccagctgggcgacctgctgctgcacctggaaaagaagcacggcgaggactggggaaaggtgtacgacgaggcctgggagcggattgacaagaaagtggaaggcctgagcaagcacatcaagctggaagaggaacggagaagcgaggacgcccagagcaaggccgccctgaccgactggctgcgggctaaggccagcttcgtgatcgagggcctgaaggaggccgacaaggacgagttctgcagatgcgagctgaagctgcagaagtggtacggggacctgcggggaaagcccttcgccatcgaagccgagaacagcatcctggacatcagcggcttcagcaagcagtacaactgtgccttcatctggcagaaggacggcgtgaagaagctgaacctgtacctgatcatcaactacttcaagggcggcaagctgcggttcaagaagatcaaacctgaagccttcgaagccaacagattctacaccgtgatcaacaaaaagagcggcgagatcgtgcccatggaggtgaacttcaacttcgacgaccccaacctgatcatcctgcctctggcctttggcaagagacagggcagagaattcatctggaacgacctgctgtccctggaaaccggcagcctgaagctggccaacggaagagtgatcgagaagacactgtacaacagaagaacccggcaggatgagcctgccctgttcgtggccctgaccttcgagcggcgggaggtcctggactcctccaatatcaaaccaatgaacctgatcggcgtggcaagaggcgaaaacatccccgccgtgatcgccctgaccgaccccgagggctgcccactgagccggtttaaggatagcctgggaaacccaacccacatcctgagaatcggcgagagctataaggagaagcagcggaccatccaggccaagaaggaggtggagcagcggagagccggcggctacagccggaagtacgccagcaaagccaagaatctggcagacgatatggtgagaaacaccgctagagatctgctgtactacgccgtgacccaggatgccatgctgatcttcgccaacctgagccggggcttcggccggcagggcaagcggaccttcatggccgagagacagtacacacggatggaggactggctgaccgccaagctggcctacgagggcctgagcaagacctacctgtccaagacactggcccagtacacctccaagacatgcagcaactgtgggtttaccatcaccagcgccgactacgacagggtgctggagaagctgaagaagacagcaacaggctggatgaccacaattaacggcaaggagctgaaggtggagggccagattacctactacaacagatacaagagacagaacgtagtcaaggacctgtccgtcgagctggatagactgagcgaagaatctgtgaacaacgacatctcctcctggacaaagggcagaagcggagaagctctgagcctcctgaagaaaagattctcccatagacccgtgcaggagaagttcgtgtgcctgaactgcggcttcgagacacacgcagccgagcaagccgccctgaacatcgccagatcctggctgttcctgcggagccaggagtacaagaaataccagacaaacaagacaaccggcaacaccgataagagagccttcgtcgagacctggcagtccttttaccggaagaagcttaaggaggtgtggaaacctgccgtgcggtctggcggatctggcggaggctccaccagccccaagaaaaagagaaaagtctaagctgccttctgcggggcttgccttctggccatgcccttcttctctcccttgcacctgtacctcttggtctttgaataaagcctgagtaggaaggctagcaaaaaaaaaaaaaaaaaaaaaaaaaaaaaaaaaaaaaaaaaaaaaaaaaaaaaaaaaaaaaaaaaaaaaaaaaaaaaaaa

SEQ ID NO: 8910 - RNA, 8787 nt, synthetic construct
  source 1..8787: mol_type = other RNA
aggaaataagagagaaaagaagagtaagaagaaatataagagccaccatggcccctaagaagaagcgtaaagtgagccggatgaaccacgaccaggagttcgacccccctaaggtgtaccctcccgtccccgccgagaagagaaagcccatccgggtcctgagcctgttcgatggcatcgccaccggtctgctggtgctgaaggacctgggcatccaggtggataggtacattgcctccgaggtgtgcgaggactccatcaccgtgggaatggtgcgtcatcagggcaagatcatgtacgtgggcgacgtgcggagcgtgacacagaagcatatccaggagtggggccctttcgacctggtgatcggcggcagcccttgcaatgacctgagcatcgtgaacccagcccggaagggcctgtacgagggaaccggcagactgttcttcgagttttacagactgctgcacgacgcccggcctaaggaaggcgacgaccggcccttcttttggctgttcgagaatgtggtggccatgggagtcagcgacaagcgggatattagccggttcctggagagcaaccccgtgatgatcgatgccaaggaagtgagcgccgcccaccgggccagatacttctggggcaatctgcctggcatgaacagacccctggccagcaccgtgaacgacaagctggagctgcaggagtgcctggagcacggccggatcgccaagttcagcaaggtgagaaccatcaccacccgaagcaacagcatcaaacaaggcaaggaccagcactttcctgtgttcatgaacgagaaggaggacatcctgtggtgtaccgagatggagagagtgttcgggttcccagtccactacacagatgtcagcaacatgtctagactggccagacagagactgctgggaagaagctggtccgtccctgtgatcagacacctgttcgcccctctgaaggagtacttcgcctgcgtgagcagcggcaacagcaacgccaacagccggggccccagcttctctagcggcctggtgccactgtccctgagagggagccacatgggccccatggagatctacaaaaccgtgagcgcctggaagcggcagcctgtgcgcgtgctgagcctgtttcggaatatcgataaagtcctgaaaagcctgggattcctggagagcggctctggctccggcggtggcaccctgaagtacgtggaggatgtgacaaacgtggtcagacgggatgtggagaagtggggccccttcgatctggtgtacggcagcacccaacccctgggcagctcttgtgaccggtgccctggctggtacatgtttcagttccaccggatcctgcagtacgccctgccgagacaggagtcccagcggccattcttttggattttcatggacaacttgctgctgaccgaggatgaccaggaaactaccactcggttcctgcagaccgaagccgtgaccctgcaggacgtgagaggccgggactaccagaacgccatgcgggtgtggtccaacatccctggactgaaaagcaagcacgcacctctgacccctaaagaagaggagtacctgcaggcccaggtgcggagcagaagcaagctggacgcccctaaggtggatctgctggtgaagaattgcctcctgcccctgagagagtacttcaagtatttcagccagaatagtctgcccctgggaggcagcggcggcggcagccagagccccctgaccttcggcgacgtggccgtggagttcagcggcgaggagtgggcctggctggacagcgcccagaggagcctgcacaggagcgtgatgctggagaactacaggaacctggccagcctgggcctgtgcctgagcaagcccgagatgatcagcagcctggagcagaggaaggagccctgggccgtgaagaggaagagcaccaggggcatgaggcccgacagccagaccctgggcggcccaagcagcggcgcccctcctcccagcggcggcaggcggcccaagcagcggcgcccctcctcccagcggcggcagcccagccggctccccaacctctaccgaggagggcacctctgagtccgccacccccgagagcggccctggcacctccaccgagcccagcgagggcagcgcacccggcagccctgccggcagccccacctccacagaggagggaaccagcaccgagcccagcgaaggcagcgccccaggcaccagcaccgagcctagtgagcaggagattaaacggatcaacaagatcagaagaagacttgtgaaagacagcaacaccaagaaggccggcaagacaggccccatgaaaaccctgctggttagagtgatgacacccgatctgagagagcggctggaaaacctgagaaagaagcctgaaaatatcccccagcccatcagcaatacatctagagccaacctgaataagctgctgaccgattacaccgaaatgaagaaggcgatcctgcatgtgtactgggaagagttccagaaggaccctgtgggcctgatgagccgggtggcccagcctgccagcaagaagatcgatcagaacaagctgaaacctgagatggacgagaagggcaacctgaccaccgccggctttgcctgctctcagtgtggccagcccctgttcgtgtacaagctggagcaggtgtctgagaagggcaaggcttacaccaactacttcggacggtgcaatgtggccgagcacgaaaagctgatcctgctggcccagctgaagcccgagaaggatagcgacgaagccgtgacatatagcctgggaaagtttgggcagagggccctggatttctacagcattcatgtgaccaaggagtccacccaccccgtgaagcccctggcccagatcgccggaaacagatacgcctccggacctgtgggaaaggccctgagcgacgcatgtatgggcacaatcgcctccttcctgtctaagtaccaggacatcatcatcgaacaccagaaggtggtgaagggcaaccagaagagactggagagcctgcgggagctggccggcaaggaaaacctggaataccctagcgtgaccctgccacctcagcctcacaccaaggagggcgttgatgcctacaacgaagtgatcgcccgggtgcgaatgtgggtgaacctgaacctgtggcagaagctgaagctaagcagagatgatgccaagcctctgctgagactgaagggattcccttcctttcctctggtcgagagacaggccaacgaagtggactggtgggacatggtgtgtaacgtgaagaagctgatcaacgagaaaaaggaggatggcaaggtgttttggcagaatctggctggctacaagagacaggaagccctgagaccatacctgagcagcgaggaagatcggaagaagggaaagaaattcgctcggtaccagctgggcgacctgctgctgcacctggaaaagaagcacggcgaggactggggaaaggtgtacgacgaggcctgggagcggattgacaagaaagtggaaggcctgagcaagcacatcaagctggaagaggaacggagaagcgaggacgcccagagcaaggccgccctgaccgactggctgcgggctaaggccagcttcgtgatcgagggcctgaaggaggccgacaaggacgagttctgcagatgcgagctgaagctgcagaagtggtacggggacctgcggggaaagcccttcgccatcgaagccgagaacagcatcctggacatcagcggcttcagcaagcagtacaactgtgccttcatctggcagaaggacggcgtgaagaagctgaacctgtacctgatcatcaactacttcaagggcggcaagctgcggttcaagaagatcaaacctgaagccttcgaagccaacagattctacaccgtgatcaacaaaaagagcggcgagatcgtgcccatggaggtgaacttcaacttcgacgaccccaacctgatcatcctgcctctggcctttggcaagagacagggcagagaattcatctggaacgacctgctgtccctggaaaccggcagcctgaagctggccaacggaagagtgatcgagaagacactgtacaacagaagaacccggcaggatgagcctgccctgttcgtggccctgaccttcgagcggcgggaggtcctggactcctccaatatcaaaccaatgaacctgatcggcgtggcaagaggcgaaaacatccccgccgtgatcgccctgaccgaccccgagggctgcccactgagccggtttaaggatagcctgggaaacccaacccacatcctgagaatcggcgagagctataaggagaagcagcggaccatccaggccaagaaggaggtggagcagcggagagccggcggctacagccggaagtacgccagcaaagccaagaatctggcagacgatatggtgagaaacaccgctagagatctgctgtactacgccgtgacccaggatgccatgctgatcttcgccaacctgagccggggcttcggccggcagggcaagcggaccttcatggccgagagacagtacacacggatggaggactggctgaccgccaagctggcctacgagggcctgagcaagacctacctgtccaagacactggcccagtacacctccaagacatgcagcaactgtgggtttaccatcaccagcgccgactacgacagggtgctggagaagctgaagaagacagcaacaggctggatgaccacaattaacggcaaggagctgaaggtggagggccagattacctactacaacagatacaagagacagaacgtagtcaaggacctgtccgtcgagctggatagactgagcgaagaatctgtgaacaacgacatctcctcctggacaaagggcagaagcggagaagctctgagcctcctgaagaaaagattctcccatagacccgtgcaggagaagttcgtgtgcctgaactgcggcttcgagacacacgcagccgagcaagccgccctgaacatcgccagatcctggctgttcctgcggagccaggagtacaagaaataccagacaaacaagacaaccggcaacaccgataagagagccttcgtcgagacctggcagtccttttaccggaagaagcttaaggaggtgtggaaacctgccgtgcggtctggcggatctggcggaggctccaccagccccaagaaaaagagaaaagtctaagctgccttctgcggggcttgccttctggccatgcccttcttctctcccttgcacctgtacctcttggtctttgaataaagcctgagtaggaaggctagcaaaaaaaaaaaaaaaaaaaaaaaaaaaaaaaaaaaaaaaaaaaaaaaaaaaaaaaaaaaaaaaaaaaaaaaaaaaaaaaagcccagccggctccccaacctctaccgaggagggcacctctgagtccgccacccccgagagcggccctggcacctccaccgagcccagcgagggcagcgcacccggcagccctgccggcagccccacctccacagaggagggaaccagcaccgagcccagcgaaggcagcgccccaggcaccagcaccgagcctagtgagcaggagattaaacggatcaacaagatcagaagaagacttgtgaaagacagcaacaccaagaaggccggcaagacaggccccatgaaaaccctgctggttagagtgatgacacccgatctgagagagcggctggaaaacctgagaaagaagcctgaaaatatcccccagcccatcagcaatacatctagagccaacctgaataagctgctgaccgattacaccgaaatgaagaaggcgatcctgcatgtgtactgggaagagttccagaaggaccctgtgggcctgatgagccgggtggcccagcctgccagcaagaagatcgatcagaacaagctgaaacctgagatggacgagaagggcaacctgaccaccgccggctttgcctgctctcagtgtggccagcccctgttcgtgtacaagctggagcaggtgtctgagaagggcaaggcttacaccaactacttcggacggtgcaatgtggccgagcacgaaaagctgatcctgctggcccagctgaagcccgagaaggatagcgacgaagccgtgacatatagcctgggaaagtttgggcagagggccctggatttctacagcattcatgtgaccaaggagtccacccaccccgtgaagcccctggcccagatcgccggaaacagatacgcctccggacctgtgggaaaggccctgagcgacgcatgtatgggcacaatcgcctccttcctgtctaagtaccaggacatcatcatcgaacaccagaaggtggtgaagggcaaccagaagagactggagagcctgcgggagctggccggcaaggaaaacctggaataccctagcgtgaccctgccacctcagcctcacaccaaggagggcgttgatgcctacaacgaagtgatcgcccgggtgcgaatgtgggtgaacctgaacctgtggcagaagctgaagctaagcagagatgatgccaagcctctgctgagactgaagggattcccttcctttcctctggtcgagagacaggccaacgaagtggactggtgggacatggtgtgtaacgtgaagaagctgatcaacgagaaaaaggaggatggcaaggtgttttggcagaatctggctggctacaagagacaggaagccctgagaccatacctgagcagcgaggaagatcggaagaagggaaagaaattcgctcggtaccagctgggcgacctgctgctgcacctggaaaagaagcacggcgaggactggggaaaggtgtacgacgaggcctgggagcggattgacaagaaagtggaaggcctgagcaagcacatcaagctggaagaggaacggagaagcgaggacgcccagagcaaggccgccctgaccgactggctgcgggctaaggccagcttcgtgatcgagggcctgaaggaggccgacaaggacgagttctgcagatgcgagctgaagctgcagaagtggtacggggacctgcggggaaagcccttcgccatcgaagccgagaacagcatcctggacatcagcggcttcagcaagcagtacaactgtgccttcatctggcagaaggacggcgtgaagaagctgaacctgtacctgatcatcaactacttcaagggcggcaagctgcggttcaagaagatcaaacctgaagccttcgaagccaacagattctacaccgtgatcaacaaaaagagcggcgagatcgtgcccatggaggtgaacttcaacttcgacgaccccaacctgatcatcctgcctctggcctttggcaagagacagggcagagaattcatctggaacgacctgctgtccctggaaaccggcagcctgaagctggccaacggaagagtgatcgagaagacactgtacaacagaagaacccggcaggatgagcctgccctgttcgtggccctgaccttcgagcggcgggaggtcctggactcctccaatatcaaaccaatgaacctgatcggcgtggcaagaggcgaaaacatccccgccgtgatcgccctgaccgaccccgagggctgcccactgagccggtttaaggatagcctgggaaacccaacccacatcctgagaatcggcgagagctataaggagaagcagcggaccatccaggccaagaaggaggtggagcagcggagagccggcggctacagccggaagtacgccagcaaagccaagaatctggcagacgatatggtgagaaacaccgctagagatctgctgtactacgccgtgacccaggatgccatgctgatcttcgccaacctgagccggggcttcggccggcagggcaagcggaccttcatggccgagagacagtacacacggatggaggactggctgaccgccaagctggcctacgagggcctgagcaagacctacctgtccaagacactggcccagtacacctccaagacatgcagcaactgtgggtttaccatcaccagcgccgactacgacagggtgctggagaagctgaagaagacagcaacaggctggatgaccacaattaacggcaaggagctgaaggtggagggccagattacctactacaacagatacaagagacagaacgtagtcaaggacctgtccgtcgagctggatagactgagcgaagaatctgtgaacaacgacatctcctcctggacaaagggcagaagcggagaagctctgagcctcctgaagaaaagattctcccatagacccgtgcaggagaagttcgtgtgcctgaactgcggcttcgagacacacgcagccgagcaagccgccctgaacatcgccagatcctggctgttcctgcggagccaggagtacaagaaataccagacaaacaagacaaccggcaacaccgataagagagccttcgtcgagacctggcagtccttttaccggaagaagcttaaggaggtgtggaaacctgccgtgcggtctggcggatctggcggaggctccaccagccccaagaaaaagagaaaagtctaagctgccttctgcggggcttgccttctggccatgcccttcttctctcccttgcacctgtacctcttggtctttgaataaagcctgagtaggaaggctagcaaaaaaaaaaaaaaaaaaaaaaaaaaaaaaaaaaaaaaaaaaaaaaaaaaaaaaaaaaaaaaaaaaaaaaaaaaaaaaaa

SEQ ID NO: 8911 - RNA, 8787 nt, synthetic construct
  source 1..8787: mol_type = other RNA
aggaaataagagagaaaagaagagtaagaagaaatataagagccaccatggcccctaagaagaagcgtaaagtgagccggatgaaccacgaccaggagttcgacccccctaaggtgtaccctcccgtccccgccgagaagagaaagcccatccgggtcctgagcctgttcgatggcatcgccaccggtctgctggtgctgaaggacctgggcatccaggtggataggtacattgcctccgaggtgtgcgaggactccatcaccgtgggaatggtgcgtcatcagggcaagatcatgtacgtgggcgacgtgcggagcgtgacacagaagcatatccaggagtggggccctttcgacctggtgatcggcggcagcccttgcaatgacctgagcatcgtgaacccagcccggaagggcctgtacgagggaaccggcagactgttcttcgagttttacagactgctgcacgacgcccggcctaaggaaggcgacgaccggcccttcttttggctgttcgagaatgtggtggccatgggagtcagcgacaagcgggatattagccggttcctggagagcaaccccgtgatgatcgatgccaaggaagtgagcgccgcccaccgggccagatacttctggggcaatctgcctggcatgaacagacccctggccagcaccgtgaacgacaagctggagctgcaggagtgcctggagcacggccggatcgccaagttcagcaaggtgagaaccatcaccacccgaagcaacagcatcaaacaaggcaaggaccagcactttcctgtgttcatgaacgagaaggaggacatcctgtggtgtaccgagatggagagagtgttcgggttcccagtccactacacagatgtcagcaacatgtctagactggccagacagagactgctgggaagaagctggtccgtccctgtgatcagacacctgttcgcccctctgaaggagtacttcgcctgcgtgagcagcggcaacagcaacgccaacagccggggccccagcttctctagcggcctggtgccactgtccctgagagggagccacatgggccccatggagatctacaaaaccgtgagcgcctggaagcggcagcctgtgcgcgtgctgagcctgtttcggaatatcgataaagtcctgaaaagcctgggattcctggagagcggctctggctccggcggtggcaccctgaagtacgtggaggatgtgacaaacgtggtcagacgggatgtggagaagtggggccccttcgatctggtgtacggcagcacccaacccctgggcagctcttgtgaccggtgccctggctggtacatgtttcagttccaccggatcctgcagtacgccctgccgagacaggagtcccagcggccattcttttggattttcatggacaacttgctgctgaccgaggatgaccaggaaactaccactcggttcctgcagaccgaagccgtgaccctgcaggacgtgagaggccgggactaccagaacgccatgcgggtgtggtccaacatccctggactgaaaagcaagcacgcacctctgacccctaaagaagaggagtacctgcaggcccaggtgcggagcagaagcaagctggacgcccctaaggtggatctgctggtgaagaattgcctcctgcccctgagagagtacttcaagtatttcagccagaatagtctgcccctgggaggcagcggcggcggcatggccttcgaggacgtggccgtgtacttcagccaggaggagtggggcctgctggacaccgcccagagggccctgtacaggagggtgatgctggacaacttcgccctggtggccagcctgggcctgagcaccagcaggcccagggtggtgatccagctggagaggggcgaggagccctgggtgcccagcggcaccgacaccaccctgagcaggaccacctacaggaggaggaaccccggcagcggcggcccaagcagcggcgcccctcctcccagcggcggcaggcggcccaagcagcggcgcccctcctcccagcggcggcagcccagccggctccccaacctctaccgaggagggcacctctgagtccgccacccccgagagcggccctggcacctccaccgagcccagcgagggcagcgcacccggcagccctgccggcagccccacctccacagaggagggaaccagcaccgagcccagcgaaggcagcgccccaggcaccagcaccgagcctagtgagcaggagattaaacggatcaacaagatcagaagaagacttgtgaaagacagcaacaccaagaaggccggcaagacaggccccatgaaaaccctgctggttagagtgatgacacccgatctgagagagcggctggaaaacctgagaaagaagcctgaaaatatcccccagcccatcagcaatacatctagagccaacctgaataagctgctgaccgattacaccgaaatgaagaaggcgatcctgcatgtgtactgggaagagttccagaaggaccctgtgggcctgatgagccgggtggcccagcctgccagcaagaagatcgatcagaacaagctgaaacctgagatggacgagaagggcaacctgaccaccgccggctttgcctgctctcagtgtggccagcccctgttcgtgtacaagctggagcaggtgtctgagaagggcaaggcttacaccaactacttcggacggtgcaatgtggccgagcacgaaaagctgatcctgctggcccagctgaagcccgagaaggatagcgacgaagccgtgacatatagcctgggaaagtttgggcagagggccctggatttctacagcattcatgtgaccaaggagtccacccaccccgtgaagcccctggcccagatcgccggaaacagatacgcctccggacctgtgggaaaggccctgagcgacgcatgtatgggcacaatcgcctccttcctgtctaagtaccaggacatcatcatcgaacaccagaaggtggtgaagggcaaccagaagagactggagagcctgcgggagctggccggcaaggaaaacctggaataccctagcgtgaccctgccacctcagcctcacaccaaggagggcgttgatgcctacaacgaagtgatcgcccgggtgcgaatgtgggtgaacctgaacctgtggcagaagctgaagctaagcagagatgatgccaagcctctgctgagactgaagggattcccttcctttcctctggtcgagagacaggccaacgaagtggactggtgggacatggtgtgtaacgtgaagaagctgatcaacgagaaaaaggaggatggcaaggtgttttggcagaatctggctggctacaagagacaggaagccctgagaccatacctgagcagcgaggaagatcggaagaagggaaagaaattcgctcggtaccagctgggcgacctgctgctgcacctggaaaagaagcacggcgaggactggggaaaggtgtacgacgaggcctgggagcggattgacaagaaagtggaaggcctgagcaagcacatcaagctggaagaggaacggagaagcgaggacgcccagagcaaggccgccctgaccgactggctgcgggctaaggccagcttcgtgatcgagggcctgaaggaggccgacaaggacgagttctgcagatgcgagctgaagctgcagaagtggtacggggacctgcggggaaagcccttcgccatcgaagccgagaacagcatcctggacatcagcggcttcagcaagcagtacaactgtgccttcatctggcagaaggacggcgtgaagaagctgaacctgtacctgatcatcaactacttcaagggcggcaagctgcggttcaagaagatcaaacctgaagccttcgaagccaacagattctacaccgtgatcaacaaaaagagcggcgagatcgtgcccatggaggtgaacttcaacttcgacgaccccaacctgatcatcctgcctctggcctttggcaagagacagggcagagaattcatctggaacgacctgctgtccctggaaaccggcagcctgaagctggccaacggaagagtgatcgagaagacactgtacaacagaagaacccggcaggatgagcctgccctgttcgtggccctgaccttcgagcggcgggaggtcctggactcctccaatatcaaaccaatgaacctgatcggcgtggcaagaggcgaaaacatccccgccgtgatcgccctgaccgaccccgagggctgcccactgagccggtttaaggatagcctgggaaacccaacccacatcctgagaatcggcgagagctataaggagaagcagcggaccatccaggccaagaaggaggtggagcagcggagagccggcggctacagccggaagtacgccagcaaagccaagaatctggcagacgatatggtgagaaacaccgctagagatctgctgtactacgccgtgacccaggatgccatgctgatcttcgccaacctgagccggggcttcggccggcagggcaagcggaccttcatggccgagagacagtacacacggatggaggactggctgaccgccaagctggcctacgagggcctgagcaagacctacctgtccaagacactggcccagtacacctccaagacatgcagcaactgtgggtttaccatcaccagcgccgactacgacagggtgctggagaagctgaagaagacagcaacaggctggatgaccacaattaacggcaaggagctgaaggtggagggccagattacctactacaacagatacaagagacagaacgtagtcaaggacctgtccgtcgagctggatagactgagcgaagaatctgtgaacaacgacatctcctcctggacaaagggcagaagcggagaagctctgagcctcctgaagaaaagattctcccatagacccgtgcaggagaagttcgtgtgcctgaactgcggcttcgagacacacgcagccgagcaagccgccctgaacatcgccagatcctggctgttcctgcggagccaggagtacaagaaataccagacaaacaagacaaccggcaacaccgataagagagccttcgtcgagacctggcagtccttttaccggaagaagcttaaggaggtgtggaaacctgccgtgcggtctggcggatctggcggaggctccaccagccccaagaaaaagagaaaagtctaagctgccttctgcggggcttgccttctggccatgcccttcttctctcccttgcacctgtacctcttggtctttgaataaagcctgagtaggaaggctagcaaaaaaaaaaaaaaaaaaaaaaaaaaaaaaaaaaaaaaaaaaaaaaaaaaaaaaaaaaaaaaaaaaaaaaaaaaaaaaaagcccagccggctccccaacctctaccgaggagggcacctctgagtccgccacccccgagagcggccctggcacctccaccgagcccagcgagggcagcgcacccggcagccctgccggcagccccacctccacagaggagggaaccagcaccgagcccagcgaaggcagcgccccaggcaccagcaccgagcctagtgagcaggagattaaacggatcaacaagatcagaagaagacttgtgaaagacagcaacaccaagaaggccggcaagacaggccccatgaaaaccctgctggttagagtgatgacacccgatctgagagagcggctggaaaacctgagaaagaagcctgaaaatatcccccagcccatcagcaatacatctagagccaacctgaataagctgctgaccgattacaccgaaatgaagaaggcgatcctgcatgtgtactgggaagagttccagaaggaccctgtgggcctgatgagccgggtggcccagcctgccagcaagaagatcgatcagaacaagctgaaacctgagatggacgagaagggcaacctgaccaccgccggctttgcctgctctcagtgtggccagcccctgttcgtgtacaagctggagcaggtgtctgagaagggcaaggcttacaccaactacttcggacggtgcaatgtggccgagcacgaaaagctgatcctgctggcccagctgaagcccgagaaggatagcgacgaagccgtgacatatagcctgggaaagtttgggcagagggccctggatttctacagcattcatgtgaccaaggagtccacccaccccgtgaagcccctggcccagatcgccggaaacagatacgcctccggacctgtgggaaaggccctgagcgacgcatgtatgggcacaatcgcctccttcctgtctaagtaccaggacatcatcatcgaacaccagaaggtggtgaagggcaaccagaagagactggagagcctgcgggagctggccggcaaggaaaacctggaataccctagcgtgaccctgccacctcagcctcacaccaaggagggcgttgatgcctacaacgaagtgatcgcccgggtgcgaatgtgggtgaacctgaacctgtggcagaagctgaagctaagcagagatgatgccaagcctctgctgagactgaagggattcccttcctttcctctggtcgagagacaggccaacgaagtggactggtgggacatggtgtgtaacgtgaagaagctgatcaacgagaaaaaggaggatggcaaggtgttttggcagaatctggctggctacaagagacaggaagccctgagaccatacctgagcagcgaggaagatcggaagaagggaaagaaattcgctcggtaccagctgggcgacctgctgctgcacctggaaaagaagcacggcgaggactggggaaaggtgtacgacgaggcctgggagcggattgacaagaaagtggaaggcctgagcaagcacatcaagctggaagaggaacggagaagcgaggacgcccagagcaaggccgccctgaccgactggctgcgggctaaggccagcttcgtgatcgagggcctgaaggaggccgacaaggacgagttctgcagatgcgagctgaagctgcagaagtggtacggggacctgcggggaaagcccttcgccatcgaagccgagaacagcatcctggacatcagcggcttcagcaagcagtacaactgtgccttcatctggcagaaggacggcgtgaagaagctgaacctgtacctgatcatcaactacttcaagggcggcaagctgcggttcaagaagatcaaacctgaagccttcgaagccaacagattctacaccgtgatcaacaaaaagagcggcgagatcgtgcccatggaggtgaacttcaacttcgacgaccccaacctgatcatcctgcctctggcctttggcaagagacagggcagagaattcatctggaacgacctgctgtccctggaaaccggcagcctgaagctggccaacggaagagtgatcgagaagacactgtacaacagaagaacccggcaggatgagcctgccctgttcgtggccctgaccttcgagcggcgggaggtcctggactcctccaatatcaaaccaatgaacctgatcggcgtggcaagaggcgaaaacatccccgccgtgatcgccctgaccgaccccgagggctgcccactgagccggtttaaggatagcctgggaaacccaacccacatcctgagaatcggcgagagctataaggagaagcagcggaccatccaggccaagaaggaggtggagcagcggagagccggcggctacagccggaagtacgccagcaaagccaagaatctggcagacgatatggtgagaaacaccgctagagatctgctgtactacgccgtgacccaggatgccatgctgatcttcgccaacctgagccggggcttcggccggcagggcaagcggaccttcatggccgagagacagtacacacggatggaggactggctgaccgccaagctggcctacgagggcctgagcaagacctacctgtccaagacactggcccagtacacctccaagacatgcagcaactgtgggtttaccatcaccagcgccgactacgacagggtgctggagaagctgaagaagacagcaacaggctggatgaccacaattaacggcaaggagctgaaggtggagggccagattacctactacaacagatacaagagacagaacgtagtcaaggacctgtccgtcgagctggatagactgagcgaagaatctgtgaacaacgacatctcctcctggacaaagggcagaagcggagaagctctgagcctcctgaagaaaagattctcccatagacccgtgcaggagaagttcgtgtgcctgaactgcggcttcgagacacacgcagccgagcaagccgccctgaacatcgccagatcctggctgttcctgcggagccaggagtacaagaaataccagacaaacaagacaaccggcaacaccgataagagagccttcgtcgagacctggcagtccttttaccggaagaagcttaaggaggtgtggaaacctgccgtgcggtctggcggatctggcggaggctccaccagccccaagaaaaagagaaaagtctaagctgccttctgcggggcttgccttctggccatgcccttcttctctcccttgcacctgtacctcttggtctttgaataaagcctgagtaggaaggctagcaaaaaaaaaaaaaaaaaaaaaaaaaaaaaaaaaaaaaaaaaaaaaaaaaaaaaaaaaaaaaaaaaaaaaaaaaaaaaaaa

SEQ ID NO: 8912 - RNA, 8787 nt, synthetic construct
  source 1..8787: mol_type = other RNA
aggaaataagagagaaaagaagagtaagaagaaatataagagccaccatggcccctaagaagaagcgtaaagtgagccggatgaaccacgaccaggagttcgacccccctaaggtgtaccctcccgtccccgccgagaagagaaagcccatccgggtcctgagcctgttcgatggcatcgccaccggtctgctggtgctgaaggacctgggcatccaggtggataggtacattgcctccgaggtgtgcgaggactccatcaccgtgggaatggtgcgtcatcagggcaagatcatgtacgtgggcgacgtgcggagcgtgacacagaagcatatccaggagtggggccctttcgacctggtgatcggcggcagcccttgcaatgacctgagcatcgtgaacccagcccggaagggcctgtacgagggaaccggcagactgttcttcgagttttacagactgctgcacgacgcccggcctaaggaaggcgacgaccggcccttcttttggctgttcgagaatgtggtggccatgggagtcagcgacaagcgggatattagccggttcctggagagcaaccccgtgatgatcgatgccaaggaagtgagcgccgcccaccgggccagatacttctggggcaatctgcctggcatgaacagacccctggccagcaccgtgaacgacaagctggagctgcaggagtgcctggagcacggccggatcgccaagttcagcaaggtgagaaccatcaccacccgaagcaacagcatcaaacaaggcaaggaccagcactttcctgtgttcatgaacgagaaggaggacatcctgtggtgtaccgagatggagagagtgttcgggttcccagtccactacacagatgtcagcaacatgtctagactggccagacagagactgctgggaagaagctggtccgtccctgtgatcagacacctgttcgcccctctgaaggagtacttcgcctgcgtgagcagcggcaacagcaacgccaacagccggggccccagcttctctagcggcctggtgccactgtccctgagagggagccacatgggccccatggagatctacaaaaccgtgagcgcctggaagcggcagcctgtgcgcgtgctgagcctgtttcggaatatcgataaagtcctgaaaagcctgggattcctggagagcggctctggctccggcggtggcaccctgaagtacgtggaggatgtgacaaacgtggtcagacgggatgtggagaagtggggccccttcgatctggtgtacggcagcacccaacccctgggcagctcttgtgaccggtgccctggctggtacatgtttcagttccaccggatcctgcagtacgccctgccgagacaggagtcccagcggccattcttttggattttcatggacaacttgctgctgaccgaggatgaccaggaaactaccactcggttcctgcagaccgaagccgtgaccctgcaggacgtgagaggccgggactaccagaacgccatgcgggtgtggtccaacatccctggactgaaaagcaagcacgcacctctgacccctaaagaagaggagtacctgcaggcccaggtgcggagcagaagcaagctggacgcccctaaggtggatctgctggtgaagaattgcctcctgcccctgagagagtacttcaagtatttcagccagaatagtctgcccctgggaggcagcggcggcggcagccagagcagcgtgaccttcggcgacgtggccgtggacttcagccaggacgagtgggcctggctggacgccacccagaggagcctgtacaggagcgtgatgctggagaactacaggaacctggtgagcctgggcctgtgcagcagcaagcccgacatgatcagcagcctggagcagaggaaggagccctggaccgtgaagaggaagctgcccggcggcggctgccccgacccccaggccgtgggcggcccaagcagcggcgcccctcctcccagcggcggcaggcggcccaagcagcggcgcccctcctcccagcggcggcagcccagccggctccccaacctctaccgaggagggcacctctgagtccgccacccccgagagcggccctggcacctccaccgagcccagcgagggcagcgcacccggcagccctgccggcagccccacctccacagaggagggaaccagcaccgagcccagcgaaggcagcgccccaggcaccagcaccgagcctagtgagcaggagattaaacggatcaacaagatcagaagaagacttgtgaaagacagcaacaccaagaaggccggcaagacaggccccatgaaaaccctgctggttagagtgatgacacccgatctgagagagcggctggaaaacctgagaaagaagcctgaaaatatcccccagcccatcagcaatacatctagagccaacctgaataagctgctgaccgattacaccgaaatgaagaaggcgatcctgcatgtgtactgggaagagttccagaaggaccctgtgggcctgatgagccgggtggcccagcctgccagcaagaagatcgatcagaacaagctgaaacctgagatggacgagaagggcaacctgaccaccgccggctttgcctgctctcagtgtggccagcccctgttcgtgtacaagctggagcaggtgtctgagaagggcaaggcttacaccaactacttcggacggtgcaatgtggccgagcacgaaaagctgatcctgctggcccagctgaagcccgagaaggatagcgacgaagccgtgacatatagcctgggaaagtttgggcagagggccctggatttctacagcattcatgtgaccaaggagtccacccaccccgtgaagcccctggcccagatcgccggaaacagatacgcctccggacctgtgggaaaggccctgagcgacgcatgtatgggcacaatcgcctccttcctgtctaagtaccaggacatcatcatcgaacaccagaaggtggtgaagggcaaccagaagagactggagagcctgcgggagctggccggcaaggaaaacctggaataccctagcgtgaccctgccacctcagcctcacaccaaggagggcgttgatgcctacaacgaagtgatcgcccgggtgcgaatgtgggtgaacctgaacctgtggcagaagctgaagctaagcagagatgatgccaagcctctgctgagactgaagggattcccttcctttcctctggtcgagagacaggccaacgaagtggactggtgggacatggtgtgtaacgtgaagaagctgatcaacgagaaaaaggaggatggcaaggtgttttggcagaatctggctggctacaagagacaggaagccctgagaccatacctgagcagcgaggaagatcggaagaagggaaagaaattcgctcggtaccagctgggcgacctgctgctgcacctggaaaagaagcacggcgaggactggggaaaggtgtacgacgaggcctgggagcggattgacaagaaagtggaaggcctgagcaagcacatcaagctggaagaggaacggagaagcgaggacgcccagagcaaggccgccctgaccgactggctgcgggctaaggccagcttcgtgatcgagggcctgaaggaggccgacaaggacgagttctgcagatgcgagctgaagctgcagaagtggtacggggacctgcggggaaagcccttcgccatcgaagccgagaacagcatcctggacatcagcggcttcagcaagcagtacaactgtgccttcatctggcagaaggacggcgtgaagaagctgaacctgtacctgatcatcaactacttcaagggcggcaagctgcggttcaagaagatcaaacctgaagccttcgaagccaacagattctacaccgtgatcaacaaaaagagcggcgagatcgtgcccatggaggtgaacttcaacttcgacgaccccaacctgatcatcctgcctctggcctttggcaagagacagggcagagaattcatctggaacgacctgctgtccctggaaaccggcagcctgaagctggccaacggaagagtgatcgagaagacactgtacaacagaagaacccggcaggatgagcctgccctgttcgtggccctgaccttcgagcggcgggaggtcctggactcctccaatatcaaaccaatgaacctgatcggcgtggcaagaggcgaaaacatccccgccgtgatcgccctgaccgaccccgagggctgcccactgagccggtttaaggatagcctgggaaacccaacccacatcctgagaatcggcgagagctataaggagaagcagcggaccatccaggccaagaaggaggtggagcagcggagagccggcggctacagccggaagtacgccagcaaagccaagaatctggcagacgatatggtgagaaacaccgctagagatctgctgtactacgccgtgacccaggatgccatgctgatcttcgccaacctgagccggggcttcggccggcagggcaagcggaccttcatggccgagagacagtacacacggatggaggactggctgaccgccaagctggcctacgagggcctgagcaagacctacctgtccaagacactggcccagtacacctccaagacatgcagcaactgtgggtttaccatcaccagcgccgactacgacagggtgctggagaagctgaagaagacagcaacaggctggatgaccacaattaacggcaaggagctgaaggtggagggccagattacctactacaacagatacaagagacagaacgtagtcaaggacctgtccgtcgagctggatagactgagcgaagaatctgtgaacaacgacatctcctcctggacaaagggcagaagcggagaagctctgagcctcctgaagaaaagattctcccatagacccgtgcaggagaagttcgtgtgcctgaactgcggcttcgagacacacgcagccgagcaagccgccctgaacatcgccagatcctggctgttcctgcggagccaggagtacaagaaataccagacaaacaagacaaccggcaacaccgataagagagccttcgtcgagacctggcagtccttttaccggaagaagcttaaggaggtgtggaaacctgccgtgcggtctggcggatctggcggaggctccaccagccccaagaaaaagagaaaagtctaagctgccttctgcggggcttgccttctggccatgcccttcttctctcccttgcacctgtacctcttggtctttgaataaagcctgagtaggaaggctagcaaaaaaaaaaaaaaaaaaaaaaaaaaaaaaaaaaaaaaaaaaaaaaaaaaaaaaaaaaaaaaaaaaaaaaaaaaaaaaaagcccagccggctccccaacctctaccgaggagggcacctctgagtccgccacccccgagagcggccctggcacctccaccgagcccagcgagggcagcgcacccggcagccctgccggcagccccacctccacagaggagggaaccagcaccgagcccagcgaaggcagcgccccaggcaccagcaccgagcctagtgagcaggagattaaacggatcaacaagatcagaagaagacttgtgaaagacagcaacaccaagaaggccggcaagacaggccccatgaaaaccctgctggttagagtgatgacacccgatctgagagagcggctggaaaacctgagaaagaagcctgaaaatatcccccagcccatcagcaatacatctagagccaacctgaataagctgctgaccgattacaccgaaatgaagaaggcgatcctgcatgtgtactgggaagagttccagaaggaccctgtgggcctgatgagccgggtggcccagcctgccagcaagaagatcgatcagaacaagctgaaacctgagatggacgagaagggcaacctgaccaccgccggctttgcctgctctcagtgtggccagcccctgttcgtgtacaagctggagcaggtgtctgagaagggcaaggcttacaccaactacttcggacggtgcaatgtggccgagcacgaaaagctgatcctgctggcccagctgaagcccgagaaggatagcgacgaagccgtgacatatagcctgggaaagtttgggcagagggccctggatttctacagcattcatgtgaccaaggagtccacccaccccgtgaagcccctggcccagatcgccggaaacagatacgcctccggacctgtgggaaaggccctgagcgacgcatgtatgggcacaatcgcctccttcctgtctaagtaccaggacatcatcatcgaacaccagaaggtggtgaagggcaaccagaagagactggagagcctgcgggagctggccggcaaggaaaacctggaataccctagcgtgaccctgccacctcagcctcacaccaaggagggcgttgatgcctacaacgaagtgatcgcccgggtgcgaatgtgggtgaacctgaacctgtggcagaagctgaagctaagcagagatgatgccaagcctctgctgagactgaagggattcccttcctttcctctggtcgagagacaggccaacgaagtggactggtgggacatggtgtgtaacgtgaagaagctgatcaacgagaaaaaggaggatggcaaggtgttttggcagaatctggctggctacaagagacaggaagccctgagaccatacctgagcagcgaggaagatcggaagaagggaaagaaattcgctcggtaccagctgggcgacctgctgctgcacctggaaaagaagcacggcgaggactggggaaaggtgtacgacgaggcctgggagcggattgacaagaaagtggaaggcctgagcaagcacatcaagctggaagaggaacggagaagcgaggacgcccagagcaaggccgccctgaccgactggctgcgggctaaggccagcttcgtgatcgagggcctgaaggaggccgacaaggacgagttctgcagatgcgagctgaagctgcagaagtggtacggggacctgcggggaaagcccttcgccatcgaagccgagaacagcatcctggacatcagcggcttcagcaagcagtacaactgtgccttcatctggcagaaggacggcgtgaagaagctgaacctgtacctgatcatcaactacttcaagggcggcaagctgcggttcaagaagatcaaacctgaagccttcgaagccaacagattctacaccgtgatcaacaaaaagagcggcgagatcgtgcccatggaggtgaacttcaacttcgacgaccccaacctgatcatcctgcctctggcctttggcaagagacagggcagagaattcatctggaacgacctgctgtccctggaaaccggcagcctgaagctggccaacggaagagtgatcgagaagacactgtacaacagaagaacccggcaggatgagcctgccctgttcgtggccctgaccttcgagcggcgggaggtcctggactcctccaatatcaaaccaatgaacctgatcggcgtggcaagaggcgaaaacatccccgccgtgatcgccctgaccgaccccgagggctgcccactgagccggtttaaggatagcctgggaaacccaacccacatcctgagaatcggcgagagctataaggagaagcagcggaccatccaggccaagaaggaggtggagcagcggagagccggcggctacagccggaagtacgccagcaaagccaagaatctggcagacgatatggtgagaaacaccgctagagatctgctgtactacgccgtgacccaggatgccatgctgatcttcgccaacctgagccggggcttcggccggcagggcaagcggaccttcatggccgagagacagtacacacggatggaggactggctgaccgccaagctggcctacgagggcctgagcaagacctacctgtccaagacactggcccagtacacctccaagacatgcagcaactgtgggtttaccatcaccagcgccgactacgacagggtgctggagaagctgaagaagacagcaacaggctggatgaccacaattaacggcaaggagctgaaggtggagggccagattacctactacaacagatacaagagacagaacgtagtcaaggacctgtccgtcgagctggatagactgagcgaagaatctgtgaacaacgacatctcctcctggacaaagggcagaagcggagaagctctgagcctcctgaagaaaagattctcccatagacccgtgcaggagaagttcgtgtgcctgaactgcggcttcgagacacacgcagccgagcaagccgccctgaacatcgccagatcctggctgttcctgcggagccaggagtacaagaaataccagacaaacaagacaaccggcaacaccgataagagagccttcgtcgagacctggcagtccttttaccggaagaagcttaaggaggtgtggaaacctgccgtgcggtctggcggatctggcggaggctccaccagccccaagaaaaagagaaaagtctaagctgccttctgcggggcttgccttctggccatgcccttcttctctcccttgcacctgtacctcttggtctttgaataaagcctgagtaggaaggctagcaaaaaaaaaaaaaaaaaaaaaaaaaaaaaaaaaaaaaaaaaaaaaaaaaaaaaaaaaaaaaaaaaaaaaaaaaaaaaaaa

SEQ ID NO: 8913 - RNA, 8787 nt, synthetic construct
  source 1..8787: mol_type = other RNA
aggaaataagagagaaaagaagagtaagaagaaatataagagccaccatggcccctaagaagaagcgtaaagtgagccggatgaaccacgaccaggagttcgacccccctaaggtgtaccctcccgtccccgccgagaagagaaagcccatccgggtcctgagcctgttcgatggcatcgccaccggtctgctggtgctgaaggacctgggcatccaggtggataggtacattgcctccgaggtgtgcgaggactccatcaccgtgggaatggtgcgtcatcagggcaagatcatgtacgtgggcgacgtgcggagcgtgacacagaagcatatccaggagtggggccctttcgacctggtgatcggcggcagcccttgcaatgacctgagcatcgtgaacccagcccggaagggcctgtacgagggaaccggcagactgttcttcgagttttacagactgctgcacgacgcccggcctaaggaaggcgacgaccggcccttcttttggctgttcgagaatgtggtggccatgggagtcagcgacaagcgggatattagccggttcctggagagcaaccccgtgatgatcgatgccaaggaagtgagcgccgcccaccgggccagatacttctggggcaatctgcctggcatgaacagacccctggccagcaccgtgaacgacaagctggagctgcaggagtgcctggagcacggccggatcgccaagttcagcaaggtgagaaccatcaccacccgaagcaacagcatcaaacaaggcaaggaccagcactttcctgtgttcatgaacgagaaggaggacatcctgtggtgtaccgagatggagagagtgttcgggttcccagtccactacacagatgtcagcaacatgtctagactggccagacagagactgctgggaagaagctggtccgtccctgtgatcagacacctgttcgcccctctgaaggagtacttcgcctgcgtgagcagcggcaacagcaacgccaacagccggggccccagcttctctagcggcctggtgccactgtccctgagagggagccacatgggccccatggagatctacaaaaccgtgagcgcctggaagcggcagcctgtgcgcgtgctgagcctgtttcggaatatcgataaagtcctgaaaagcctgggattcctggagagcggctctggctccggcggtggcaccctgaagtacgtggaggatgtgacaaacgtggtcagacgggatgtggagaagtggggccccttcgatctggtgtacggcagcacccaacccctgggcagctcttgtgaccggtgccctggctggtacatgtttcagttccaccggatcctgcagtacgccctgccgagacaggagtcccagcggccattcttttggattttcatggacaacttgctgctgaccgaggatgaccaggaaactaccactcggttcctgcagaccgaagccgtgaccctgcaggacgtgagaggccgggactaccagaacgccatgcgggtgtggtccaacatccctggactgaaaagcaagcacgcacctctgacccctaaagaagaggagtacctgcaggcccaggtgcggagcagaagcaagctggacgcccctaaggtggatctgctggtgaagaattgcctcctgcccctgagagagtacttcaagtatttcagccagaatagtctgcccctgggaggcagcggcggcggcagccagggcagcgtgaccttcagggacgtggccatcgacttcagccaggaggagtggaagtggctgcagcccgcccagagggacctgtacaggagggtgatgctggagaactacggccacctggtgagcctgggcctgagcatcagcaagcccgacgtggtgagcctgctggagcagggcaaggagccctggctgggcaagaggaacgtgaagagggacctgttcagcgccagcgagagcagcggcggcccaagcagcggcgcccctcctcccagcggcggcaggcggcccaagcagcggcgcccctcctcccagcggcggcagcccagccggctccccaacctctaccgaggagggcacctctgagtccgccacccccgagagcggccctggcacctccaccgagcccagcgagggcagcgcacccggcagccctgccggcagccccacctccacagaggagggaaccagcaccgagcccagcgaaggcagcgccccaggcaccagcaccgagcctagtgagcaggagattaaacggatcaacaagatcagaagaagacttgtgaaagacagcaacaccaagaaggccggcaagacaggccccatgaaaaccctgctggttagagtgatgacacccgatctgagagagcggctggaaaacctgagaaagaagcctgaaaatatcccccagcccatcagcaatacatctagagccaacctgaataagctgctgaccgattacaccgaaatgaagaaggcgatcctgcatgtgtactgggaagagttccagaaggaccctgtgggcctgatgagccgggtggcccagcctgccagcaagaagatcgatcagaacaagctgaaacctgagatggacgagaagggcaacctgaccaccgccggctttgcctgctctcagtgtggccagcccctgttcgtgtacaagctggagcaggtgtctgagaagggcaaggcttacaccaactacttcggacggtgcaatgtggccgagcacgaaaagctgatcctgctggcccagctgaagcccgagaaggatagcgacgaagccgtgacatatagcctgggaaagtttgggcagagggccctggatttctacagcattcatgtgaccaaggagtccacccaccccgtgaagcccctggcccagatcgccggaaacagatacgcctccggacctgtgggaaaggccctgagcgacgcatgtatgggcacaatcgcctccttcctgtctaagtaccaggacatcatcatcgaacaccagaaggtggtgaagggcaaccagaagagactggagagcctgcgggagctggccggcaaggaaaacctggaataccctagcgtgaccctgccacctcagcctcacaccaaggagggcgttgatgcctacaacgaagtgatcgcccgggtgcgaatgtgggtgaacctgaacctgtggcagaagctgaagctaagcagagatgatgccaagcctctgctgagactgaagggattcccttcctttcctctggtcgagagacaggccaacgaagtggactggtgggacatggtgtgtaacgtgaagaagctgatcaacgagaaaaaggaggatggcaaggtgttttggcagaatctggctggctacaagagacaggaagccctgagaccatacctgagcagcgaggaagatcggaagaagggaaagaaattcgctcggtaccagctgggcgacctgctgctgcacctggaaaagaagcacggcgaggactggggaaaggtgtacgacgaggcctgggagcggattgacaagaaagtggaaggcctgagcaagcacatcaagctggaagaggaacggagaagcgaggacgcccagagcaaggccgccctgaccgactggctgcgggctaaggccagcttcgtgatcgagggcctgaaggaggccgacaaggacgagttctgcagatgcgagctgaagctgcagaagtggtacggggacctgcggggaaagcccttcgccatcgaagccgagaacagcatcctggacatcagcggcttcagcaagcagtacaactgtgccttcatctggcagaaggacggcgtgaagaagctgaacctgtacctgatcatcaactacttcaagggcggcaagctgcggttcaagaagatcaaacctgaagccttcgaagccaacagattctacaccgtgatcaacaaaaagagcggcgagatcgtgcccatggaggtgaacttcaacttcgacgaccccaacctgatcatcctgcctctggcctttggcaagagacagggcagagaattcatctggaacgacctgctgtccctggaaaccggcagcctgaagctggccaacggaagagtgatcgagaagacactgtacaacagaagaacccggcaggatgagcctgccctgttcgtggccctgaccttcgagcggcgggaggtcctggactcctccaatatcaaaccaatgaacctgatcggcgtggcaagaggcgaaaacatccccgccgtgatcgccctgaccgaccccgagggctgcccactgagccggtttaaggatagcctgggaaacccaacccacatcctgagaatcggcgagagctataaggagaagcagcggaccatccaggccaagaaggaggtggagcagcggagagccggcggctacagccggaagtacgccagcaaagccaagaatctggcagacgatatggtgagaaacaccgctagagatctgctgtactacgccgtgacccaggatgccatgctgatcttcgccaacctgagccggggcttcggccggcagggcaagcggaccttcatggccgagagacagtacacacggatggaggactggctgaccgccaagctggcctacgagggcctgagcaagacctacctgtccaagacactggcccagtacacctccaagacatgcagcaactgtgggtttaccatcaccagcgccgactacgacagggtgctggagaagctgaagaagacagcaacaggctggatgaccacaattaacggcaaggagctgaaggtggagggccagattacctactacaacagatacaagagacagaacgtagtcaaggacctgtccgtcgagctggatagactgagcgaagaatctgtgaacaacgacatctcctcctggacaaagggcagaagcggagaagctctgagcctcctgaagaaaagattctcccatagacccgtgcaggagaagttcgtgtgcctgaactgcggcttcgagacacacgcagccgagcaagccgccctgaacatcgccagatcctggctgttcctgcggagccaggagtacaagaaataccagacaaacaagacaaccggcaacaccgataagagagccttcgtcgagacctggcagtccttttaccggaagaagcttaaggaggtgtggaaacctgccgtgcggtctggcggatctggcggaggctccaccagccccaagaaaaagagaaaagtctaagctgccttctgcggggcttgccttctggccatgcccttcttctctcccttgcacctgtacctcttggtctttgaataaagcctgagtaggaaggctagcaaaaaaaaaaaaaaaaaaaaaaaaaaaaaaaaaaaaaaaaaaaaaaaaaaaaaaaaaaaaaaaaaaaaaaaaaaaaaaaagcccagccggctccccaacctctaccgaggagggcacctctgagtccgccacccccgagagcggccctggcacctccaccgagcccagcgagggcagcgcacccggcagccctgccggcagccccacctccacagaggagggaaccagcaccgagcccagcgaaggcagcgccccaggcaccagcaccgagcctagtgagcaggagattaaacggatcaacaagatcagaagaagacttgtgaaagacagcaacaccaagaaggccggcaagacaggccccatgaaaaccctgctggttagagtgatgacacccgatctgagagagcggctggaaaacctgagaaagaagcctgaaaatatcccccagcccatcagcaatacatctagagccaacctgaataagctgctgaccgattacaccgaaatgaagaaggcgatcctgcatgtgtactgggaagagttccagaaggaccctgtgggcctgatgagccgggtggcccagcctgccagcaagaagatcgatcagaacaagctgaaacctgagatggacgagaagggcaacctgaccaccgccggctttgcctgctctcagtgtggccagcccctgttcgtgtacaagctggagcaggtgtctgagaagggcaaggcttacaccaactacttcggacggtgcaatgtggccgagcacgaaaagctgatcctgctggcccagctgaagcccgagaaggatagcgacgaagccgtgacatatagcctgggaaagtttgggcagagggccctggatttctacagcattcatgtgaccaaggagtccacccaccccgtgaagcccctggcccagatcgccggaaacagatacgcctccggacctgtgggaaaggccctgagcgacgcatgtatgggcacaatcgcctccttcctgtctaagtaccaggacatcatcatcgaacaccagaaggtggtgaagggcaaccagaagagactggagagcctgcgggagctggccggcaaggaaaacctggaataccctagcgtgaccctgccacctcagcctcacaccaaggagggcgttgatgcctacaacgaagtgatcgcccgggtgcgaatgtgggtgaacctgaacctgtggcagaagctgaagctaagcagagatgatgccaagcctctgctgagactgaagggattcccttcctttcctctggtcgagagacaggccaacgaagtggactggtgggacatggtgtgtaacgtgaagaagctgatcaacgagaaaaaggaggatggcaaggtgttttggcagaatctggctggctacaagagacaggaagccctgagaccatacctgagcagcgaggaagatcggaagaagggaaagaaattcgctcggtaccagctgggcgacctgctgctgcacctggaaaagaagcacggcgaggactggggaaaggtgtacgacgaggcctgggagcggattgacaagaaagtggaaggcctgagcaagcacatcaagctggaagaggaacggagaagcgaggacgcccagagcaaggccgccctgaccgactggctgcgggctaaggccagcttcgtgatcgagggcctgaaggaggccgacaaggacgagttctgcagatgcgagctgaagctgcagaagtggtacggggacctgcggggaaagcccttcgccatcgaagccgagaacagcatcctggacatcagcggcttcagcaagcagtacaactgtgccttcatctggcagaaggacggcgtgaagaagctgaacctgtacctgatcatcaactacttcaagggcggcaagctgcggttcaagaagatcaaacctgaagccttcgaagccaacagattctacaccgtgatcaacaaaaagagcggcgagatcgtgcccatggaggtgaacttcaacttcgacgaccccaacctgatcatcctgcctctggcctttggcaagagacagggcagagaattcatctggaacgacctgctgtccctggaaaccggcagcctgaagctggccaacggaagagtgatcgagaagacactgtacaacagaagaacccggcaggatgagcctgccctgttcgtggccctgaccttcgagcggcgggaggtcctggactcctccaatatcaaaccaatgaacctgatcggcgtggcaagaggcgaaaacatccccgccgtgatcgccctgaccgaccccgagggctgcccactgagccggtttaaggatagcctgggaaacccaacccacatcctgagaatcggcgagagctataaggagaagcagcggaccatccaggccaagaaggaggtggagcagcggagagccggcggctacagccggaagtacgccagcaaagccaagaatctggcagacgatatggtgagaaacaccgctagagatctgctgtactacgccgtgacccaggatgccatgctgatcttcgccaacctgagccggggcttcggccggcagggcaagcggaccttcatggccgagagacagtacacacggatggaggactggctgaccgccaagctggcctacgagggcctgagcaagacctacctgtccaagacactggcccagtacacctccaagacatgcagcaactgtgggtttaccatcaccagcgccgactacgacagggtgctggagaagctgaagaagacagcaacaggctggatgaccacaattaacggcaaggagctgaaggtggagggccagattacctactacaacagatacaagagacagaacgtagtcaaggacctgtccgtcgagctggatagactgagcgaagaatctgtgaacaacgacatctcctcctggacaaagggcagaagcggagaagctctgagcctcctgaagaaaagattctcccatagacccgtgcaggagaagttcgtgtgcctgaactgcggcttcgagacacacgcagccgagcaagccgccctgaacatcgccagatcctggctgttcctgcggagccaggagtacaagaaataccagacaaacaagacaaccggcaacaccgataagagagccttcgtcgagacctggcagtccttttaccggaagaagcttaaggaggtgtggaaacctgccgtgcggtctggcggatctggcggaggctccaccagccccaagaaaaagagaaaagtctaagctgccttctgcggggcttgccttctggccatgcccttcttctctcccttgcacctgtacctcttggtctttgaataaagcctgagtaggaaggctagcaaaaaaaaaaaaaaaaaaaaaaaaaaaaaaaaaaaaaaaaaaaaaaaaaaaaaaaaaaaaaaaaaaaaaaaaaaaaaaaa

SEQ ID NO: 8914 - RNA, 8787 nt, synthetic construct
  source 1..8787: mol_type = other RNA
aggaaataagagagaaaagaagagtaagaagaaatataagagccaccatggcccctaagaagaagcgtaaagtgagccggatgaaccacgaccaggagttcgacccccctaaggtgtaccctcccgtccccgccgagaagagaaagcccatccgggtcctgagcctgttcgatggcatcgccaccggtctgctggtgctgaaggacctgggcatccaggtggataggtacattgcctccgaggtgtgcgaggactccatcaccgtgggaatggtgcgtcatcagggcaagatcatgtacgtgggcgacgtgcggagcgtgacacagaagcatatccaggagtggggccctttcgacctggtgatcggcggcagcccttgcaatgacctgagcatcgtgaacccagcccggaagggcctgtacgagggaaccggcagactgttcttcgagttttacagactgctgcacgacgcccggcctaaggaaggcgacgaccggcccttcttttggctgttcgagaatgtggtggccatgggagtcagcgacaagcgggatattagccggttcctggagagcaaccccgtgatgatcgatgccaaggaagtgagcgccgcccaccgggccagatacttctggggcaatctgcctggcatgaacagacccctggccagcaccgtgaacgacaagctggagctgcaggagtgcctggagcacggccggatcgccaagttcagcaaggtgagaaccatcaccacccgaagcaacagcatcaaacaaggcaaggaccagcactttcctgtgttcatgaacgagaaggaggacatcctgtggtgtaccgagatggagagagtgttcgggttcccagtccactacacagatgtcagcaacatgtctagactggccagacagagactgctgggaagaagctggtccgtccctgtgatcagacacctgttcgcccctctgaaggagtacttcgcctgcgtgagcagcggcaacagcaacgccaacagccggggccccagcttctctagcggcctggtgccactgtccctgagagggagccacatgggccccatggagatctacaaaaccgtgagcgcctggaagcggcagcctgtgcgcgtgctgagcctgtttcggaatatcgataaagtcctgaaaagcctgggattcctggagagcggctctggctccggcggtggcaccctgaagtacgtggaggatgtgacaaacgtggtcagacgggatgtggagaagtggggccccttcgatctggtgtacggcagcacccaacccctgggcagctcttgtgaccggtgccctggctggtacatgtttcagttccaccggatcctgcagtacgccctgccgagacaggagtcccagcggccattcttttggattttcatggacaacttgctgctgaccgaggatgaccaggaaactaccactcggttcctgcagaccgaagccgtgaccctgcaggacgtgagaggccgggactaccagaacgccatgcgggtgtggtccaacatccctggactgaaaagcaagcacgcacctctgacccctaaagaagaggagtacctgcaggcccaggtgcggagcagaagcaagctggacgcccctaaggtggatctgctggtgaagaattgcctcctgcccctgagagagtacttcaagtatttcagccagaatagtctgcccctgggaggcagcggcggcggcatggccttcgaggacgtggccgtgtacttcagccaggaggagtggggcctgctggacaccgcccagagggccctgtacaggagggtgatgctggacaacttcgccctggtggccagcctgggcctgagcaccaccaggcccagggtggtgatccagctggagaggggcgaggagccctgggtgcccagcggcaccgacatgaccatgagcaggaacgcccacaggaggaggaaccccggcagcggcggcccaagcagcggcgcccctcctcccagcggcggcaggcggcccaagcagcggcgcccctcctcccagcggcggcagcccagccggctccccaacctctaccgaggagggcacctctgagtccgccacccccgagagcggccctggcacctccaccgagcccagcgagggcagcgcacccggcagccctgccggcagccccacctccacagaggagggaaccagcaccgagcccagcgaaggcagcgccccaggcaccagcaccgagcctagtgagcaggagattaaacggatcaacaagatcagaagaagacttgtgaaagacagcaacaccaagaaggccggcaagacaggccccatgaaaaccctgctggttagagtgatgacacccgatctgagagagcggctggaaaacctgagaaagaagcctgaaaatatcccccagcccatcagcaatacatctagagccaacctgaataagctgctgaccgattacaccgaaatgaagaaggcgatcctgcatgtgtactgggaagagttccagaaggaccctgtgggcctgatgagccgggtggcccagcctgccagcaagaagatcgatcagaacaagctgaaacctgagatggacgagaagggcaacctgaccaccgccggctttgcctgctctcagtgtggccagcccctgttcgtgtacaagctggagcaggtgtctgagaagggcaaggcttacaccaactacttcggacggtgcaatgtggccgagcacgaaaagctgatcctgctggcccagctgaagcccgagaaggatagcgacgaagccgtgacatatagcctgggaaagtttgggcagagggccctggatttctacagcattcatgtgaccaaggagtccacccaccccgtgaagcccctggcccagatcgccggaaacagatacgcctccggacctgtgggaaaggccctgagcgacgcatgtatgggcacaatcgcctccttcctgtctaagtaccaggacatcatcatcgaacaccagaaggtggtgaagggcaaccagaagagactggagagcctgcgggagctggccggcaaggaaaacctggaataccctagcgtgaccctgccacctcagcctcacaccaaggagggcgttgatgcctacaacgaagtgatcgcccgggtgcgaatgtgggtgaacctgaacctgtggcagaagctgaagctaagcagagatgatgccaagcctctgctgagactgaagggattcccttcctttcctctggtcgagagacaggccaacgaagtggactggtgggacatggtgtgtaacgtgaagaagctgatcaacgagaaaaaggaggatggcaaggtgttttggcagaatctggctggctacaagagacaggaagccctgagaccatacctgagcagcgaggaagatcggaagaagggaaagaaattcgctcggtaccagctgggcgacctgctgctgcacctggaaaagaagcacggcgaggactggggaaaggtgtacgacgaggcctgggagcggattgacaagaaagtggaaggcctgagcaagcacatcaagctggaagaggaacggagaagcgaggacgcccagagcaaggccgccctgaccgactggctgcgggctaaggccagcttcgtgatcgagggcctgaaggaggccgacaaggacgagttctgcagatgcgagctgaagctgcagaagtggtacggggacctgcggggaaagcccttcgccatcgaagccgagaacagcatcctggacatcagcggcttcagcaagcagtacaactgtgccttcatctggcagaaggacggcgtgaagaagctgaacctgtacctgatcatcaactacttcaagggcggcaagctgcggttcaagaagatcaaacctgaagccttcgaagccaacagattctacaccgtgatcaacaaaaagagcggcgagatcgtgcccatggaggtgaacttcaacttcgacgaccccaacctgatcatcctgcctctggcctttggcaagagacagggcagagaattcatctggaacgacctgctgtccctggaaaccggcagcctgaagctggccaacggaagagtgatcgagaagacactgtacaacagaagaacccggcaggatgagcctgccctgttcgtggccctgaccttcgagcggcgggaggtcctggactcctccaatatcaaaccaatgaacctgatcggcgtggcaagaggcgaaaacatccccgccgtgatcgccctgaccgaccccgagggctgcccactgagccggtttaaggatagcctgggaaacccaacccacatcctgagaatcggcgagagctataaggagaagcagcggaccatccaggccaagaaggaggtggagcagcggagagccggcggctacagccggaagtacgccagcaaagccaagaatctggcagacgatatggtgagaaacaccgctagagatctgctgtactacgccgtgacccaggatgccatgctgatcttcgccaacctgagccggggcttcggccggcagggcaagcggaccttcatggccgagagacagtacacacggatggaggactggctgaccgccaagctggcctacgagggcctgagcaagacctacctgtccaagacactggcccagtacacctccaagacatgcagcaactgtgggtttaccatcaccagcgccgactacgacagggtgctggagaagctgaagaagacagcaacaggctggatgaccacaattaacggcaaggagctgaaggtggagggccagattacctactacaacagatacaagagacagaacgtagtcaaggacctgtccgtcgagctggatagactgagcgaagaatctgtgaacaacgacatctcctcctggacaaagggcagaagcggagaagctctgagcctcctgaagaaaagattctcccatagacccgtgcaggagaagttcgtgtgcctgaactgcggcttcgagacacacgcagccgagcaagccgccctgaacatcgccagatcctggctgttcctgcggagccaggagtacaagaaataccagacaaacaagacaaccggcaacaccgataagagagccttcgtcgagacctggcagtccttttaccggaagaagcttaaggaggtgtggaaacctgccgtgcggtctggcggatctggcggaggctccaccagccccaagaaaaagagaaaagtctaagctgccttctgcggggcttgccttctggccatgcccttcttctctcccttgcacctgtacctcttggtctttgaataaagcctgagtaggaaggctagcaaaaaaaaaaaaaaaaaaaaaaaaaaaaaaaaaaaaaaaaaaaaaaaaaaaaaaaaaaaaaaaaaaaaaaaaaaaaaaaagcccagccggctccccaacctctaccgaggagggcacctctgagtccgccacccccgagagcggccctggcacctccaccgagcccagcgagggcagcgcacccggcagccctgccggcagccccacctccacagaggagggaaccagcaccgagcccagcgaaggcagcgccccaggcaccagcaccgagcctagtgagcaggagattaaacggatcaacaagatcagaagaagacttgtgaaagacagcaacaccaagaaggccggcaagacaggccccatgaaaaccctgctggttagagtgatgacacccgatctgagagagcggctggaaaacctgagaaagaagcctgaaaatatcccccagcccatcagcaatacatctagagccaacctgaataagctgctgaccgattacaccgaaatgaagaaggcgatcctgcatgtgtactgggaagagttccagaaggaccctgtgggcctgatgagccgggtggcccagcctgccagcaagaagatcgatcagaacaagctgaaacctgagatggacgagaagggcaacctgaccaccgccggctttgcctgctctcagtgtggccagcccctgttcgtgtacaagctggagcaggtgtctgagaagggcaaggcttacaccaactacttcggacggtgcaatgtggccgagcacgaaaagctgatcctgctggcccagctgaagcccgagaaggatagcgacgaagccgtgacatatagcctgggaaagtttgggcagagggccctggatttctacagcattcatgtgaccaaggagtccacccaccccgtgaagcccctggcccagatcgccggaaacagatacgcctccggacctgtgggaaaggccctgagcgacgcatgtatgggcacaatcgcctccttcctgtctaagtaccaggacatcatcatcgaacaccagaaggtggtgaagggcaaccagaagagactggagagcctgcgggagctggccggcaaggaaaacctggaataccctagcgtgaccctgccacctcagcctcacaccaaggagggcgttgatgcctacaacgaagtgatcgcccgggtgcgaatgtgggtgaacctgaacctgtggcagaagctgaagctaagcagagatgatgccaagcctctgctgagactgaagggattcccttcctttcctctggtcgagagacaggccaacgaagtggactggtgggacatggtgtgtaacgtgaagaagctgatcaacgagaaaaaggaggatggcaaggtgttttggcagaatctggctggctacaagagacaggaagccctgagaccatacctgagcagcgaggaagatcggaagaagggaaagaaattcgctcggtaccagctgggcgacctgctgctgcacctggaaaagaagcacggcgaggactggggaaaggtgtacgacgaggcctgggagcggattgacaagaaagtggaaggcctgagcaagcacatcaagctggaagaggaacggagaagcgaggacgcccagagcaaggccgccctgaccgactggctgcgggctaaggccagcttcgtgatcgagggcctgaaggaggccgacaaggacgagttctgcagatgcgagctgaagctgcagaagtggtacggggacctgcggggaaagcccttcgccatcgaagccgagaacagcatcctggacatcagcggcttcagcaagcagtacaactgtgccttcatctggcagaaggacggcgtgaagaagctgaacctgtacctgatcatcaactacttcaagggcggcaagctgcggttcaagaagatcaaacctgaagccttcgaagccaacagattctacaccgtgatcaacaaaaagagcggcgagatcgtgcccatggaggtgaacttcaacttcgacgaccccaacctgatcatcctgcctctggcctttggcaagagacagggcagagaattcatctggaacgacctgctgtccctggaaaccggcagcctgaagctggccaacggaagagtgatcgagaagacactgtacaacagaagaacccggcaggatgagcctgccctgttcgtggccctgaccttcgagcggcgggaggtcctggactcctccaatatcaaaccaatgaacctgatcggcgtggcaagaggcgaaaacatccccgccgtgatcgccctgaccgaccccgagggctgcccactgagccggtttaaggatagcctgggaaacccaacccacatcctgagaatcggcgagagctataaggagaagcagcggaccatccaggccaagaaggaggtggagcagcggagagccggcggctacagccggaagtacgccagcaaagccaagaatctggcagacgatatggtgagaaacaccgctagagatctgctgtactacgccgtgacccaggatgccatgctgatcttcgccaacctgagccggggcttcggccggcagggcaagcggaccttcatggccgagagacagtacacacggatggaggactggctgaccgccaagctggcctacgagggcctgagcaagacctacctgtccaagacactggcccagtacacctccaagacatgcagcaactgtgggtttaccatcaccagcgccgactacgacagggtgctggagaagctgaagaagacagcaacaggctggatgaccacaattaacggcaaggagctgaaggtggagggccagattacctactacaacagatacaagagacagaacgtagtcaaggacctgtccgtcgagctggatagactgagcgaagaatctgtgaacaacgacatctcctcctggacaaagggcagaagcggagaagctctgagcctcctgaagaaaagattctcccatagacccgtgcaggagaagttcgtgtgcctgaactgcggcttcgagacacacgcagccgagcaagccgccctgaacatcgccagatcctggctgttcctgcggagccaggagtacaagaaataccagacaaacaagacaaccggcaacaccgataagagagccttcgtcgagacctggcagtccttttaccggaagaagcttaaggaggtgtggaaacctgccgtgcggtctggcggatctggcggaggctccaccagccccaagaaaaagagaaaagtctaagctgccttctgcggggcttgccttctggccatgcccttcttctctcccttgcacctgtacctcttggtctttgaataaagcctgagtaggaaggctagcaaaaaaaaaaaaaaaaaaaaaaaaaaaaaaaaaaaaaaaaaaaaaaaaaaaaaaaaaaaaaaaaaaaaaaaaaaaaaaaa

SEQ ID NO: 8915 - RNA, 8787 nt, synthetic construct
  source 1..8787: mol_type = other RNA
aggaaataagagagaaaagaagagtaagaagaaatataagagccaccatggcccctaagaagaagcgtaaagtgagccggatgaaccacgaccaggagttcgacccccctaaggtgtaccctcccgtccccgccgagaagagaaagcccatccgggtcctgagcctgttcgatggcatcgccaccggtctgctggtgctgaaggacctgggcatccaggtggataggtacattgcctccgaggtgtgcgaggactccatcaccgtgggaatggtgcgtcatcagggcaagatcatgtacgtgggcgacgtgcggagcgtgacacagaagcatatccaggagtggggccctttcgacctggtgatcggcggcagcccttgcaatgacctgagcatcgtgaacccagcccggaagggcctgtacgagggaaccggcagactgttcttcgagttttacagactgctgcacgacgcccggcctaaggaaggcgacgaccggcccttcttttggctgttcgagaatgtggtggccatgggagtcagcgacaagcgggatattagccggttcctggagagcaaccccgtgatgatcgatgccaaggaagtgagcgccgcccaccgggccagatacttctggggcaatctgcctggcatgaacagacccctggccagcaccgtgaacgacaagctggagctgcaggagtgcctggagcacggccggatcgccaagttcagcaaggtgagaaccatcaccacccgaagcaacagcatcaaacaaggcaaggaccagcactttcctgtgttcatgaacgagaaggaggacatcctgtggtgtaccgagatggagagagtgttcgggttcccagtccactacacagatgtcagcaacatgtctagactggccagacagagactgctgggaagaagctggtccgtccctgtgatcagacacctgttcgcccctctgaaggagtacttcgcctgcgtgagcagcggcaacagcaacgccaacagccggggccccagcttctctagcggcctggtgccactgtccctgagagggagccacatgggccccatggagatctacaaaaccgtgagcgcctggaagcggcagcctgtgcgcgtgctgagcctgtttcggaatatcgataaagtcctgaaaagcctgggattcctggagagcggctctggctccggcggtggcaccctgaagtacgtggaggatgtgacaaacgtggtcagacgggatgtggagaagtggggccccttcgatctggtgtacggcagcacccaacccctgggcagctcttgtgaccggtgccctggctggtacatgtttcagttccaccggatcctgcagtacgccctgccgagacaggagtcccagcggccattcttttggattttcatggacaacttgctgctgaccgaggatgaccaggaaactaccactcggttcctgcagaccgaagccgtgaccctgcaggacgtgagaggccgggactaccagaacgccatgcgggtgtggtccaacatccctggactgaaaagcaagcacgcacctctgacccctaaagaagaggagtacctgcaggcccaggtgcggagcagaagcaagctggacgcccctaaggtggatctgctggtgaagaattgcctcctgcccctgagagagtacttcaagtatttcagccagaatagtctgcccctgggaggcagcggcggcggcaagcccggcgccgtgagcttcgccgacgtggccgtgtacttcagccccgaggagtggggctgcctgaggcccgcccagagggccctgtacagggacgtgatgagggagacctacggccacctgggcgccctgggcttccccggccccaagcccgccctgatcagctggatggagcaggagagcgaggcctggagcagcgccgcccaggaccccgagaagggcgagaacctgggcggcgccaggggcggcccaagcagcggcgcccctcctcccagcggcggcaggcggcccaagcagcggcgcccctcctcccagcggcggcagcccagccggctccccaacctctaccgaggagggcacctctgagtccgccacccccgagagcggccctggcacctccaccgagcccagcgagggcagcgcacccggcagccctgccggcagccccacctccacagaggagggaaccagcaccgagcccagcgaaggcagcgccccaggcaccagcaccgagcctagtgagcaggagattaaacggatcaacaagatcagaagaagacttgtgaaagacagcaacaccaagaaggccggcaagacaggccccatgaaaaccctgctggttagagtgatgacacccgatctgagagagcggctggaaaacctgagaaagaagcctgaaaatatcccccagcccatcagcaatacatctagagccaacctgaataagctgctgaccgattacaccgaaatgaagaaggcgatcctgcatgtgtactgggaagagttccagaaggaccctgtgggcctgatgagccgggtggcccagcctgccagcaagaagatcgatcagaacaagctgaaacctgagatggacgagaagggcaacctgaccaccgccggctttgcctgctctcagtgtggccagcccctgttcgtgtacaagctggagcaggtgtctgagaagggcaaggcttacaccaactacttcggacggtgcaatgtggccgagcacgaaaagctgatcctgctggcccagctgaagcccgagaaggatagcgacgaagccgtgacatatagcctgggaaagtttgggcagagggccctggatttctacagcattcatgtgaccaaggagtccacccaccccgtgaagcccctggcccagatcgccggaaacagatacgcctccggacctgtgggaaaggccctgagcgacgcatgtatgggcacaatcgcctccttcctgtctaagtaccaggacatcatcatcgaacaccagaaggtggtgaagggcaaccagaagagactggagagcctgcgggagctggccggcaaggaaaacctggaataccctagcgtgaccctgccacctcagcctcacaccaaggagggcgttgatgcctacaacgaagtgatcgcccgggtgcgaatgtgggtgaacctgaacctgtggcagaagctgaagctaagcagagatgatgccaagcctctgctgagactgaagggattcccttcctttcctctggtcgagagacaggccaacgaagtggactggtgggacatggtgtgtaacgtgaagaagctgatcaacgagaaaaaggaggatggcaaggtgttttggcagaatctggctggctacaagagacaggaagccctgagaccatacctgagcagcgaggaagatcggaagaagggaaagaaattcgctcggtaccagctgggcgacctgctgctgcacctggaaaagaagcacggcgaggactggggaaaggtgtacgacgaggcctgggagcggattgacaagaaagtggaaggcctgagcaagcacatcaagctggaagaggaacggagaagcgaggacgcccagagcaaggccgccctgaccgactggctgcgggctaaggccagcttcgtgatcgagggcctgaaggaggccgacaaggacgagttctgcagatgcgagctgaagctgcagaagtggtacggggacctgcggggaaagcccttcgccatcgaagccgagaacagcatcctggacatcagcggcttcagcaagcagtacaactgtgccttcatctggcagaaggacggcgtgaagaagctgaacctgtacctgatcatcaactacttcaagggcggcaagctgcggttcaagaagatcaaacctgaagccttcgaagccaacagattctacaccgtgatcaacaaaaagagcggcgagatcgtgcccatggaggtgaacttcaacttcgacgaccccaacctgatcatcctgcctctggcctttggcaagagacagggcagagaattcatctggaacgacctgctgtccctggaaaccggcagcctgaagctggccaacggaagagtgatcgagaagacactgtacaacagaagaacccggcaggatgagcctgccctgttcgtggccctgaccttcgagcggcgggaggtcctggactcctccaatatcaaaccaatgaacctgatcggcgtggcaagaggcgaaaacatccccgccgtgatcgccctgaccgaccccgagggctgcccactgagccggtttaaggatagcctgggaaacccaacccacatcctgagaatcggcgagagctataaggagaagcagcggaccatccaggccaagaaggaggtggagcagcggagagccggcggctacagccggaagtacgccagcaaagccaagaatctggcagacgatatggtgagaaacaccgctagagatctgctgtactacgccgtgacccaggatgccatgctgatcttcgccaacctgagccggggcttcggccggcagggcaagcggaccttcatggccgagagacagtacacacggatggaggactggctgaccgccaagctggcctacgagggcctgagcaagacctacctgtccaagacactggcccagtacacctccaagacatgcagcaactgtgggtttaccatcaccagcgccgactacgacagggtgctggagaagctgaagaagacagcaacaggctggatgaccacaattaacggcaaggagctgaaggtggagggccagattacctactacaacagatacaagagacagaacgtagtcaaggacctgtccgtcgagctggatagactgagcgaagaatctgtgaacaacgacatctcctcctggacaaagggcagaagcggagaagctctgagcctcctgaagaaaagattctcccatagacccgtgcaggagaagttcgtgtgcctgaactgcggcttcgagacacacgcagccgagcaagccgccctgaacatcgccagatcctggctgttcctgcggagccaggagtacaagaaataccagacaaacaagacaaccggcaacaccgataagagagccttcgtcgagacctggcagtccttttaccggaagaagcttaaggaggtgtggaaacctgccgtgcggtctggcggatctggcggaggctccaccagccccaagaaaaagagaaaagtctaagctgccttctgcggggcttgccttctggccatgcccttcttctctcccttgcacctgtacctcttggtctttgaataaagcctgagtaggaaggctagcaaaaaaaaaaaaaaaaaaaaaaaaaaaaaaaaaaaaaaaaaaaaaaaaaaaaaaaaaaaaaaaaaaaaaaaaaaaaaaaagcccagccggctccccaacctctaccgaggagggcacctctgagtccgccacccccgagagcggccctggcacctccaccgagcccagcgagggcagcgcacccggcagccctgccggcagccccacctccacagaggagggaaccagcaccgagcccagcgaaggcagcgccccaggcaccagcaccgagcctagtgagcaggagattaaacggatcaacaagatcagaagaagacttgtgaaagacagcaacaccaagaaggccggcaagacaggccccatgaaaaccctgctggttagagtgatgacacccgatctgagagagcggctggaaaacctgagaaagaagcctgaaaatatcccccagcccatcagcaatacatctagagccaacctgaataagctgctgaccgattacaccgaaatgaagaaggcgatcctgcatgtgtactgggaagagttccagaaggaccctgtgggcctgatgagccgggtggcccagcctgccagcaagaagatcgatcagaacaagctgaaacctgagatggacgagaagggcaacctgaccaccgccggctttgcctgctctcagtgtggccagcccctgttcgtgtacaagctggagcaggtgtctgagaagggcaaggcttacaccaactacttcggacggtgcaatgtggccgagcacgaaaagctgatcctgctggcccagctgaagcccgagaaggatagcgacgaagccgtgacatatagcctgggaaagtttgggcagagggccctggatttctacagcattcatgtgaccaaggagtccacccaccccgtgaagcccctggcccagatcgccggaaacagatacgcctccggacctgtgggaaaggccctgagcgacgcatgtatgggcacaatcgcctccttcctgtctaagtaccaggacatcatcatcgaacaccagaaggtggtgaagggcaaccagaagagactggagagcctgcgggagctggccggcaaggaaaacctggaataccctagcgtgaccctgccacctcagcctcacaccaaggagggcgttgatgcctacaacgaagtgatcgcccgggtgcgaatgtgggtgaacctgaacctgtggcagaagctgaagctaagcagagatgatgccaagcctctgctgagactgaagggattcccttcctttcctctggtcgagagacaggccaacgaagtggactggtgggacatggtgtgtaacgtgaagaagctgatcaacgagaaaaaggaggatggcaaggtgttttggcagaatctggctggctacaagagacaggaagccctgagaccatacctgagcagcgaggaagatcggaagaagggaaagaaattcgctcggtaccagctgggcgacctgctgctgcacctggaaaagaagcacggcgaggactggggaaaggtgtacgacgaggcctgggagcggattgacaagaaagtggaaggcctgagcaagcacatcaagctggaagaggaacggagaagcgaggacgcccagagcaaggccgccctgaccgactggctgcgggctaaggccagcttcgtgatcgagggcctgaaggaggccgacaaggacgagttctgcagatgcgagctgaagctgcagaagtggtacggggacctgcggggaaagcccttcgccatcgaagccgagaacagcatcctggacatcagcggcttcagcaagcagtacaactgtgccttcatctggcagaaggacggcgtgaagaagctgaacctgtacctgatcatcaactacttcaagggcggcaagctgcggttcaagaagatcaaacctgaagccttcgaagccaacagattctacaccgtgatcaacaaaaagagcggcgagatcgtgcccatggaggtgaacttcaacttcgacgaccccaacctgatcatcctgcctctggcctttggcaagagacagggcagagaattcatctggaacgacctgctgtccctggaaaccggcagcctgaagctggccaacggaagagtgatcgagaagacactgtacaacagaagaacccggcaggatgagcctgccctgttcgtggccctgaccttcgagcggcgggaggtcctggactcctccaatatcaaaccaatgaacctgatcggcgtggcaagaggcgaaaacatccccgccgtgatcgccctgaccgaccccgagggctgcccactgagccggtttaaggatagcctgggaaacccaacccacatcctgagaatcggcgagagctataaggagaagcagcggaccatccaggccaagaaggaggtggagcagcggagagccggcggctacagccggaagtacgccagcaaagccaagaatctggcagacgatatggtgagaaacaccgctagagatctgctgtactacgccgtgacccaggatgccatgctgatcttcgccaacctgagccggggcttcggccggcagggcaagcggaccttcatggccgagagacagtacacacggatggaggactggctgaccgccaagctggcctacgagggcctgagcaagacctacctgtccaagacactggcccagtacacctccaagacatgcagcaactgtgggtttaccatcaccagcgccgactacgacagggtgctggagaagctgaagaagacagcaacaggctggatgaccacaattaacggcaaggagctgaaggtggagggccagattacctactacaacagatacaagagacagaacgtagtcaaggacctgtccgtcgagctggatagactgagcgaagaatctgtgaacaacgacatctcctcctggacaaagggcagaagcggagaagctctgagcctcctgaagaaaagattctcccatagacccgtgcaggagaagttcgtgtgcctgaactgcggcttcgagacacacgcagccgagcaagccgccctgaacatcgccagatcctggctgttcctgcggagccaggagtacaagaaataccagacaaacaagacaaccggcaacaccgataagagagccttcgtcgagacctggcagtccttttaccggaagaagcttaaggaggtgtggaaacctgccgtgcggtctggcggatctggcggaggctccaccagccccaagaaaaagagaaaagtctaagctgccttctgcggggcttgccttctggccatgcccttcttctctcccttgcacctgtacctcttggtctttgaataaagcctgagtaggaaggctagcaaaaaaaaaaaaaaaaaaaaaaaaaaaaaaaaaaaaaaaaaaaaaaaaaaaaaaaaaaaaaaaaaaaaaaaaaaaaaaaa

SEQ ID NO: 8916 - RNA, 8787 nt, synthetic construct
  source 1..8787: mol_type = other RNA
aggaaataagagagaaaagaagagtaagaagaaatataagagccaccatggcccctaagaagaagcgtaaagtgagccggatgaaccacgaccaggagttcgacccccctaaggtgtaccctcccgtccccgccgagaagagaaagcccatccgggtcctgagcctgttcgatggcatcgccaccggtctgctggtgctgaaggacctgggcatccaggtggataggtacattgcctccgaggtgtgcgaggactccatcaccgtgggaatggtgcgtcatcagggcaagatcatgtacgtgggcgacgtgcggagcgtgacacagaagcatatccaggagtggggccctttcgacctggtgatcggcggcagcccttgcaatgacctgagcatcgtgaacccagcccggaagggcctgtacgagggaaccggcagactgttcttcgagttttacagactgctgcacgacgcccggcctaaggaaggcgacgaccggcccttcttttggctgttcgagaatgtggtggccatgggagtcagcgacaagcgggatattagccggttcctggagagcaaccccgtgatgatcgatgccaaggaagtgagcgccgcccaccgggccagatacttctggggcaatctgcctggcatgaacagacccctggccagcaccgtgaacgacaagctggagctgcaggagtgcctggagcacggccggatcgccaagttcagcaaggtgagaaccatcaccacccgaagcaacagcatcaaacaaggcaaggaccagcactttcctgtgttcatgaacgagaaggaggacatcctgtggtgtaccgagatggagagagtgttcgggttcccagtccactacacagatgtcagcaacatgtctagactggccagacagagactgctgggaagaagctggtccgtccctgtgatcagacacctgttcgcccctctgaaggagtacttcgcctgcgtgagcagcggcaacagcaacgccaacagccggggccccagcttctctagcggcctggtgccactgtccctgagagggagccacatgggccccatggagatctacaaaaccgtgagcgcctggaagcggcagcctgtgcgcgtgctgagcctgtttcggaatatcgataaagtcctgaaaagcctgggattcctggagagcggctctggctccggcggtggcaccctgaagtacgtggaggatgtgacaaacgtggtcagacgggatgtggagaagtggggccccttcgatctggtgtacggcagcacccaacccctgggcagctcttgtgaccggtgccctggctggtacatgtttcagttccaccggatcctgcagtacgccctgccgagacaggagtcccagcggccattcttttggattttcatggacaacttgctgctgaccgaggatgaccaggaaactaccactcggttcctgcagaccgaagccgtgaccctgcaggacgtgagaggccgggactaccagaacgccatgcgggtgtggtccaacatccctggactgaaaagcaagcacgcacctctgacccctaaagaagaggagtacctgcaggcccaggtgcggagcagaagcaagctggacgcccctaaggtggatctgctggtgaagaattgcctcctgcccctgagagagtacttcaagtatttcagccagaatagtctgcccctgggaggcagcggcggcggcaagcccggcgccgtgagcttcgccgacgtggccgtgtacttcagccccgaggagtggggctgcctgaggcccgcccagagggccctgtacagggacgtgatgagggagacctacggccacctgggcgccctgggcttccccggccccaagcccgccctgatcagctggatggagcaggagagcgaggcctggagccccgccgcccaggaccccgagaagggcgagaggctgggcggcgccaggggcggcccaagcagcggcgcccctcctcccagcggcggcaggcggcccaagcagcggcgcccctcctcccagcggcggcagcccagccggctccccaacctctaccgaggagggcacctctgagtccgccacccccgagagcggccctggcacctccaccgagcccagcgagggcagcgcacccggcagccctgccggcagccccacctccacagaggagggaaccagcaccgagcccagcgaaggcagcgccccaggcaccagcaccgagcctagtgagcaggagattaaacggatcaacaagatcagaagaagacttgtgaaagacagcaacaccaagaaggccggcaagacaggccccatgaaaaccctgctggttagagtgatgacacccgatctgagagagcggctggaaaacctgagaaagaagcctgaaaatatcccccagcccatcagcaatacatctagagccaacctgaataagctgctgaccgattacaccgaaatgaagaaggcgatcctgcatgtgtactgggaagagttccagaaggaccctgtgggcctgatgagccgggtggcccagcctgccagcaagaagatcgatcagaacaagctgaaacctgagatggacgagaagggcaacctgaccaccgccggctttgcctgctctcagtgtggccagcccctgttcgtgtacaagctggagcaggtgtctgagaagggcaaggcttacaccaactacttcggacggtgcaatgtggccgagcacgaaaagctgatcctgctggcccagctgaagcccgagaaggatagcgacgaagccgtgacatatagcctgggaaagtttgggcagagggccctggatttctacagcattcatgtgaccaaggagtccacccaccccgtgaagcccctggcccagatcgccggaaacagatacgcctccggacctgtgggaaaggccctgagcgacgcatgtatgggcacaatcgcctccttcctgtctaagtaccaggacatcatcatcgaacaccagaaggtggtgaagggcaaccagaagagactggagagcctgcgggagctggccggcaaggaaaacctggaataccctagcgtgaccctgccacctcagcctcacaccaaggagggcgttgatgcctacaacgaagtgatcgcccgggtgcgaatgtgggtgaacctgaacctgtggcagaagctgaagctaagcagagatgatgccaagcctctgctgagactgaagggattcccttcctttcctctggtcgagagacaggccaacgaagtggactggtgggacatggtgtgtaacgtgaagaagctgatcaacgagaaaaaggaggatggcaaggtgttttggcagaatctggctggctacaagagacaggaagccctgagaccatacctgagcagcgaggaagatcggaagaagggaaagaaattcgctcggtaccagctgggcgacctgctgctgcacctggaaaagaagcacggcgaggactggggaaaggtgtacgacgaggcctgggagcggattgacaagaaagtggaaggcctgagcaagcacatcaagctggaagaggaacggagaagcgaggacgcccagagcaaggccgccctgaccgactggctgcgggctaaggccagcttcgtgatcgagggcctgaaggaggccgacaaggacgagttctgcagatgcgagctgaagctgcagaagtggtacggggacctgcggggaaagcccttcgccatcgaagccgagaacagcatcctggacatcagcggcttcagcaagcagtacaactgtgccttcatctggcagaaggacggcgtgaagaagctgaacctgtacctgatcatcaactacttcaagggcggcaagctgcggttcaagaagatcaaacctgaagccttcgaagccaacagattctacaccgtgatcaacaaaaagagcggcgagatcgtgcccatggaggtgaacttcaacttcgacgaccccaacctgatcatcctgcctctggcctttggcaagagacagggcagagaattcatctggaacgacctgctgtccctggaaaccggcagcctgaagctggccaacggaagagtgatcgagaagacactgtacaacagaagaacccggcaggatgagcctgccctgttcgtggccctgaccttcgagcggcgggaggtcctggactcctccaatatcaaaccaatgaacctgatcggcgtggcaagaggcgaaaacatccccgccgtgatcgccctgaccgaccccgagggctgcccactgagccggtttaaggatagcctgggaaacccaacccacatcctgagaatcggcgagagctataaggagaagcagcggaccatccaggccaagaaggaggtggagcagcggagagccggcggctacagccggaagtacgccagcaaagccaagaatctggcagacgatatggtgagaaacaccgctagagatctgctgtactacgccgtgacccaggatgccatgctgatcttcgccaacctgagccggggcttcggccggcagggcaagcggaccttcatggccgagagacagtacacacggatggaggactggctgaccgccaagctggcctacgagggcctgagcaagacctacctgtccaagacactggcccagtacacctccaagacatgcagcaactgtgggtttaccatcaccagcgccgactacgacagggtgctggagaagctgaagaagacagcaacaggctggatgaccacaattaacggcaaggagctgaaggtggagggccagattacctactacaacagatacaagagacagaacgtagtcaaggacctgtccgtcgagctggatagactgagcgaagaatctgtgaacaacgacatctcctcctggacaaagggcagaagcggagaagctctgagcctcctgaagaaaagattctcccatagacccgtgcaggagaagttcgtgtgcctgaactgcggcttcgagacacacgcagccgagcaagccgccctgaacatcgccagatcctggctgttcctgcggagccaggagtacaagaaataccagacaaacaagacaaccggcaacaccgataagagagccttcgtcgagacctggcagtccttttaccggaagaagcttaaggaggtgtggaaacctgccgtgcggtctggcggatctggcggaggctccaccagccccaagaaaaagagaaaagtctaagctgccttctgcggggcttgccttctggccatgcccttcttctctcccttgcacctgtacctcttggtctttgaataaagcctgagtaggaaggctagcaaaaaaaaaaaaaaaaaaaaaaaaaaaaaaaaaaaaaaaaaaaaaaaaaaaaaaaaaaaaaaaaaaaaaaaaaaaaaaaagcccagccggctccccaacctctaccgaggagggcacctctgagtccgccacccccgagagcggccctggcacctccaccgagcccagcgagggcagcgcacccggcagccctgccggcagccccacctccacagaggagggaaccagcaccgagcccagcgaaggcagcgccccaggcaccagcaccgagcctagtgagcaggagattaaacggatcaacaagatcagaagaagacttgtgaaagacagcaacaccaagaaggccggcaagacaggccccatgaaaaccctgctggttagagtgatgacacccgatctgagagagcggctggaaaacctgagaaagaagcctgaaaatatcccccagcccatcagcaatacatctagagccaacctgaataagctgctgaccgattacaccgaaatgaagaaggcgatcctgcatgtgtactgggaagagttccagaaggaccctgtgggcctgatgagccgggtggcccagcctgccagcaagaagatcgatcagaacaagctgaaacctgagatggacgagaagggcaacctgaccaccgccggctttgcctgctctcagtgtggccagcccctgttcgtgtacaagctggagcaggtgtctgagaagggcaaggcttacaccaactacttcggacggtgcaatgtggccgagcacgaaaagctgatcctgctggcccagctgaagcccgagaaggatagcgacgaagccgtgacatatagcctgggaaagtttgggcagagggccctggatttctacagcattcatgtgaccaaggagtccacccaccccgtgaagcccctggcccagatcgccggaaacagatacgcctccggacctgtgggaaaggccctgagcgacgcatgtatgggcacaatcgcctccttcctgtctaagtaccaggacatcatcatcgaacaccagaaggtggtgaagggcaaccagaagagactggagagcctgcgggagctggccggcaaggaaaacctggaataccctagcgtgaccctgccacctcagcctcacaccaaggagggcgttgatgcctacaacgaagtgatcgcccgggtgcgaatgtgggtgaacctgaacctgtggcagaagctgaagctaagcagagatgatgccaagcctctgctgagactgaagggattcccttcctttcctctggtcgagagacaggccaacgaagtggactggtgggacatggtgtgtaacgtgaagaagctgatcaacgagaaaaaggaggatggcaaggtgttttggcagaatctggctggctacaagagacaggaagccctgagaccatacctgagcagcgaggaagatcggaagaagggaaagaaattcgctcggtaccagctgggcgacctgctgctgcacctggaaaagaagcacggcgaggactggggaaaggtgtacgacgaggcctgggagcggattgacaagaaagtggaaggcctgagcaagcacatcaagctggaagaggaacggagaagcgaggacgcccagagcaaggccgccctgaccgactggctgcgggctaaggccagcttcgtgatcgagggcctgaaggaggccgacaaggacgagttctgcagatgcgagctgaagctgcagaagtggtacggggacctgcggggaaagcccttcgccatcgaagccgagaacagcatcctggacatcagcggcttcagcaagcagtacaactgtgccttcatctggcagaaggacggcgtgaagaagctgaacctgtacctgatcatcaactacttcaagggcggcaagctgcggttcaagaagatcaaacctgaagccttcgaagccaacagattctacaccgtgatcaacaaaaagagcggcgagatcgtgcccatggaggtgaacttcaacttcgacgaccccaacctgatcatcctgcctctggcctttggcaagagacagggcagagaattcatctggaacgacctgctgtccctggaaaccggcagcctgaagctggccaacggaagagtgatcgagaagacactgtacaacagaagaacccggcaggatgagcctgccctgttcgtggccctgaccttcgagcggcgggaggtcctggactcctccaatatcaaaccaatgaacctgatcggcgtggcaagaggcgaaaacatccccgccgtgatcgccctgaccgaccccgagggctgcccactgagccggtttaaggatagcctgggaaacccaacccacatcctgagaatcggcgagagctataaggagaagcagcggaccatccaggccaagaaggaggtggagcagcggagagccggcggctacagccggaagtacgccagcaaagccaagaatctggcagacgatatggtgagaaacaccgctagagatctgctgtactacgccgtgacccaggatgccatgctgatcttcgccaacctgagccggggcttcggccggcagggcaagcggaccttcatggccgagagacagtacacacggatggaggactggctgaccgccaagctggcctacgagggcctgagcaagacctacctgtccaagacactggcccagtacacctccaagacatgcagcaactgtgggtttaccatcaccagcgccgactacgacagggtgctggagaagctgaagaagacagcaacaggctggatgaccacaattaacggcaaggagctgaaggtggagggccagattacctactacaacagatacaagagacagaacgtagtcaaggacctgtccgtcgagctggatagactgagcgaagaatctgtgaacaacgacatctcctcctggacaaagggcagaagcggagaagctctgagcctcctgaagaaaagattctcccatagacccgtgcaggagaagttcgtgtgcctgaactgcggcttcgagacacacgcagccgagcaagccgccctgaacatcgccagatcctggctgttcctgcggagccaggagtacaagaaataccagacaaacaagacaaccggcaacaccgataagagagccttcgtcgagacctggcagtccttttaccggaagaagcttaaggaggtgtggaaacctgccgtgcggtctggcggatctggcggaggctccaccagccccaagaaaaagagaaaagtctaagctgccttctgcggggcttgccttctggccatgcccttcttctctcccttgcacctgtacctcttggtctttgaataaagcctgagtaggaaggctagcaaaaaaaaaaaaaaaaaaaaaaaaaaaaaaaaaaaaaaaaaaaaaaaaaaaaaaaaaaaaaaaaaaaaaaaaaaaaaaaa

SEQ ID NO: 8917 - RNA, 8787 nt, synthetic construct
  source 1..8787: mol_type = other RNA
aggaaataagagagaaaagaagagtaagaagaaatataagagccaccatggcccctaagaagaagcgtaaagtgagccggatgaaccacgaccaggagttcgacccccctaaggtgtaccctcccgtccccgccgagaagagaaagcccatccgggtcctgagcctgttcgatggcatcgccaccggtctgctggtgctgaaggacctgggcatccaggtggataggtacattgcctccgaggtgtgcgaggactccatcaccgtgggaatggtgcgtcatcagggcaagatcatgtacgtgggcgacgtgcggagcgtgacacagaagcatatccaggagtggggccctttcgacctggtgatcggcggcagcccttgcaatgacctgagcatcgtgaacccagcccggaagggcctgtacgagggaaccggcagactgttcttcgagttttacagactgctgcacgacgcccggcctaaggaaggcgacgaccggcccttcttttggctgttcgagaatgtggtggccatgggagtcagcgacaagcgggatattagccggttcctggagagcaaccccgtgatgatcgatgccaaggaagtgagcgccgcccaccgggccagatacttctggggcaatctgcctggcatgaacagacccctggccagcaccgtgaacgacaagctggagctgcaggagtgcctggagcacggccggatcgccaagttcagcaaggtgagaaccatcaccacccgaagcaacagcatcaaacaaggcaaggaccagcactttcctgtgttcatgaacgagaaggaggacatcctgtggtgtaccgagatggagagagtgttcgggttcccagtccactacacagatgtcagcaacatgtctagactggccagacagagactgctgggaagaagctggtccgtccctgtgatcagacacctgttcgcccctctgaaggagtacttcgcctgcgtgagcagcggcaacagcaacgccaacagccggggccccagcttctctagcggcctggtgccactgtccctgagagggagccacatgggccccatggagatctacaaaaccgtgagcgcctggaagcggcagcctgtgcgcgtgctgagcctgtttcggaatatcgataaagtcctgaaaagcctgggattcctggagagcggctctggctccggcggtggcaccctgaagtacgtggaggatgtgacaaacgtggtcagacgggatgtggagaagtggggccccttcgatctggtgtacggcagcacccaacccctgggcagctcttgtgaccggtgccctggctggtacatgtttcagttccaccggatcctgcagtacgccctgccgagacaggagtcccagcggccattcttttggattttcatggacaacttgctgctgaccgaggatgaccaggaaactaccactcggttcctgcagaccgaagccgtgaccctgcaggacgtgagaggccgggactaccagaacgccatgcgggtgtggtccaacatccctggactgaaaagcaagcacgcacctctgacccctaaagaagaggagtacctgcaggcccaggtgcggagcagaagcaagctggacgcccctaaggtggatctgctggtgaagaattgcctcctgcccctgagagagtacttcaagtatttcagccagaatagtctgcccctgggaggcagcggcggcggcatggtgagcttcgaggacgtggccgtgctgctgagccaggaggagtgggactgcctgatccccgcccagaggggcctgtacagggacgtgatgctggagacctacggcaacctggtgagcctgggcctgcaggccagcaagcccgacgtgatcagcaggctggagcagggcgacgagccctggaccacccacaccctgaggatgcagggcagctggagctggaggcacaagagggagggctgcggcggcccaagcagcggcgcccctcctcccagcggcggcaggcggcccaagcagcggcgcccctcctcccagcggcggcagcccagccggctccccaacctctaccgaggagggcacctctgagtccgccacccccgagagcggccctggcacctccaccgagcccagcgagggcagcgcacccggcagccctgccggcagccccacctccacagaggagggaaccagcaccgagcccagcgaaggcagcgccccaggcaccagcaccgagcctagtgagcaggagattaaacggatcaacaagatcagaagaagacttgtgaaagacagcaacaccaagaaggccggcaagacaggccccatgaaaaccctgctggttagagtgatgacacccgatctgagagagcggctggaaaacctgagaaagaagcctgaaaatatcccccagcccatcagcaatacatctagagccaacctgaataagctgctgaccgattacaccgaaatgaagaaggcgatcctgcatgtgtactgggaagagttccagaaggaccctgtgggcctgatgagccgggtggcccagcctgccagcaagaagatcgatcagaacaagctgaaacctgagatggacgagaagggcaacctgaccaccgccggctttgcctgctctcagtgtggccagcccctgttcgtgtacaagctggagcaggtgtctgagaagggcaaggcttacaccaactacttcggacggtgcaatgtggccgagcacgaaaagctgatcctgctggcccagctgaagcccgagaaggatagcgacgaagccgtgacatatagcctgggaaagtttgggcagagggccctggatttctacagcattcatgtgaccaaggagtccacccaccccgtgaagcccctggcccagatcgccggaaacagatacgcctccggacctgtgggaaaggccctgagcgacgcatgtatgggcacaatcgcctccttcctgtctaagtaccaggacatcatcatcgaacaccagaaggtggtgaagggcaaccagaagagactggagagcctgcgggagctggccggcaaggaaaacctggaataccctagcgtgaccctgccacctcagcctcacaccaaggagggcgttgatgcctacaacgaagtgatcgcccgggtgcgaatgtgggtgaacctgaacctgtggcagaagctgaagctaagcagagatgatgccaagcctctgctgagactgaagggattcccttcctttcctctggtcgagagacaggccaacgaagtggactggtgggacatggtgtgtaacgtgaagaagctgatcaacgagaaaaaggaggatggcaaggtgttttggcagaatctggctggctacaagagacaggaagccctgagaccatacctgagcagcgaggaagatcggaagaagggaaagaaattcgctcggtaccagctgggcgacctgctgctgcacctggaaaagaagcacggcgaggactggggaaaggtgtacgacgaggcctgggagcggattgacaagaaagtggaaggcctgagcaagcacatcaagctggaagaggaacggagaagcgaggacgcccagagcaaggccgccctgaccgactggctgcgggctaaggccagcttcgtgatcgagggcctgaaggaggccgacaaggacgagttctgcagatgcgagctgaagctgcagaagtggtacggggacctgcggggaaagcccttcgccatcgaagccgagaacagcatcctggacatcagcggcttcagcaagcagtacaactgtgccttcatctggcagaaggacggcgtgaagaagctgaacctgtacctgatcatcaactacttcaagggcggcaagctgcggttcaagaagatcaaacctgaagccttcgaagccaacagattctacaccgtgatcaacaaaaagagcggcgagatcgtgcccatggaggtgaacttcaacttcgacgaccccaacctgatcatcctgcctctggcctttggcaagagacagggcagagaattcatctggaacgacctgctgtccctggaaaccggcagcctgaagctggccaacggaagagtgatcgagaagacactgtacaacagaagaacccggcaggatgagcctgccctgttcgtggccctgaccttcgagcggcgggaggtcctggactcctccaatatcaaaccaatgaacctgatcggcgtggcaagaggcgaaaacatccccgccgtgatcgccctgaccgaccccgagggctgcccactgagccggtttaaggatagcctgggaaacccaacccacatcctgagaatcggcgagagctataaggagaagcagcggaccatccaggccaagaaggaggtggagcagcggagagccggcggctacagccggaagtacgccagcaaagccaagaatctggcagacgatatggtgagaaacaccgctagagatctgctgtactacgccgtgacccaggatgccatgctgatcttcgccaacctgagccggggcttcggccggcagggcaagcggaccttcatggccgagagacagtacacacggatggaggactggctgaccgccaagctggcctacgagggcctgagcaagacctacctgtccaagacactggcccagtacacctccaagacatgcagcaactgtgggtttaccatcaccagcgccgactacgacagggtgctggagaagctgaagaagacagcaacaggctggatgaccacaattaacggcaaggagctgaaggtggagggccagattacctactacaacagatacaagagacagaacgtagtcaaggacctgtccgtcgagctggatagactgagcgaagaatctgtgaacaacgacatctcctcctggacaaagggcagaagcggagaagctctgagcctcctgaagaaaagattctcccatagacccgtgcaggagaagttcgtgtgcctgaactgcggcttcgagacacacgcagccgagcaagccgccctgaacatcgccagatcctggctgttcctgcggagccaggagtacaagaaataccagacaaacaagacaaccggcaacaccgataagagagccttcgtcgagacctggcagtccttttaccggaagaagcttaaggaggtgtggaaacctgccgtgcggtctggcggatctggcggaggctccaccagccccaagaaaaagagaaaagtctaagctgccttctgcggggcttgccttctggccatgcccttcttctctcccttgcacctgtacctcttggtctttgaataaagcctgagtaggaaggctagcaaaaaaaaaaaaaaaaaaaaaaaaaaaaaaaaaaaaaaaaaaaaaaaaaaaaaaaaaaaaaaaaaaaaaaaaaaaaaaaagcccagccggctccccaacctctaccgaggagggcacctctgagtccgccacccccgagagcggccctggcacctccaccgagcccagcgagggcagcgcacccggcagccctgccggcagccccacctccacagaggagggaaccagcaccgagcccagcgaaggcagcgccccaggcaccagcaccgagcctagtgagcaggagattaaacggatcaacaagatcagaagaagacttgtgaaagacagcaacaccaagaaggccggcaagacaggccccatgaaaaccctgctggttagagtgatgacacccgatctgagagagcggctggaaaacctgagaaagaagcctgaaaatatcccccagcccatcagcaatacatctagagccaacctgaataagctgctgaccgattacaccgaaatgaagaaggcgatcctgcatgtgtactgggaagagttccagaaggaccctgtgggcctgatgagccgggtggcccagcctgccagcaagaagatcgatcagaacaagctgaaacctgagatggacgagaagggcaacctgaccaccgccggctttgcctgctctcagtgtggccagcccctgttcgtgtacaagctggagcaggtgtctgagaagggcaaggcttacaccaactacttcggacggtgcaatgtggccgagcacgaaaagctgatcctgctggcccagctgaagcccgagaaggatagcgacgaagccgtgacatatagcctgggaaagtttgggcagagggccctggatttctacagcattcatgtgaccaaggagtccacccaccccgtgaagcccctggcccagatcgccggaaacagatacgcctccggacctgtgggaaaggccctgagcgacgcatgtatgggcacaatcgcctccttcctgtctaagtaccaggacatcatcatcgaacaccagaaggtggtgaagggcaaccagaagagactggagagcctgcgggagctggccggcaaggaaaacctggaataccctagcgtgaccctgccacctcagcctcacaccaaggagggcgttgatgcctacaacgaagtgatcgcccgggtgcgaatgtgggtgaacctgaacctgtggcagaagctgaagctaagcagagatgatgccaagcctctgctgagactgaagggattcccttcctttcctctggtcgagagacaggccaacgaagtggactggtgggacatggtgtgtaacgtgaagaagctgatcaacgagaaaaaggaggatggcaaggtgttttggcagaatctggctggctacaagagacaggaagccctgagaccatacctgagcagcgaggaagatcggaagaagggaaagaaattcgctcggtaccagctgggcgacctgctgctgcacctggaaaagaagcacggcgaggactggggaaaggtgtacgacgaggcctgggagcggattgacaagaaagtggaaggcctgagcaagcacatcaagctggaagaggaacggagaagcgaggacgcccagagcaaggccgccctgaccgactggctgcgggctaaggccagcttcgtgatcgagggcctgaaggaggccgacaaggacgagttctgcagatgcgagctgaagctgcagaagtggtacggggacctgcggggaaagcccttcgccatcgaagccgagaacagcatcctggacatcagcggcttcagcaagcagtacaactgtgccttcatctggcagaaggacggcgtgaagaagctgaacctgtacctgatcatcaactacttcaagggcggcaagctgcggttcaagaagatcaaacctgaagccttcgaagccaacagattctacaccgtgatcaacaaaaagagcggcgagatcgtgcccatggaggtgaacttcaacttcgacgaccccaacctgatcatcctgcctctggcctttggcaagagacagggcagagaattcatctggaacgacctgctgtccctggaaaccggcagcctgaagctggccaacggaagagtgatcgagaagacactgtacaacagaagaacccggcaggatgagcctgccctgttcgtggccctgaccttcgagcggcgggaggtcctggactcctccaatatcaaaccaatgaacctgatcggcgtggcaagaggcgaaaacatccccgccgtgatcgccctgaccgaccccgagggctgcccactgagccggtttaaggatagcctgggaaacccaacccacatcctgagaatcggcgagagctataaggagaagcagcggaccatccaggccaagaaggaggtggagcagcggagagccggcggctacagccggaagtacgccagcaaagccaagaatctggcagacgatatggtgagaaacaccgctagagatctgctgtactacgccgtgacccaggatgccatgctgatcttcgccaacctgagccggggcttcggccggcagggcaagcggaccttcatggccgagagacagtacacacggatggaggactggctgaccgccaagctggcctacgagggcctgagcaagacctacctgtccaagacactggcccagtacacctccaagacatgcagcaactgtgggtttaccatcaccagcgccgactacgacagggtgctggagaagctgaagaagacagcaacaggctggatgaccacaattaacggcaaggagctgaaggtggagggccagattacctactacaacagatacaagagacagaacgtagtcaaggacctgtccgtcgagctggatagactgagcgaagaatctgtgaacaacgacatctcctcctggacaaagggcagaagcggagaagctctgagcctcctgaagaaaagattctcccatagacccgtgcaggagaagttcgtgtgcctgaactgcggcttcgagacacacgcagccgagcaagccgccctgaacatcgccagatcctggctgttcctgcggagccaggagtacaagaaataccagacaaacaagacaaccggcaacaccgataagagagccttcgtcgagacctggcagtccttttaccggaagaagcttaaggaggtgtggaaacctgccgtgcggtctggcggatctggcggaggctccaccagccccaagaaaaagagaaaagtctaagctgccttctgcggggcttgccttctggccatgcccttcttctctcccttgcacctgtacctcttggtctttgaataaagcctgagtaggaaggctagcaaaaaaaaaaaaaaaaaaaaaaaaaaaaaaaaaaaaaaaaaaaaaaaaaaaaaaaaaaaaaaaaaaaaaaaaaaaaaaaa

SEQ ID NO: 8918 - RNA, 8787 nt, synthetic construct
  source 1..8787: mol_type = other RNA
aggaaataagagagaaaagaagagtaagaagaaatataagagccaccatggcccctaagaagaagcgtaaagtgagccggatgaaccacgaccaggagttcgacccccctaaggtgtaccctcccgtccccgccgagaagagaaagcccatccgggtcctgagcctgttcgatggcatcgccaccggtctgctggtgctgaaggacctgggcatccaggtggataggtacattgcctccgaggtgtgcgaggactccatcaccgtgggaatggtgcgtcatcagggcaagatcatgtacgtgggcgacgtgcggagcgtgacacagaagcatatccaggagtggggccctttcgacctggtgatcggcggcagcccttgcaatgacctgagcatcgtgaacccagcccggaagggcctgtacgagggaaccggcagactgttcttcgagttttacagactgctgcacgacgcccggcctaaggaaggcgacgaccggcccttcttttggctgttcgagaatgtggtggccatgggagtcagcgacaagcgggatattagccggttcctggagagcaaccccgtgatgatcgatgccaaggaagtgagcgccgcccaccgggccagatacttctggggcaatctgcctggcatgaacagacccctggccagcaccgtgaacgacaagctggagctgcaggagtgcctggagcacggccggatcgccaagttcagcaaggtgagaaccatcaccacccgaagcaacagcatcaaacaaggcaaggaccagcactttcctgtgttcatgaacgagaaggaggacatcctgtggtgtaccgagatggagagagtgttcgggttcccagtccactacacagatgtcagcaacatgtctagactggccagacagagactgctgggaagaagctggtccgtccctgtgatcagacacctgttcgcccctctgaaggagtacttcgcctgcgtgagcagcggcaacagcaacgccaacagccggggccccagcttctctagcggcctggtgccactgtccctgagagggagccacatgggccccatggagatctacaaaaccgtgagcgcctggaagcggcagcctgtgcgcgtgctgagcctgtttcggaatatcgataaagtcctgaaaagcctgggattcctggagagcggctctggctccggcggtggcaccctgaagtacgtggaggatgtgacaaacgtggtcagacgggatgtggagaagtggggccccttcgatctggtgtacggcagcacccaacccctgggcagctcttgtgaccggtgccctggctggtacatgtttcagttccaccggatcctgcagtacgccctgccgagacaggagtcccagcggccattcttttggattttcatggacaacttgctgctgaccgaggatgaccaggaaactaccactcggttcctgcagaccgaagccgtgaccctgcaggacgtgagaggccgggactaccagaacgccatgcgggtgtggtccaacatccctggactgaaaagcaagcacgcacctctgacccctaaagaagaggagtacctgcaggcccaggtgcggagcagaagcaagctggacgcccctaaggtggatctgctggtgaagaattgcctcctgcccctgagagagtacttcaagtatttcagccagaatagtctgcccctgggaggcagcggcggcggccaggccgaggtgaccttcgaggacgtggccgtgctgttcagcagggaggagtggggcaggctgggccccgcccagaggggcctgtacagggacgtgatgctggagacctacaggaacctggtgagcctgggcgccggccccgccggccccaagcccggcgtgatcacccagctggagaggggcgacgagccctgggtgctggacgcccagggcgccaagggcaaggagaggctgagggtgagcggcggcccaagcagcggcgcccctcctcccagcggcggcaggcggcccaagcagcggcgcccctcctcccagcggcggcagcccagccggctccccaacctctaccgaggagggcacctctgagtccgccacccccgagagcggccctggcacctccaccgagcccagcgagggcagcgcacccggcagccctgccggcagccccacctccacagaggagggaaccagcaccgagcccagcgaaggcagcgccccaggcaccagcaccgagcctagtgagcaggagattaaacggatcaacaagatcagaagaagacttgtgaaagacagcaacaccaagaaggccggcaagacaggccccatgaaaaccctgctggttagagtgatgacacccgatctgagagagcggctggaaaacctgagaaagaagcctgaaaatatcccccagcccatcagcaatacatctagagccaacctgaataagctgctgaccgattacaccgaaatgaagaaggcgatcctgcatgtgtactgggaagagttccagaaggaccctgtgggcctgatgagccgggtggcccagcctgccagcaagaagatcgatcagaacaagctgaaacctgagatggacgagaagggcaacctgaccaccgccggctttgcctgctctcagtgtggccagcccctgttcgtgtacaagctggagcaggtgtctgagaagggcaaggcttacaccaactacttcggacggtgcaatgtggccgagcacgaaaagctgatcctgctggcccagctgaagcccgagaaggatagcgacgaagccgtgacatatagcctgggaaagtttgggcagagggccctggatttctacagcattcatgtgaccaaggagtccacccaccccgtgaagcccctggcccagatcgccggaaacagatacgcctccggacctgtgggaaaggccctgagcgacgcatgtatgggcacaatcgcctccttcctgtctaagtaccaggacatcatcatcgaacaccagaaggtggtgaagggcaaccagaagagactggagagcctgcgggagctggccggcaaggaaaacctggaataccctagcgtgaccctgccacctcagcctcacaccaaggagggcgttgatgcctacaacgaagtgatcgcccgggtgcgaatgtgggtgaacctgaacctgtggcagaagctgaagctaagcagagatgatgccaagcctctgctgagactgaagggattcccttcctttcctctggtcgagagacaggccaacgaagtggactggtgggacatggtgtgtaacgtgaagaagctgatcaacgagaaaaaggaggatggcaaggtgttttggcagaatctggctggctacaagagacaggaagccctgagaccatacctgagcagcgaggaagatcggaagaagggaaagaaattcgctcggtaccagctgggcgacctgctgctgcacctggaaaagaagcacggcgaggactggggaaaggtgtacgacgaggcctgggagcggattgacaagaaagtggaaggcctgagcaagcacatcaagctggaagaggaacggagaagcgaggacgcccagagcaaggccgccctgaccgactggctgcgggctaaggccagcttcgtgatcgagggcctgaaggaggccgacaaggacgagttctgcagatgcgagctgaagctgcagaagtggtacggggacctgcggggaaagcccttcgccatcgaagccgagaacagcatcctggacatcagcggcttcagcaagcagtacaactgtgccttcatctggcagaaggacggcgtgaagaagctgaacctgtacctgatcatcaactacttcaagggcggcaagctgcggttcaagaagatcaaacctgaagccttcgaagccaacagattctacaccgtgatcaacaaaaagagcggcgagatcgtgcccatggaggtgaacttcaacttcgacgaccccaacctgatcatcctgcctctggcctttggcaagagacagggcagagaattcatctggaacgacctgctgtccctggaaaccggcagcctgaagctggccaacggaagagtgatcgagaagacactgtacaacagaagaacccggcaggatgagcctgccctgttcgtggccctgaccttcgagcggcgggaggtcctggactcctccaatatcaaaccaatgaacctgatcggcgtggcaagaggcgaaaacatccccgccgtgatcgccctgaccgaccccgagggctgcccactgagccggtttaaggatagcctgggaaacccaacccacatcctgagaatcggcgagagctataaggagaagcagcggaccatccaggccaagaaggaggtggagcagcggagagccggcggctacagccggaagtacgccagcaaagccaagaatctggcagacgatatggtgagaaacaccgctagagatctgctgtactacgccgtgacccaggatgccatgctgatcttcgccaacctgagccggggcttcggccggcagggcaagcggaccttcatggccgagagacagtacacacggatggaggactggctgaccgccaagctggcctacgagggcctgagcaagacctacctgtccaagacactggcccagtacacctccaagacatgcagcaactgtgggtttaccatcaccagcgccgactacgacagggtgctggagaagctgaagaagacagcaacaggctggatgaccacaattaacggcaaggagctgaaggtggagggccagattacctactacaacagatacaagagacagaacgtagtcaaggacctgtccgtcgagctggatagactgagcgaagaatctgtgaacaacgacatctcctcctggacaaagggcagaagcggagaagctctgagcctcctgaagaaaagattctcccatagacccgtgcaggagaagttcgtgtgcctgaactgcggcttcgagacacacgcagccgagcaagccgccctgaacatcgccagatcctggctgttcctgcggagccaggagtacaagaaataccagacaaacaagacaaccggcaacaccgataagagagccttcgtcgagacctggcagtccttttaccggaagaagcttaaggaggtgtggaaacctgccgtgcggtctggcggatctggcggaggctccaccagccccaagaaaaagagaaaagtctaagctgccttctgcggggcttgccttctggccatgcccttcttctctcccttgcacctgtacctcttggtctttgaataaagcctgagtaggaaggctagcaaaaaaaaaaaaaaaaaaaaaaaaaaaaaaaaaaaaaaaaaaaaaaaaaaaaaaaaaaaaaaaaaaaaaaaaaaaaaaaagcccagccggctccccaacctctaccgaggagggcacctctgagtccgccacccccgagagcggccctggcacctccaccgagcccagcgagggcagcgcacccggcagccctgccggcagccccacctccacagaggagggaaccagcaccgagcccagcgaaggcagcgccccaggcaccagcaccgagcctagtgagcaggagattaaacggatcaacaagatcagaagaagacttgtgaaagacagcaacaccaagaaggccggcaagacaggccccatgaaaaccctgctggttagagtgatgacacccgatctgagagagcggctggaaaacctgagaaagaagcctgaaaatatcccccagcccatcagcaatacatctagagccaacctgaataagctgctgaccgattacaccgaaatgaagaaggcgatcctgcatgtgtactgggaagagttccagaaggaccctgtgggcctgatgagccgggtggcccagcctgccagcaagaagatcgatcagaacaagctgaaacctgagatggacgagaagggcaacctgaccaccgccggctttgcctgctctcagtgtggccagcccctgttcgtgtacaagctggagcaggtgtctgagaagggcaaggcttacaccaactacttcggacggtgcaatgtggccgagcacgaaaagctgatcctgctggcccagctgaagcccgagaaggatagcgacgaagccgtgacatatagcctgggaaagtttgggcagagggccctggatttctacagcattcatgtgaccaaggagtccacccaccccgtgaagcccctggcccagatcgccggaaacagatacgcctccggacctgtgggaaaggccctgagcgacgcatgtatgggcacaatcgcctccttcctgtctaagtaccaggacatcatcatcgaacaccagaaggtggtgaagggcaaccagaagagactggagagcctgcgggagctggccggcaaggaaaacctggaataccctagcgtgaccctgccacctcagcctcacaccaaggagggcgttgatgcctacaacgaagtgatcgcccgggtgcgaatgtgggtgaacctgaacctgtggcagaagctgaagctaagcagagatgatgccaagcctctgctgagactgaagggattcccttcctttcctctggtcgagagacaggccaacgaagtggactggtgggacatggtgtgtaacgtgaagaagctgatcaacgagaaaaaggaggatggcaaggtgttttggcagaatctggctggctacaagagacaggaagccctgagaccatacctgagcagcgaggaagatcggaagaagggaaagaaattcgctcggtaccagctgggcgacctgctgctgcacctggaaaagaagcacggcgaggactggggaaaggtgtacgacgaggcctgggagcggattgacaagaaagtggaaggcctgagcaagcacatcaagctggaagaggaacggagaagcgaggacgcccagagcaaggccgccctgaccgactggctgcgggctaaggccagcttcgtgatcgagggcctgaaggaggccgacaaggacgagttctgcagatgcgagctgaagctgcagaagtggtacggggacctgcggggaaagcccttcgccatcgaagccgagaacagcatcctggacatcagcggcttcagcaagcagtacaactgtgccttcatctggcagaaggacggcgtgaagaagctgaacctgtacctgatcatcaactacttcaagggcggcaagctgcggttcaagaagatcaaacctgaagccttcgaagccaacagattctacaccgtgatcaacaaaaagagcggcgagatcgtgcccatggaggtgaacttcaacttcgacgaccccaacctgatcatcctgcctctggcctttggcaagagacagggcagagaattcatctggaacgacctgctgtccctggaaaccggcagcctgaagctggccaacggaagagtgatcgagaagacactgtacaacagaagaacccggcaggatgagcctgccctgttcgtggccctgaccttcgagcggcgggaggtcctggactcctccaatatcaaaccaatgaacctgatcggcgtggcaagaggcgaaaacatccccgccgtgatcgccctgaccgaccccgagggctgcccactgagccggtttaaggatagcctgggaaacccaacccacatcctgagaatcggcgagagctataaggagaagcagcggaccatccaggccaagaaggaggtggagcagcggagagccggcggctacagccggaagtacgccagcaaagccaagaatctggcagacgatatggtgagaaacaccgctagagatctgctgtactacgccgtgacccaggatgccatgctgatcttcgccaacctgagccggggcttcggccggcagggcaagcggaccttcatggccgagagacagtacacacggatggaggactggctgaccgccaagctggcctacgagggcctgagcaagacctacctgtccaagacactggcccagtacacctccaagacatgcagcaactgtgggtttaccatcaccagcgccgactacgacagggtgctggagaagctgaagaagacagcaacaggctggatgaccacaattaacggcaaggagctgaaggtggagggccagattacctactacaacagatacaagagacagaacgtagtcaaggacctgtccgtcgagctggatagactgagcgaagaatctgtgaacaacgacatctcctcctggacaaagggcagaagcggagaagctctgagcctcctgaagaaaagattctcccatagacccgtgcaggagaagttcgtgtgcctgaactgcggcttcgagacacacgcagccgagcaagccgccctgaacatcgccagatcctggctgttcctgcggagccaggagtacaagaaataccagacaaacaagacaaccggcaacaccgataagagagccttcgtcgagacctggcagtccttttaccggaagaagcttaaggaggtgtggaaacctgccgtgcggtctggcggatctggcggaggctccaccagccccaagaaaaagagaaaagtctaagctgccttctgcggggcttgccttctggccatgcccttcttctctcccttgcacctgtacctcttggtctttgaataaagcctgagtaggaaggctagcaaaaaaaaaaaaaaaaaaaaaaaaaaaaaaaaaaaaaaaaaaaaaaaaaaaaaaaaaaaaaaaaaaaaaaaaaaaaaaaa

SEQ ID NO: 8919 - RNA, 8787 nt, synthetic construct
  source 1..8787: mol_type = other RNA
aggaaataagagagaaaagaagagtaagaagaaatataagagccaccatggcccctaagaagaagcgtaaagtgagccggatgaaccacgaccaggagttcgacccccctaaggtgtaccctcccgtccccgccgagaagagaaagcccatccgggtcctgagcctgttcgatggcatcgccaccggtctgctggtgctgaaggacctgggcatccaggtggataggtacattgcctccgaggtgtgcgaggactccatcaccgtgggaatggtgcgtcatcagggcaagatcatgtacgtgggcgacgtgcggagcgtgacacagaagcatatccaggagtggggccctttcgacctggtgatcggcggcagcccttgcaatgacctgagcatcgtgaacccagcccggaagggcctgtacgagggaaccggcagactgttcttcgagttttacagactgctgcacgacgcccggcctaaggaaggcgacgaccggcccttcttttggctgttcgagaatgtggtggccatgggagtcagcgacaagcgggatattagccggttcctggagagcaaccccgtgatgatcgatgccaaggaagtgagcgccgcccaccgggccagatacttctggggcaatctgcctggcatgaacagacccctggccagcaccgtgaacgacaagctggagctgcaggagtgcctggagcacggccggatcgccaagttcagcaaggtgagaaccatcaccacccgaagcaacagcatcaaacaaggcaaggaccagcactttcctgtgttcatgaacgagaaggaggacatcctgtggtgtaccgagatggagagagtgttcgggttcccagtccactacacagatgtcagcaacatgtctagactggccagacagagactgctgggaagaagctggtccgtccctgtgatcagacacctgttcgcccctctgaaggagtacttcgcctgcgtgagcagcggcaacagcaacgccaacagccggggccccagcttctctagcggcctggtgccactgtccctgagagggagccacatgggccccatggagatctacaaaaccgtgagcgcctggaagcggcagcctgtgcgcgtgctgagcctgtttcggaatatcgataaagtcctgaaaagcctgggattcctggagagcggctctggctccggcggtggcaccctgaagtacgtggaggatgtgacaaacgtggtcagacgggatgtggagaagtggggccccttcgatctggtgtacggcagcacccaacccctgggcagctcttgtgaccggtgccctggctggtacatgtttcagttccaccggatcctgcagtacgccctgccgagacaggagtcccagcggccattcttttggattttcatggacaacttgctgctgaccgaggatgaccaggaaactaccactcggttcctgcagaccgaagccgtgaccctgcaggacgtgagaggccgggactaccagaacgccatgcgggtgtggtccaacatccctggactgaaaagcaagcacgcacctctgacccctaaagaagaggagtacctgcaggcccaggtgcggagcagaagcaagctggacgcccctaaggtggatctgctggtgaagaattgcctcctgcccctgagagagtacttcaagtatttcagccagaatagtctgcccctgggaggcagcggcggcggcagccaggagagcgtggccttcgaggacgtggccgtgtacttcaccaccaaggagtgggccatcatggtgcccgccgagagggccctgtacagggacgtgatgctggagaactacgaggccgtggccttcgtggtgccccccaccagcaagcccgccctggtgagccacctggagcagggcaaggagagctgcttcatcaggccccagggcgtgctgagcaggagcgactggagggccggcctgggcggcccaagcagcggcgcccctcctcccagcggcggcaggcggcccaagcagcggcgcccctcctcccagcggcggcagcccagccggctccccaacctctaccgaggagggcacctctgagtccgccacccccgagagcggccctggcacctccaccgagcccagcgagggcagcgcacccggcagccctgccggcagccccacctccacagaggagggaaccagcaccgagcccagcgaaggcagcgccccaggcaccagcaccgagcctagtgagcaggagattaaacggatcaacaagatcagaagaagacttgtgaaagacagcaacaccaagaaggccggcaagacaggccccatgaaaaccctgctggttagagtgatgacacccgatctgagagagcggctggaaaacctgagaaagaagcctgaaaatatcccccagcccatcagcaatacatctagagccaacctgaataagctgctgaccgattacaccgaaatgaagaaggcgatcctgcatgtgtactgggaagagttccagaaggaccctgtgggcctgatgagccgggtggcccagcctgccagcaagaagatcgatcagaacaagctgaaacctgagatggacgagaagggcaacctgaccaccgccggctttgcctgctctcagtgtggccagcccctgttcgtgtacaagctggagcaggtgtctgagaagggcaaggcttacaccaactacttcggacggtgcaatgtggccgagcacgaaaagctgatcctgctggcccagctgaagcccgagaaggatagcgacgaagccgtgacatatagcctgggaaagtttgggcagagggccctggatttctacagcattcatgtgaccaaggagtccacccaccccgtgaagcccctggcccagatcgccggaaacagatacgcctccggacctgtgggaaaggccctgagcgacgcatgtatgggcacaatcgcctccttcctgtctaagtaccaggacatcatcatcgaacaccagaaggtggtgaagggcaaccagaagagactggagagcctgcgggagctggccggcaaggaaaacctggaataccctagcgtgaccctgccacctcagcctcacaccaaggagggcgttgatgcctacaacgaagtgatcgcccgggtgcgaatgtgggtgaacctgaacctgtggcagaagctgaagctaagcagagatgatgccaagcctctgctgagactgaagggattcccttcctttcctctggtcgagagacaggccaacgaagtggactggtgggacatggtgtgtaacgtgaagaagctgatcaacgagaaaaaggaggatggcaaggtgttttggcagaatctggctggctacaagagacaggaagccctgagaccatacctgagcagcgaggaagatcggaagaagggaaagaaattcgctcggtaccagctgggcgacctgctgctgcacctggaaaagaagcacggcgaggactggggaaaggtgtacgacgaggcctgggagcggattgacaagaaagtggaaggcctgagcaagcacatcaagctggaagaggaacggagaagcgaggacgcccagagcaaggccgccctgaccgactggctgcgggctaaggccagcttcgtgatcgagggcctgaaggaggccgacaaggacgagttctgcagatgcgagctgaagctgcagaagtggtacggggacctgcggggaaagcccttcgccatcgaagccgagaacagcatcctggacatcagcggcttcagcaagcagtacaactgtgccttcatctggcagaaggacggcgtgaagaagctgaacctgtacctgatcatcaactacttcaagggcggcaagctgcggttcaagaagatcaaacctgaagccttcgaagccaacagattctacaccgtgatcaacaaaaagagcggcgagatcgtgcccatggaggtgaacttcaacttcgacgaccccaacctgatcatcctgcctctggcctttggcaagagacagggcagagaattcatctggaacgacctgctgtccctggaaaccggcagcctgaagctggccaacggaagagtgatcgagaagacactgtacaacagaagaacccggcaggatgagcctgccctgttcgtggccctgaccttcgagcggcgggaggtcctggactcctccaatatcaaaccaatgaacctgatcggcgtggcaagaggcgaaaacatccccgccgtgatcgccctgaccgaccccgagggctgcccactgagccggtttaaggatagcctgggaaacccaacccacatcctgagaatcggcgagagctataaggagaagcagcggaccatccaggccaagaaggaggtggagcagcggagagccggcggctacagccggaagtacgccagcaaagccaagaatctggcagacgatatggtgagaaacaccgctagagatctgctgtactacgccgtgacccaggatgccatgctgatcttcgccaacctgagccggggcttcggccggcagggcaagcggaccttcatggccgagagacagtacacacggatggaggactggctgaccgccaagctggcctacgagggcctgagcaagacctacctgtccaagacactggcccagtacacctccaagacatgcagcaactgtgggtttaccatcaccagcgccgactacgacagggtgctggagaagctgaagaagacagcaacaggctggatgaccacaattaacggcaaggagctgaaggtggagggccagattacctactacaacagatacaagagacagaacgtagtcaaggacctgtccgtcgagctggatagactgagcgaagaatctgtgaacaacgacatctcctcctggacaaagggcagaagcggagaagctctgagcctcctgaagaaaagattctcccatagacccgtgcaggagaagttcgtgtgcctgaactgcggcttcgagacacacgcagccgagcaagccgccctgaacatcgccagatcctggctgttcctgcggagccaggagtacaagaaataccagacaaacaagacaaccggcaacaccgataagagagccttcgtcgagacctggcagtccttttaccggaagaagcttaaggaggtgtggaaacctgccgtgcggtctggcggatctggcggaggctccaccagccccaagaaaaagagaaaagtctaagctgccttctgcggggcttgccttctggccatgcccttcttctctcccttgcacctgtacctcttggtctttgaataaagcctgagtaggaaggctagcaaaaaaaaaaaaaaaaaaaaaaaaaaaaaaaaaaaaaaaaaaaaaaaaaaaaaaaaaaaaaaaaaaaaaaaaaaaaaaaagcccagccggctccccaacctctaccgaggagggcacctctgagtccgccacccccgagagcggccctggcacctccaccgagcccagcgagggcagcgcacccggcagccctgccggcagccccacctccacagaggagggaaccagcaccgagcccagcgaaggcagcgccccaggcaccagcaccgagcctagtgagcaggagattaaacggatcaacaagatcagaagaagacttgtgaaagacagcaacaccaagaaggccggcaagacaggccccatgaaaaccctgctggttagagtgatgacacccgatctgagagagcggctggaaaacctgagaaagaagcctgaaaatatcccccagcccatcagcaatacatctagagccaacctgaataagctgctgaccgattacaccgaaatgaagaaggcgatcctgcatgtgtactgggaagagttccagaaggaccctgtgggcctgatgagccgggtggcccagcctgccagcaagaagatcgatcagaacaagctgaaacctgagatggacgagaagggcaacctgaccaccgccggctttgcctgctctcagtgtggccagcccctgttcgtgtacaagctggagcaggtgtctgagaagggcaaggcttacaccaactacttcggacggtgcaatgtggccgagcacgaaaagctgatcctgctggcccagctgaagcccgagaaggatagcgacgaagccgtgacatatagcctgggaaagtttgggcagagggccctggatttctacagcattcatgtgaccaaggagtccacccaccccgtgaagcccctggcccagatcgccggaaacagatacgcctccggacctgtgggaaaggccctgagcgacgcatgtatgggcacaatcgcctccttcctgtctaagtaccaggacatcatcatcgaacaccagaaggtggtgaagggcaaccagaagagactggagagcctgcgggagctggccggcaaggaaaacctggaataccctagcgtgaccctgccacctcagcctcacaccaaggagggcgttgatgcctacaacgaagtgatcgcccgggtgcgaatgtgggtgaacctgaacctgtggcagaagctgaagctaagcagagatgatgccaagcctctgctgagactgaagggattcccttcctttcctctggtcgagagacaggccaacgaagtggactggtgggacatggtgtgtaacgtgaagaagctgatcaacgagaaaaaggaggatggcaaggtgttttggcagaatctggctggctacaagagacaggaagccctgagaccatacctgagcagcgaggaagatcggaagaagggaaagaaattcgctcggtaccagctgggcgacctgctgctgcacctggaaaagaagcacggcgaggactggggaaaggtgtacgacgaggcctgggagcggattgacaagaaagtggaaggcctgagcaagcacatcaagctggaagaggaacggagaagcgaggacgcccagagcaaggccgccctgaccgactggctgcgggctaaggccagcttcgtgatcgagggcctgaaggaggccgacaaggacgagttctgcagatgcgagctgaagctgcagaagtggtacggggacctgcggggaaagcccttcgccatcgaagccgagaacagcatcctggacatcagcggcttcagcaagcagtacaactgtgccttcatctggcagaaggacggcgtgaagaagctgaacctgtacctgatcatcaactacttcaagggcggcaagctgcggttcaagaagatcaaacctgaagccttcgaagccaacagattctacaccgtgatcaacaaaaagagcggcgagatcgtgcccatggaggtgaacttcaacttcgacgaccccaacctgatcatcctgcctctggcctttggcaagagacagggcagagaattcatctggaacgacctgctgtccctggaaaccggcagcctgaagctggccaacggaagagtgatcgagaagacactgtacaacagaagaacccggcaggatgagcctgccctgttcgtggccctgaccttcgagcggcgggaggtcctggactcctccaatatcaaaccaatgaacctgatcggcgtggcaagaggcgaaaacatccccgccgtgatcgccctgaccgaccccgagggctgcccactgagccggtttaaggatagcctgggaaacccaacccacatcctgagaatcggcgagagctataaggagaagcagcggaccatccaggccaagaaggaggtggagcagcggagagccggcggctacagccggaagtacgccagcaaagccaagaatctggcagacgatatggtgagaaacaccgctagagatctgctgtactacgccgtgacccaggatgccatgctgatcttcgccaacctgagccggggcttcggccggcagggcaagcggaccttcatggccgagagacagtacacacggatggaggactggctgaccgccaagctggcctacgagggcctgagcaagacctacctgtccaagacactggcccagtacacctccaagacatgcagcaactgtgggtttaccatcaccagcgccgactacgacagggtgctggagaagctgaagaagacagcaacaggctggatgaccacaattaacggcaaggagctgaaggtggagggccagattacctactacaacagatacaagagacagaacgtagtcaaggacctgtccgtcgagctggatagactgagcgaagaatctgtgaacaacgacatctcctcctggacaaagggcagaagcggagaagctctgagcctcctgaagaaaagattctcccatagacccgtgcaggagaagttcgtgtgcctgaactgcggcttcgagacacacgcagccgagcaagccgccctgaacatcgccagatcctggctgttcctgcggagccaggagtacaagaaataccagacaaacaagacaaccggcaacaccgataagagagccttcgtcgagacctggcagtccttttaccggaagaagcttaaggaggtgtggaaacctgccgtgcggtctggcggatctggcggaggctccaccagccccaagaaaaagagaaaagtctaagctgccttctgcggggcttgccttctggccatgcccttcttctctcccttgcacctgtacctcttggtctttgaataaagcctgagtaggaaggctagcaaaaaaaaaaaaaaaaaaaaaaaaaaaaaaaaaaaaaaaaaaaaaaaaaaaaaaaaaaaaaaaaaaaaaaaaaaaaaaaa

SEQ ID NO: 8920 - RNA, 8787 nt, synthetic construct
  source 1..8787: mol_type = other RNA
aggaaataagagagaaaagaagagtaagaagaaatataagagccaccatggcccctaagaagaagcgtaaagtgagccggatgaaccacgaccaggagttcgacccccctaaggtgtaccctcccgtccccgccgagaagagaaagcccatccgggtcctgagcctgttcgatggcatcgccaccggtctgctggtgctgaaggacctgggcatccaggtggataggtacattgcctccgaggtgtgcgaggactccatcaccgtgggaatggtgcgtcatcagggcaagatcatgtacgtgggcgacgtgcggagcgtgacacagaagcatatccaggagtggggccctttcgacctggtgatcggcggcagcccttgcaatgacctgagcatcgtgaacccagcccggaagggcctgtacgagggaaccggcagactgttcttcgagttttacagactgctgcacgacgcccggcctaaggaaggcgacgaccggcccttcttttggctgttcgagaatgtggtggccatgggagtcagcgacaagcgggatattagccggttcctggagagcaaccccgtgatgatcgatgccaaggaagtgagcgccgcccaccgggccagatacttctggggcaatctgcctggcatgaacagacccctggccagcaccgtgaacgacaagctggagctgcaggagtgcctggagcacggccggatcgccaagttcagcaaggtgagaaccatcaccacccgaagcaacagcatcaaacaaggcaaggaccagcactttcctgtgttcatgaacgagaaggaggacatcctgtggtgtaccgagatggagagagtgttcgggttcccagtccactacacagatgtcagcaacatgtctagactggccagacagagactgctgggaagaagctggtccgtccctgtgatcagacacctgttcgcccctctgaaggagtacttcgcctgcgtgagcagcggcaacagcaacgccaacagccggggccccagcttctctagcggcctggtgccactgtccctgagagggagccacatgggccccatggagatctacaaaaccgtgagcgcctggaagcggcagcctgtgcgcgtgctgagcctgtttcggaatatcgataaagtcctgaaaagcctgggattcctggagagcggctctggctccggcggtggcaccctgaagtacgtggaggatgtgacaaacgtggtcagacgggatgtggagaagtggggccccttcgatctggtgtacggcagcacccaacccctgggcagctcttgtgaccggtgccctggctggtacatgtttcagttccaccggatcctgcagtacgccctgccgagacaggagtcccagcggccattcttttggattttcatggacaacttgctgctgaccgaggatgaccaggaaactaccactcggttcctgcagaccgaagccgtgaccctgcaggacgtgagaggccgggactaccagaacgccatgcgggtgtggtccaacatccctggactgaaaagcaagcacgcacctctgacccctaaagaagaggagtacctgcaggcccaggtgcggagcagaagcaagctggacgcccctaaggtggatctgctggtgaagaattgcctcctgcccctgagagagtacttcaagtatttcagccagaatagtctgcccctgggaggcagcggcggcggcagcacccccgtgaccttcgaggacgtggtggtgtacttcaccgccgccgagtgggtgcacctgaccaactggcagagggacttctaccaggccgtgatgatggagacctacgagctggtggccagcgtggccggcgacggcgtgcccatggccgaggacgaggagggcggcgtggagaggcccgtgtggcagtacatccccaggggcaagaggaggaggaagaccccccagcccagggccgacggcggcccaagcagcggcgcccctcctcccagcggcggcaggcggcccaagcagcggcgcccctcctcccagcggcggcagcccagccggctccccaacctctaccgaggagggcacctctgagtccgccacccccgagagcggccctggcacctccaccgagcccagcgagggcagcgcacccggcagccctgccggcagccccacctccacagaggagggaaccagcaccgagcccagcgaaggcagcgccccaggcaccagcaccgagcctagtgagcaggagattaaacggatcaacaagatcagaagaagacttgtgaaagacagcaacaccaagaaggccggcaagacaggccccatgaaaaccctgctggttagagtgatgacacccgatctgagagagcggctggaaaacctgagaaagaagcctgaaaatatcccccagcccatcagcaatacatctagagccaacctgaataagctgctgaccgattacaccgaaatgaagaaggcgatcctgcatgtgtactgggaagagttccagaaggaccctgtgggcctgatgagccgggtggcccagcctgccagcaagaagatcgatcagaacaagctgaaacctgagatggacgagaagggcaacctgaccaccgccggctttgcctgctctcagtgtggccagcccctgttcgtgtacaagctggagcaggtgtctgagaagggcaaggcttacaccaactacttcggacggtgcaatgtggccgagcacgaaaagctgatcctgctggcccagctgaagcccgagaaggatagcgacgaagccgtgacatatagcctgggaaagtttgggcagagggccctggatttctacagcattcatgtgaccaaggagtccacccaccccgtgaagcccctggcccagatcgccggaaacagatacgcctccggacctgtgggaaaggccctgagcgacgcatgtatgggcacaatcgcctccttcctgtctaagtaccaggacatcatcatcgaacaccagaaggtggtgaagggcaaccagaagagactggagagcctgcgggagctggccggcaaggaaaacctggaataccctagcgtgaccctgccacctcagcctcacaccaaggagggcgttgatgcctacaacgaagtgatcgcccgggtgcgaatgtgggtgaacctgaacctgtggcagaagctgaagctaagcagagatgatgccaagcctctgctgagactgaagggattcccttcctttcctctggtcgagagacaggccaacgaagtggactggtgggacatggtgtgtaacgtgaagaagctgatcaacgagaaaaaggaggatggcaaggtgttttggcagaatctggctggctacaagagacaggaagccctgagaccatacctgagcagcgaggaagatcggaagaagggaaagaaattcgctcggtaccagctgggcgacctgctgctgcacctggaaaagaagcacggcgaggactggggaaaggtgtacgacgaggcctgggagcggattgacaagaaagtggaaggcctgagcaagcacatcaagctggaagaggaacggagaagcgaggacgcccagagcaaggccgccctgaccgactggctgcgggctaaggccagcttcgtgatcgagggcctgaaggaggccgacaaggacgagttctgcagatgcgagctgaagctgcagaagtggtacggggacctgcggggaaagcccttcgccatcgaagccgagaacagcatcctggacatcagcggcttcagcaagcagtacaactgtgccttcatctggcagaaggacggcgtgaagaagctgaacctgtacctgatcatcaactacttcaagggcggcaagctgcggttcaagaagatcaaacctgaagccttcgaagccaacagattctacaccgtgatcaacaaaaagagcggcgagatcgtgcccatggaggtgaacttcaacttcgacgaccccaacctgatcatcctgcctctggcctttggcaagagacagggcagagaattcatctggaacgacctgctgtccctggaaaccggcagcctgaagctggccaacggaagagtgatcgagaagacactgtacaacagaagaacccggcaggatgagcctgccctgttcgtggccctgaccttcgagcggcgggaggtcctggactcctccaatatcaaaccaatgaacctgatcggcgtggcaagaggcgaaaacatccccgccgtgatcgccctgaccgaccccgagggctgcccactgagccggtttaaggatagcctgggaaacccaacccacatcctgagaatcggcgagagctataaggagaagcagcggaccatccaggccaagaaggaggtggagcagcggagagccggcggctacagccggaagtacgccagcaaagccaagaatctggcagacgatatggtgagaaacaccgctagagatctgctgtactacgccgtgacccaggatgccatgctgatcttcgccaacctgagccggggcttcggccggcagggcaagcggaccttcatggccgagagacagtacacacggatggaggactggctgaccgccaagctggcctacgagggcctgagcaagacctacctgtccaagacactggcccagtacacctccaagacatgcagcaactgtgggtttaccatcaccagcgccgactacgacagggtgctggagaagctgaagaagacagcaacaggctggatgaccacaattaacggcaaggagctgaaggtggagggccagattacctactacaacagatacaagagacagaacgtagtcaaggacctgtccgtcgagctggatagactgagcgaagaatctgtgaacaacgacatctcctcctggacaaagggcagaagcggagaagctctgagcctcctgaagaaaagattctcccatagacccgtgcaggagaagttcgtgtgcctgaactgcggcttcgagacacacgcagccgagcaagccgccctgaacatcgccagatcctggctgttcctgcggagccaggagtacaagaaataccagacaaacaagacaaccggcaacaccgataagagagccttcgtcgagacctggcagtccttttaccggaagaagcttaaggaggtgtggaaacctgccgtgcggtctggcggatctggcggaggctccaccagccccaagaaaaagagaaaagtctaagctgccttctgcggggcttgccttctggccatgcccttcttctctcccttgcacctgtacctcttggtctttgaataaagcctgagtaggaaggctagcaaaaaaaaaaaaaaaaaaaaaaaaaaaaaaaaaaaaaaaaaaaaaaaaaaaaaaaaaaaaaaaaaaaaaaaaaaaaaaaagcccagccggctccccaacctctaccgaggagggcacctctgagtccgccacccccgagagcggccctggcacctccaccgagcccagcgagggcagcgcacccggcagccctgccggcagccccacctccacagaggagggaaccagcaccgagcccagcgaaggcagcgccccaggcaccagcaccgagcctagtgagcaggagattaaacggatcaacaagatcagaagaagacttgtgaaagacagcaacaccaagaaggccggcaagacaggccccatgaaaaccctgctggttagagtgatgacacccgatctgagagagcggctggaaaacctgagaaagaagcctgaaaatatcccccagcccatcagcaatacatctagagccaacctgaataagctgctgaccgattacaccgaaatgaagaaggcgatcctgcatgtgtactgggaagagttccagaaggaccctgtgggcctgatgagccgggtggcccagcctgccagcaagaagatcgatcagaacaagctgaaacctgagatggacgagaagggcaacctgaccaccgccggctttgcctgctctcagtgtggccagcccctgttcgtgtacaagctggagcaggtgtctgagaagggcaaggcttacaccaactacttcggacggtgcaatgtggccgagcacgaaaagctgatcctgctggcccagctgaagcccgagaaggatagcgacgaagccgtgacatatagcctgggaaagtttgggcagagggccctggatttctacagcattcatgtgaccaaggagtccacccaccccgtgaagcccctggcccagatcgccggaaacagatacgcctccggacctgtgggaaaggccctgagcgacgcatgtatgggcacaatcgcctccttcctgtctaagtaccaggacatcatcatcgaacaccagaaggtggtgaagggcaaccagaagagactggagagcctgcgggagctggccggcaaggaaaacctggaataccctagcgtgaccctgccacctcagcctcacaccaaggagggcgttgatgcctacaacgaagtgatcgcccgggtgcgaatgtgggtgaacctgaacctgtggcagaagctgaagctaagcagagatgatgccaagcctctgctgagactgaagggattcccttcctttcctctggtcgagagacaggccaacgaagtggactggtgggacatggtgtgtaacgtgaagaagctgatcaacgagaaaaaggaggatggcaaggtgttttggcagaatctggctggctacaagagacaggaagccctgagaccatacctgagcagcgaggaagatcggaagaagggaaagaaattcgctcggtaccagctgggcgacctgctgctgcacctggaaaagaagcacggcgaggactggggaaaggtgtacgacgaggcctgggagcggattgacaagaaagtggaaggcctgagcaagcacatcaagctggaagaggaacggagaagcgaggacgcccagagcaaggccgccctgaccgactggctgcgggctaaggccagcttcgtgatcgagggcctgaaggaggccgacaaggacgagttctgcagatgcgagctgaagctgcagaagtggtacggggacctgcggggaaagcccttcgccatcgaagccgagaacagcatcctggacatcagcggcttcagcaagcagtacaactgtgccttcatctggcagaaggacggcgtgaagaagctgaacctgtacctgatcatcaactacttcaagggcggcaagctgcggttcaagaagatcaaacctgaagccttcgaagccaacagattctacaccgtgatcaacaaaaagagcggcgagatcgtgcccatggaggtgaacttcaacttcgacgaccccaacctgatcatcctgcctctggcctttggcaagagacagggcagagaattcatctggaacgacctgctgtccctggaaaccggcagcctgaagctggccaacggaagagtgatcgagaagacactgtacaacagaagaacccggcaggatgagcctgccctgttcgtggccctgaccttcgagcggcgggaggtcctggactcctccaatatcaaaccaatgaacctgatcggcgtggcaagaggcgaaaacatccccgccgtgatcgccctgaccgaccccgagggctgcccactgagccggtttaaggatagcctgggaaacccaacccacatcctgagaatcggcgagagctataaggagaagcagcggaccatccaggccaagaaggaggtggagcagcggagagccggcggctacagccggaagtacgccagcaaagccaagaatctggcagacgatatggtgagaaacaccgctagagatctgctgtactacgccgtgacccaggatgccatgctgatcttcgccaacctgagccggggcttcggccggcagggcaagcggaccttcatggccgagagacagtacacacggatggaggactggctgaccgccaagctggcctacgagggcctgagcaagacctacctgtccaagacactggcccagtacacctccaagacatgcagcaactgtgggtttaccatcaccagcgccgactacgacagggtgctggagaagctgaagaagacagcaacaggctggatgaccacaattaacggcaaggagctgaaggtggagggccagattacctactacaacagatacaagagacagaacgtagtcaaggacctgtccgtcgagctggatagactgagcgaagaatctgtgaacaacgacatctcctcctggacaaagggcagaagcggagaagctctgagcctcctgaagaaaagattctcccatagacccgtgcaggagaagttcgtgtgcctgaactgcggcttcgagacacacgcagccgagcaagccgccctgaacatcgccagatcctggctgttcctgcggagccaggagtacaagaaataccagacaaacaagacaaccggcaacaccgataagagagccttcgtcgagacctggcagtccttttaccggaagaagcttaaggaggtgtggaaacctgccgtgcggtctggcggatctggcggaggctccaccagccccaagaaaaagagaaaagtctaagctgccttctgcggggcttgccttctggccatgcccttcttctctcccttgcacctgtacctcttggtctttgaataaagcctgagtaggaaggctagcaaaaaaaaaaaaaaaaaaaaaaaaaaaaaaaaaaaaaaaaaaaaaaaaaaaaaaaaaaaaaaaaaaaaaaaaaaaaaaaa

SEQ ID NO: 8921 - RNA, 8787 nt, synthetic construct
  source 1..8787: mol_type = other RNA
aggaaataagagagaaaagaagagtaagaagaaatataagagccaccatggcccctaagaagaagcgtaaagtgagccggatgaaccacgaccaggagttcgacccccctaaggtgtaccctcccgtccccgccgagaagagaaagcccatccgggtcctgagcctgttcgatggcatcgccaccggtctgctggtgctgaaggacctgggcatccaggtggataggtacattgcctccgaggtgtgcgaggactccatcaccgtgggaatggtgcgtcatcagggcaagatcatgtacgtgggcgacgtgcggagcgtgacacagaagcatatccaggagtggggccctttcgacctggtgatcggcggcagcccttgcaatgacctgagcatcgtgaacccagcccggaagggcctgtacgagggaaccggcagactgttcttcgagttttacagactgctgcacgacgcccggcctaaggaaggcgacgaccggcccttcttttggctgttcgagaatgtggtggccatgggagtcagcgacaagcgggatattagccggttcctggagagcaaccccgtgatgatcgatgccaaggaagtgagcgccgcccaccgggccagatacttctggggcaatctgcctggcatgaacagacccctggccagcaccgtgaacgacaagctggagctgcaggagtgcctggagcacggccggatcgccaagttcagcaaggtgagaaccatcaccacccgaagcaacagcatcaaacaaggcaaggaccagcactttcctgtgttcatgaacgagaaggaggacatcctgtggtgtaccgagatggagagagtgttcgggttcccagtccactacacagatgtcagcaacatgtctagactggccagacagagactgctgggaagaagctggtccgtccctgtgatcagacacctgttcgcccctctgaaggagtacttcgcctgcgtgagcagcggcaacagcaacgccaacagccggggccccagcttctctagcggcctggtgccactgtccctgagagggagccacatgggccccatggagatctacaaaaccgtgagcgcctggaagcggcagcctgtgcgcgtgctgagcctgtttcggaatatcgataaagtcctgaaaagcctgggattcctggagagcggctctggctccggcggtggcaccctgaagtacgtggaggatgtgacaaacgtggtcagacgggatgtggagaagtggggccccttcgatctggtgtacggcagcacccaacccctgggcagctcttgtgaccggtgccctggctggtacatgtttcagttccaccggatcctgcagtacgccctgccgagacaggagtcccagcggccattcttttggattttcatggacaacttgctgctgaccgaggatgaccaggaaactaccactcggttcctgcagaccgaagccgtgaccctgcaggacgtgagaggccgggactaccagaacgccatgcgggtgtggtccaacatccctggactgaaaagcaagcacgcacctctgacccctaaagaagaggagtacctgcaggcccaggtgcggagcagaagcaagctggacgcccctaaggtggatctgctggtgaagaattgcctcctgcccctgagagagtacttcaagtatttcagccagaatagtctgcccctgggaggcagcggcggcggcaagcccggcgccgtgagcttcgccgacgtggccgtgtacttcagccccgaggagtggggctgcctgaggcccgcccagagggccctgtacagggacgtgatgagggagacctacggccacctgggcgccctgggcttccccggccccaagcccgccctgatcagctggatggagcaggagagcgaggcctggagccccgccgcccaggaccccgaggagggcgagagcctgggcggcgccctgggcggcccaagcagcggcgcccctcctcccagcggcggcaggcggcccaagcagcggcgcccctcctcccagcggcggcagcccagccggctccccaacctctaccgaggagggcacctctgagtccgccacccccgagagcggccctggcacctccaccgagcccagcgagggcagcgcacccggcagccctgccggcagccccacctccacagaggagggaaccagcaccgagcccagcgaaggcagcgccccaggcaccagcaccgagcctagtgagcaggagattaaacggatcaacaagatcagaagaagacttgtgaaagacagcaacaccaagaaggccggcaagacaggccccatgaaaaccctgctggttagagtgatgacacccgatctgagagagcggctggaaaacctgagaaagaagcctgaaaatatcccccagcccatcagcaatacatctagagccaacctgaataagctgctgaccgattacaccgaaatgaagaaggcgatcctgcatgtgtactgggaagagttccagaaggaccctgtgggcctgatgagccgggtggcccagcctgccagcaagaagatcgatcagaacaagctgaaacctgagatggacgagaagggcaacctgaccaccgccggctttgcctgctctcagtgtggccagcccctgttcgtgtacaagctggagcaggtgtctgagaagggcaaggcttacaccaactacttcggacggtgcaatgtggccgagcacgaaaagctgatcctgctggcccagctgaagcccgagaaggatagcgacgaagccgtgacatatagcctgggaaagtttgggcagagggccctggatttctacagcattcatgtgaccaaggagtccacccaccccgtgaagcccctggcccagatcgccggaaacagatacgcctccggacctgtgggaaaggccctgagcgacgcatgtatgggcacaatcgcctccttcctgtctaagtaccaggacatcatcatcgaacaccagaaggtggtgaagggcaaccagaagagactggagagcctgcgggagctggccggcaaggaaaacctggaataccctagcgtgaccctgccacctcagcctcacaccaaggagggcgttgatgcctacaacgaagtgatcgcccgggtgcgaatgtgggtgaacctgaacctgtggcagaagctgaagctaagcagagatgatgccaagcctctgctgagactgaagggattcccttcctttcctctggtcgagagacaggccaacgaagtggactggtgggacatggtgtgtaacgtgaagaagctgatcaacgagaaaaaggaggatggcaaggtgttttggcagaatctggctggctacaagagacaggaagccctgagaccatacctgagcagcgaggaagatcggaagaagggaaagaaattcgctcggtaccagctgggcgacctgctgctgcacctggaaaagaagcacggcgaggactggggaaaggtgtacgacgaggcctgggagcggattgacaagaaagtggaaggcctgagcaagcacatcaagctggaagaggaacggagaagcgaggacgcccagagcaaggccgccctgaccgactggctgcgggctaaggccagcttcgtgatcgagggcctgaaggaggccgacaaggacgagttctgcagatgcgagctgaagctgcagaagtggtacggggacctgcggggaaagcccttcgccatcgaagccgagaacagcatcctggacatcagcggcttcagcaagcagtacaactgtgccttcatctggcagaaggacggcgtgaagaagctgaacctgtacctgatcatcaactacttcaagggcggcaagctgcggttcaagaagatcaaacctgaagccttcgaagccaacagattctacaccgtgatcaacaaaaagagcggcgagatcgtgcccatggaggtgaacttcaacttcgacgaccccaacctgatcatcctgcctctggcctttggcaagagacagggcagagaattcatctggaacgacctgctgtccctggaaaccggcagcctgaagctggccaacggaagagtgatcgagaagacactgtacaacagaagaacccggcaggatgagcctgccctgttcgtggccctgaccttcgagcggcgggaggtcctggactcctccaatatcaaaccaatgaacctgatcggcgtggcaagaggcgaaaacatccccgccgtgatcgccctgaccgaccccgagggctgcccactgagccggtttaaggatagcctgggaaacccaacccacatcctgagaatcggcgagagctataaggagaagcagcggaccatccaggccaagaaggaggtggagcagcggagagccggcggctacagccggaagtacgccagcaaagccaagaatctggcagacgatatggtgagaaacaccgctagagatctgctgtactacgccgtgacccaggatgccatgctgatcttcgccaacctgagccggggcttcggccggcagggcaagcggaccttcatggccgagagacagtacacacggatggaggactggctgaccgccaagctggcctacgagggcctgagcaagacctacctgtccaagacactggcccagtacacctccaagacatgcagcaactgtgggtttaccatcaccagcgccgactacgacagggtgctggagaagctgaagaagacagcaacaggctggatgaccacaattaacggcaaggagctgaaggtggagggccagattacctactacaacagatacaagagacagaacgtagtcaaggacctgtccgtcgagctggatagactgagcgaagaatctgtgaacaacgacatctcctcctggacaaagggcagaagcggagaagctctgagcctcctgaagaaaagattctcccatagacccgtgcaggagaagttcgtgtgcctgaactgcggcttcgagacacacgcagccgagcaagccgccctgaacatcgccagatcctggctgttcctgcggagccaggagtacaagaaataccagacaaacaagacaaccggcaacaccgataagagagccttcgtcgagacctggcagtccttttaccggaagaagcttaaggaggtgtggaaacctgccgtgcggtctggcggatctggcggaggctccaccagccccaagaaaaagagaaaagtctaagctgccttctgcggggcttgccttctggccatgcccttcttctctcccttgcacctgtacctcttggtctttgaataaagcctgagtaggaaggctagcaaaaaaaaaaaaaaaaaaaaaaaaaaaaaaaaaaaaaaaaaaaaaaaaaaaaaaaaaaaaaaaaaaaaaaaaaaaaaaaagcccagccggctccccaacctctaccgaggagggcacctctgagtccgccacccccgagagcggccctggcacctccaccgagcccagcgagggcagcgcacccggcagccctgccggcagccccacctccacagaggagggaaccagcaccgagcccagcgaaggcagcgccccaggcaccagcaccgagcctagtgagcaggagattaaacggatcaacaagatcagaagaagacttgtgaaagacagcaacaccaagaaggccggcaagacaggccccatgaaaaccctgctggttagagtgatgacacccgatctgagagagcggctggaaaacctgagaaagaagcctgaaaatatcccccagcccatcagcaatacatctagagccaacctgaataagctgctgaccgattacaccgaaatgaagaaggcgatcctgcatgtgtactgggaagagttccagaaggaccctgtgggcctgatgagccgggtggcccagcctgccagcaagaagatcgatcagaacaagctgaaacctgagatggacgagaagggcaacctgaccaccgccggctttgcctgctctcagtgtggccagcccctgttcgtgtacaagctggagcaggtgtctgagaagggcaaggcttacaccaactacttcggacggtgcaatgtggccgagcacgaaaagctgatcctgctggcccagctgaagcccgagaaggatagcgacgaagccgtgacatatagcctgggaaagtttgggcagagggccctggatttctacagcattcatgtgaccaaggagtccacccaccccgtgaagcccctggcccagatcgccggaaacagatacgcctccggacctgtgggaaaggccctgagcgacgcatgtatgggcacaatcgcctccttcctgtctaagtaccaggacatcatcatcgaacaccagaaggtggtgaagggcaaccagaagagactggagagcctgcgggagctggccggcaaggaaaacctggaataccctagcgtgaccctgccacctcagcctcacaccaaggagggcgttgatgcctacaacgaagtgatcgcccgggtgcgaatgtgggtgaacctgaacctgtggcagaagctgaagctaagcagagatgatgccaagcctctgctgagactgaagggattcccttcctttcctctggtcgagagacaggccaacgaagtggactggtgggacatggtgtgtaacgtgaagaagctgatcaacgagaaaaaggaggatggcaaggtgttttggcagaatctggctggctacaagagacaggaagccctgagaccatacctgagcagcgaggaagatcggaagaagggaaagaaattcgctcggtaccagctgggcgacctgctgctgcacctggaaaagaagcacggcgaggactggggaaaggtgtacgacgaggcctgggagcggattgacaagaaagtggaaggcctgagcaagcacatcaagctggaagaggaacggagaagcgaggacgcccagagcaaggccgccctgaccgactggctgcgggctaaggccagcttcgtgatcgagggcctgaaggaggccgacaaggacgagttctgcagatgcgagctgaagctgcagaagtggtacggggacctgcggggaaagcccttcgccatcgaagccgagaacagcatcctggacatcagcggcttcagcaagcagtacaactgtgccttcatctggcagaaggacggcgtgaagaagctgaacctgtacctgatcatcaactacttcaagggcggcaagctgcggttcaagaagatcaaacctgaagccttcgaagccaacagattctacaccgtgatcaacaaaaagagcggcgagatcgtgcccatggaggtgaacttcaacttcgacgaccccaacctgatcatcctgcctctggcctttggcaagagacagggcagagaattcatctggaacgacctgctgtccctggaaaccggcagcctgaagctggccaacggaagagtgatcgagaagacactgtacaacagaagaacccggcaggatgagcctgccctgttcgtggccctgaccttcgagcggcgggaggtcctggactcctccaatatcaaaccaatgaacctgatcggcgtggcaagaggcgaaaacatccccgccgtgatcgccctgaccgaccccgagggctgcccactgagccggtttaaggatagcctgggaaacccaacccacatcctgagaatcggcgagagctataaggagaagcagcggaccatccaggccaagaaggaggtggagcagcggagagccggcggctacagccggaagtacgccagcaaagccaagaatctggcagacgatatggtgagaaacaccgctagagatctgctgtactacgccgtgacccaggatgccatgctgatcttcgccaacctgagccggggcttcggccggcagggcaagcggaccttcatggccgagagacagtacacacggatggaggactggctgaccgccaagctggcctacgagggcctgagcaagacctacctgtccaagacactggcccagtacacctccaagacatgcagcaactgtgggtttaccatcaccagcgccgactacgacagggtgctggagaagctgaagaagacagcaacaggctggatgaccacaattaacggcaaggagctgaaggtggagggccagattacctactacaacagatacaagagacagaacgtagtcaaggacctgtccgtcgagctggatagactgagcgaagaatctgtgaacaacgacatctcctcctggacaaagggcagaagcggagaagctctgagcctcctgaagaaaagattctcccatagacccgtgcaggagaagttcgtgtgcctgaactgcggcttcgagacacacgcagccgagcaagccgccctgaacatcgccagatcctggctgttcctgcggagccaggagtacaagaaataccagacaaacaagacaaccggcaacaccgataagagagccttcgtcgagacctggcagtccttttaccggaagaagcttaaggaggtgtggaaacctgccgtgcggtctggcggatctggcggaggctccaccagccccaagaaaaagagaaaagtctaagctgccttctgcggggcttgccttctggccatgcccttcttctctcccttgcacctgtacctcttggtctttgaataaagcctgagtaggaaggctagcaaaaaaaaaaaaaaaaaaaaaaaaaaaaaaaaaaaaaaaaaaaaaaaaaaaaaaaaaaaaaaaaaaaaaaaaaaaaaaaa

SEQ ID NO: 8922 - RNA, 8787 nt, synthetic construct
  source 1..8787: mol_type = other RNA
aggaaataagagagaaaagaagagtaagaagaaatataagagccaccatggcccctaagaagaagcgtaaagtgagccggatgaaccacgaccaggagttcgacccccctaaggtgtaccctcccgtccccgccgagaagagaaagcccatccgggtcctgagcctgttcgatggcatcgccaccggtctgctggtgctgaaggacctgggcatccaggtggataggtacattgcctccgaggtgtgcgaggactccatcaccgtgggaatggtgcgtcatcagggcaagatcatgtacgtgggcgacgtgcggagcgtgacacagaagcatatccaggagtggggccctttcgacctggtgatcggcggcagcccttgcaatgacctgagcatcgtgaacccagcccggaagggcctgtacgagggaaccggcagactgttcttcgagttttacagactgctgcacgacgcccggcctaaggaaggcgacgaccggcccttcttttggctgttcgagaatgtggtggccatgggagtcagcgacaagcgggatattagccggttcctggagagcaaccccgtgatgatcgatgccaaggaagtgagcgccgcccaccgggccagatacttctggggcaatctgcctggcatgaacagacccctggccagcaccgtgaacgacaagctggagctgcaggagtgcctggagcacggccggatcgccaagttcagcaaggtgagaaccatcaccacccgaagcaacagcatcaaacaaggcaaggaccagcactttcctgtgttcatgaacgagaaggaggacatcctgtggtgtaccgagatggagagagtgttcgggttcccagtccactacacagatgtcagcaacatgtctagactggccagacagagactgctgggaagaagctggtccgtccctgtgatcagacacctgttcgcccctctgaaggagtacttcgcctgcgtgagcagcggcaacagcaacgccaacagccggggccccagcttctctagcggcctggtgccactgtccctgagagggagccacatgggccccatggagatctacaaaaccgtgagcgcctggaagcggcagcctgtgcgcgtgctgagcctgtttcggaatatcgataaagtcctgaaaagcctgggattcctggagagcggctctggctccggcggtggcaccctgaagtacgtggaggatgtgacaaacgtggtcagacgggatgtggagaagtggggccccttcgatctggtgtacggcagcacccaacccctgggcagctcttgtgaccggtgccctggctggtacatgtttcagttccaccggatcctgcagtacgccctgccgagacaggagtcccagcggccattcttttggattttcatggacaacttgctgctgaccgaggatgaccaggaaactaccactcggttcctgcagaccgaagccgtgaccctgcaggacgtgagaggccgggactaccagaacgccatgcgggtgtggtccaacatccctggactgaaaagcaagcacgcacctctgacccctaaagaagaggagtacctgcaggcccaggtgcggagcagaagcaagctggacgcccctaaggtggatctgctggtgaagaattgcctcctgcccctgagagagtacttcaagtatttcagccagaatagtctgcccctgggaggcagcggcggcggcaagcccggcgccgtgagcttcgccgacgtggccgtgtacttcagccccgaggagtggggctgcctgaggcccgcccagagggccctgtacagggacgtgatgagggagacctacggccacctgggcgccctgggcttccccggccccaagcccgccctgatcagctggatggagcaggagagcgaggcctggagccccgacgcccaggaccccgaggagggcgagagcctgggcggcgccctgggcggcccaagcagcggcgcccctcctcccagcggcggcaggcggcccaagcagcggcgcccctcctcccagcggcggcagcccagccggctccccaacctctaccgaggagggcacctctgagtccgccacccccgagagcggccctggcacctccaccgagcccagcgagggcagcgcacccggcagccctgccggcagccccacctccacagaggagggaaccagcaccgagcccagcgaaggcagcgccccaggcaccagcaccgagcctagtgagcaggagattaaacggatcaacaagatcagaagaagacttgtgaaagacagcaacaccaagaaggccggcaagacaggccccatgaaaaccctgctggttagagtgatgacacccgatctgagagagcggctggaaaacctgagaaagaagcctgaaaatatcccccagcccatcagcaatacatctagagccaacctgaataagctgctgaccgattacaccgaaatgaagaaggcgatcctgcatgtgtactgggaagagttccagaaggaccctgtgggcctgatgagccgggtggcccagcctgccagcaagaagatcgatcagaacaagctgaaacctgagatggacgagaagggcaacctgaccaccgccggctttgcctgctctcagtgtggccagcccctgttcgtgtacaagctggagcaggtgtctgagaagggcaaggcttacaccaactacttcggacggtgcaatgtggccgagcacgaaaagctgatcctgctggcccagctgaagcccgagaaggatagcgacgaagccgtgacatatagcctgggaaagtttgggcagagggccctggatttctacagcattcatgtgaccaaggagtccacccaccccgtgaagcccctggcccagatcgccggaaacagatacgcctccggacctgtgggaaaggccctgagcgacgcatgtatgggcacaatcgcctccttcctgtctaagtaccaggacatcatcatcgaacaccagaaggtggtgaagggcaaccagaagagactggagagcctgcgggagctggccggcaaggaaaacctggaataccctagcgtgaccctgccacctcagcctcacaccaaggagggcgttgatgcctacaacgaagtgatcgcccgggtgcgaatgtgggtgaacctgaacctgtggcagaagctgaagctaagcagagatgatgccaagcctctgctgagactgaagggattcccttcctttcctctggtcgagagacaggccaacgaagtggactggtgggacatggtgtgtaacgtgaagaagctgatcaacgagaaaaaggaggatggcaaggtgttttggcagaatctggctggctacaagagacaggaagccctgagaccatacctgagcagcgaggaagatcggaagaagggaaagaaattcgctcggtaccagctgggcgacctgctgctgcacctggaaaagaagcacggcgaggactggggaaaggtgtacgacgaggcctgggagcggattgacaagaaagtggaaggcctgagcaagcacatcaagctggaagaggaacggagaagcgaggacgcccagagcaaggccgccctgaccgactggctgcgggctaaggccagcttcgtgatcgagggcctgaaggaggccgacaaggacgagttctgcagatgcgagctgaagctgcagaagtggtacggggacctgcggggaaagcccttcgccatcgaagccgagaacagcatcctggacatcagcggcttcagcaagcagtacaactgtgccttcatctggcagaaggacggcgtgaagaagctgaacctgtacctgatcatcaactacttcaagggcggcaagctgcggttcaagaagatcaaacctgaagccttcgaagccaacagattctacaccgtgatcaacaaaaagagcggcgagatcgtgcccatggaggtgaacttcaacttcgacgaccccaacctgatcatcctgcctctggcctttggcaagagacagggcagagaattcatctggaacgacctgctgtccctggaaaccggcagcctgaagctggccaacggaagagtgatcgagaagacactgtacaacagaagaacccggcaggatgagcctgccctgttcgtggccctgaccttcgagcggcgggaggtcctggactcctccaatatcaaaccaatgaacctgatcggcgtggcaagaggcgaaaacatccccgccgtgatcgccctgaccgaccccgagggctgcccactgagccggtttaaggatagcctgggaaacccaacccacatcctgagaatcggcgagagctataaggagaagcagcggaccatccaggccaagaaggaggtggagcagcggagagccggcggctacagccggaagtacgccagcaaagccaagaatctggcagacgatatggtgagaaacaccgctagagatctgctgtactacgccgtgacccaggatgccatgctgatcttcgccaacctgagccggggcttcggccggcagggcaagcggaccttcatggccgagagacagtacacacggatggaggactggctgaccgccaagctggcctacgagggcctgagcaagacctacctgtccaagacactggcccagtacacctccaagacatgcagcaactgtgggtttaccatcaccagcgccgactacgacagggtgctggagaagctgaagaagacagcaacaggctggatgaccacaattaacggcaaggagctgaaggtggagggccagattacctactacaacagatacaagagacagaacgtagtcaaggacctgtccgtcgagctggatagactgagcgaagaatctgtgaacaacgacatctcctcctggacaaagggcagaagcggagaagctctgagcctcctgaagaaaagattctcccatagacccgtgcaggagaagttcgtgtgcctgaactgcggcttcgagacacacgcagccgagcaagccgccctgaacatcgccagatcctggctgttcctgcggagccaggagtacaagaaataccagacaaacaagacaaccggcaacaccgataagagagccttcgtcgagacctggcagtccttttaccggaagaagcttaaggaggtgtggaaacctgccgtgcggtctggcggatctggcggaggctccaccagccccaagaaaaagagaaaagtctaagctgccttctgcggggcttgccttctggccatgcccttcttctctcccttgcacctgtacctcttggtctttgaataaagcctgagtaggaaggctagcaaaaaaaaaaaaaaaaaaaaaaaaaaaaaaaaaaaaaaaaaaaaaaaaaaaaaaaaaaaaaaaaaaaaaaaaaaaaaaaagcccagccggctccccaacctctaccgaggagggcacctctgagtccgccacccccgagagcggccctggcacctccaccgagcccagcgagggcagcgcacccggcagccctgccggcagccccacctccacagaggagggaaccagcaccgagcccagcgaaggcagcgccccaggcaccagcaccgagcctagtgagcaggagattaaacggatcaacaagatcagaagaagacttgtgaaagacagcaacaccaagaaggccggcaagacaggccccatgaaaaccctgctggttagagtgatgacacccgatctgagagagcggctggaaaacctgagaaagaagcctgaaaatatcccccagcccatcagcaatacatctagagccaacctgaataagctgctgaccgattacaccgaaatgaagaaggcgatcctgcatgtgtactgggaagagttccagaaggaccctgtgggcctgatgagccgggtggcccagcctgccagcaagaagatcgatcagaacaagctgaaacctgagatggacgagaagggcaacctgaccaccgccggctttgcctgctctcagtgtggccagcccctgttcgtgtacaagctggagcaggtgtctgagaagggcaaggcttacaccaactacttcggacggtgcaatgtggccgagcacgaaaagctgatcctgctggcccagctgaagcccgagaaggatagcgacgaagccgtgacatatagcctgggaaagtttgggcagagggccctggatttctacagcattcatgtgaccaaggagtccacccaccccgtgaagcccctggcccagatcgccggaaacagatacgcctccggacctgtgggaaaggccctgagcgacgcatgtatgggcacaatcgcctccttcctgtctaagtaccaggacatcatcatcgaacaccagaaggtggtgaagggcaaccagaagagactggagagcctgcgggagctggccggcaaggaaaacctggaataccctagcgtgaccctgccacctcagcctcacaccaaggagggcgttgatgcctacaacgaagtgatcgcccgggtgcgaatgtgggtgaacctgaacctgtggcagaagctgaagctaagcagagatgatgccaagcctctgctgagactgaagggattcccttcctttcctctggtcgagagacaggccaacgaagtggactggtgggacatggtgtgtaacgtgaagaagctgatcaacgagaaaaaggaggatggcaaggtgttttggcagaatctggctggctacaagagacaggaagccctgagaccatacctgagcagcgaggaagatcggaagaagggaaagaaattcgctcggtaccagctgggcgacctgctgctgcacctggaaaagaagcacggcgaggactggggaaaggtgtacgacgaggcctgggagcggattgacaagaaagtggaaggcctgagcaagcacatcaagctggaagaggaacggagaagcgaggacgcccagagcaaggccgccctgaccgactggctgcgggctaaggccagcttcgtgatcgagggcctgaaggaggccgacaaggacgagttctgcagatgcgagctgaagctgcagaagtggtacggggacctgcggggaaagcccttcgccatcgaagccgagaacagcatcctggacatcagcggcttcagcaagcagtacaactgtgccttcatctggcagaaggacggcgtgaagaagctgaacctgtacctgatcatcaactacttcaagggcggcaagctgcggttcaagaagatcaaacctgaagccttcgaagccaacagattctacaccgtgatcaacaaaaagagcggcgagatcgtgcccatggaggtgaacttcaacttcgacgaccccaacctgatcatcctgcctctggcctttggcaagagacagggcagagaattcatctggaacgacctgctgtccctggaaaccggcagcctgaagctggccaacggaagagtgatcgagaagacactgtacaacagaagaacccggcaggatgagcctgccctgttcgtggccctgaccttcgagcggcgggaggtcctggactcctccaatatcaaaccaatgaacctgatcggcgtggcaagaggcgaaaacatccccgccgtgatcgccctgaccgaccccgagggctgcccactgagccggtttaaggatagcctgggaaacccaacccacatcctgagaatcggcgagagctataaggagaagcagcggaccatccaggccaagaaggaggtggagcagcggagagccggcggctacagccggaagtacgccagcaaagccaagaatctggcagacgatatggtgagaaacaccgctagagatctgctgtactacgccgtgacccaggatgccatgctgatcttcgccaacctgagccggggcttcggccggcagggcaagcggaccttcatggccgagagacagtacacacggatggaggactggctgaccgccaagctggcctacgagggcctgagcaagacctacctgtccaagacactggcccagtacacctccaagacatgcagcaactgtgggtttaccatcaccagcgccgactacgacagggtgctggagaagctgaagaagacagcaacaggctggatgaccacaattaacggcaaggagctgaaggtggagggccagattacctactacaacagatacaagagacagaacgtagtcaaggacctgtccgtcgagctggatagactgagcgaagaatctgtgaacaacgacatctcctcctggacaaagggcagaagcggagaagctctgagcctcctgaagaaaagattctcccatagacccgtgcaggagaagttcgtgtgcctgaactgcggcttcgagacacacgcagccgagcaagccgccctgaacatcgccagatcctggctgttcctgcggagccaggagtacaagaaataccagacaaacaagacaaccggcaacaccgataagagagccttcgtcgagacctggcagtccttttaccggaagaagcttaaggaggtgtggaaacctgccgtgcggtctggcggatctggcggaggctccaccagccccaagaaaaagagaaaagtctaagctgccttctgcggggcttgccttctggccatgcccttcttctctcccttgcacctgtacctcttggtctttgaataaagcctgagtaggaaggctagcaaaaaaaaaaaaaaaaaaaaaaaaaaaaaaaaaaaaaaaaaaaaaaaaaaaaaaaaaaaaaaaaaaaaaaaaaaaaaaaa

SEQ ID NO: 8923 - RNA, 8787 nt, synthetic construct
  source 1..8787: mol_type = other RNA
aggaaataagagagaaaagaagagtaagaagaaatataagagccaccatggcccctaagaagaagcgtaaagtgagccggatgaaccacgaccaggagttcgacccccctaaggtgtaccctcccgtccccgccgagaagagaaagcccatccgggtcctgagcctgttcgatggcatcgccaccggtctgctggtgctgaaggacctgggcatccaggtggataggtacattgcctccgaggtgtgcgaggactccatcaccgtgggaatggtgcgtcatcagggcaagatcatgtacgtgggcgacgtgcggagcgtgacacagaagcatatccaggagtggggccctttcgacctggtgatcggcggcagcccttgcaatgacctgagcatcgtgaacccagcccggaagggcctgtacgagggaaccggcagactgttcttcgagttttacagactgctgcacgacgcccggcctaaggaaggcgacgaccggcccttcttttggctgttcgagaatgtggtggccatgggagtcagcgacaagcgggatattagccggttcctggagagcaaccccgtgatgatcgatgccaaggaagtgagcgccgcccaccgggccagatacttctggggcaatctgcctggcatgaacagacccctggccagcaccgtgaacgacaagctggagctgcaggagtgcctggagcacggccggatcgccaagttcagcaaggtgagaaccatcaccacccgaagcaacagcatcaaacaaggcaaggaccagcactttcctgtgttcatgaacgagaaggaggacatcctgtggtgtaccgagatggagagagtgttcgggttcccagtccactacacagatgtcagcaacatgtctagactggccagacagagactgctgggaagaagctggtccgtccctgtgatcagacacctgttcgcccctctgaaggagtacttcgcctgcgtgagcagcggcaacagcaacgccaacagccggggccccagcttctctagcggcctggtgccactgtccctgagagggagccacatgggccccatggagatctacaaaaccgtgagcgcctggaagcggcagcctgtgcgcgtgctgagcctgtttcggaatatcgataaagtcctgaaaagcctgggattcctggagagcggctctggctccggcggtggcaccctgaagtacgtggaggatgtgacaaacgtggtcagacgggatgtggagaagtggggccccttcgatctggtgtacggcagcacccaacccctgggcagctcttgtgaccggtgccctggctggtacatgtttcagttccaccggatcctgcagtacgccctgccgagacaggagtcccagcggccattcttttggattttcatggacaacttgctgctgaccgaggatgaccaggaaactaccactcggttcctgcagaccgaagccgtgaccctgcaggacgtgagaggccgggactaccagaacgccatgcgggtgtggtccaacatccctggactgaaaagcaagcacgcacctctgacccctaaagaagaggagtacctgcaggcccaggtgcggagcagaagcaagctggacgcccctaaggtggatctgctggtgaagaattgcctcctgcccctgagagagtacttcaagtatttcagccagaatagtctgcccctgggaggcagcggcggcggcatggccttcgaggacgtggccgtgtacttcagccaggaggagtggggcctgctggacaccgcccagagggccctgtacaggagggtgatgctggagaacttcaccctggtgaccagcctgggcctgagcaccagcaggccccacgtggtgatccagctggagaggggcgaggagccctgggtgcccagcggcaaggacatgaccctggccaggaacacctacaggaggctgaacgccggcgagggcggcccaagcagcggcgcccctcctcccagcggcggcaggcggcccaagcagcggcgcccctcctcccagcggcggcagcccagccggctccccaacctctaccgaggagggcacctctgagtccgccacccccgagagcggccctggcacctccaccgagcccagcgagggcagcgcacccggcagccctgccggcagccccacctccacagaggagggaaccagcaccgagcccagcgaaggcagcgccccaggcaccagcaccgagcctagtgagcaggagattaaacggatcaacaagatcagaagaagacttgtgaaagacagcaacaccaagaaggccggcaagacaggccccatgaaaaccctgctggttagagtgatgacacccgatctgagagagcggctggaaaacctgagaaagaagcctgaaaatatcccccagcccatcagcaatacatctagagccaacctgaataagctgctgaccgattacaccgaaatgaagaaggcgatcctgcatgtgtactgggaagagttccagaaggaccctgtgggcctgatgagccgggtggcccagcctgccagcaagaagatcgatcagaacaagctgaaacctgagatggacgagaagggcaacctgaccaccgccggctttgcctgctctcagtgtggccagcccctgttcgtgtacaagctggagcaggtgtctgagaagggcaaggcttacaccaactacttcggacggtgcaatgtggccgagcacgaaaagctgatcctgctggcccagctgaagcccgagaaggatagcgacgaagccgtgacatatagcctgggaaagtttgggcagagggccctggatttctacagcattcatgtgaccaaggagtccacccaccccgtgaagcccctggcccagatcgccggaaacagatacgcctccggacctgtgggaaaggccctgagcgacgcatgtatgggcacaatcgcctccttcctgtctaagtaccaggacatcatcatcgaacaccagaaggtggtgaagggcaaccagaagagactggagagcctgcgggagctggccggcaaggaaaacctggaataccctagcgtgaccctgccacctcagcctcacaccaaggagggcgttgatgcctacaacgaagtgatcgcccgggtgcgaatgtgggtgaacctgaacctgtggcagaagctgaagctaagcagagatgatgccaagcctctgctgagactgaagggattcccttcctttcctctggtcgagagacaggccaacgaagtggactggtgggacatggtgtgtaacgtgaagaagctgatcaacgagaaaaaggaggatggcaaggtgttttggcagaatctggctggctacaagagacaggaagccctgagaccatacctgagcagcgaggaagatcggaagaagggaaagaaattcgctcggtaccagctgggcgacctgctgctgcacctggaaaagaagcacggcgaggactggggaaaggtgtacgacgaggcctgggagcggattgacaagaaagtggaaggcctgagcaagcacatcaagctggaagaggaacggagaagcgaggacgcccagagcaaggccgccctgaccgactggctgcgggctaaggccagcttcgtgatcgagggcctgaaggaggccgacaaggacgagttctgcagatgcgagctgaagctgcagaagtggtacggggacctgcggggaaagcccttcgccatcgaagccgagaacagcatcctggacatcagcggcttcagcaagcagtacaactgtgccttcatctggcagaaggacggcgtgaagaagctgaacctgtacctgatcatcaactacttcaagggcggcaagctgcggttcaagaagatcaaacctgaagccttcgaagccaacagattctacaccgtgatcaacaaaaagagcggcgagatcgtgcccatggaggtgaacttcaacttcgacgaccccaacctgatcatcctgcctctggcctttggcaagagacagggcagagaattcatctggaacgacctgctgtccctggaaaccggcagcctgaagctggccaacggaagagtgatcgagaagacactgtacaacagaagaacccggcaggatgagcctgccctgttcgtggccctgaccttcgagcggcgggaggtcctggactcctccaatatcaaaccaatgaacctgatcggcgtggcaagaggcgaaaacatccccgccgtgatcgccctgaccgaccccgagggctgcccactgagccggtttaaggatagcctgggaaacccaacccacatcctgagaatcggcgagagctataaggagaagcagcggaccatccaggccaagaaggaggtggagcagcggagagccggcggctacagccggaagtacgccagcaaagccaagaatctggcagacgatatggtgagaaacaccgctagagatctgctgtactacgccgtgacccaggatgccatgctgatcttcgccaacctgagccggggcttcggccggcagggcaagcggaccttcatggccgagagacagtacacacggatggaggactggctgaccgccaagctggcctacgagggcctgagcaagacctacctgtccaagacactggcccagtacacctccaagacatgcagcaactgtgggtttaccatcaccagcgccgactacgacagggtgctggagaagctgaagaagacagcaacaggctggatgaccacaattaacggcaaggagctgaaggtggagggccagattacctactacaacagatacaagagacagaacgtagtcaaggacctgtccgtcgagctggatagactgagcgaagaatctgtgaacaacgacatctcctcctggacaaagggcagaagcggagaagctctgagcctcctgaagaaaagattctcccatagacccgtgcaggagaagttcgtgtgcctgaactgcggcttcgagacacacgcagccgagcaagccgccctgaacatcgccagatcctggctgttcctgcggagccaggagtacaagaaataccagacaaacaagacaaccggcaacaccgataagagagccttcgtcgagacctggcagtccttttaccggaagaagcttaaggaggtgtggaaacctgccgtgcggtctggcggatctggcggaggctccaccagccccaagaaaaagagaaaagtctaagctgccttctgcggggcttgccttctggccatgcccttcttctctcccttgcacctgtacctcttggtctttgaataaagcctgagtaggaaggctagcaaaaaaaaaaaaaaaaaaaaaaaaaaaaaaaaaaaaaaaaaaaaaaaaaaaaaaaaaaaaaaaaaaaaaaaaaaaaaaaagcccagccggctccccaacctctaccgaggagggcacctctgagtccgccacccccgagagcggccctggcacctccaccgagcccagcgagggcagcgcacccggcagccctgccggcagccccacctccacagaggagggaaccagcaccgagcccagcgaaggcagcgccccaggcaccagcaccgagcctagtgagcaggagattaaacggatcaacaagatcagaagaagacttgtgaaagacagcaacaccaagaaggccggcaagacaggccccatgaaaaccctgctggttagagtgatgacacccgatctgagagagcggctggaaaacctgagaaagaagcctgaaaatatcccccagcccatcagcaatacatctagagccaacctgaataagctgctgaccgattacaccgaaatgaagaaggcgatcctgcatgtgtactgggaagagttccagaaggaccctgtgggcctgatgagccgggtggcccagcctgccagcaagaagatcgatcagaacaagctgaaacctgagatggacgagaagggcaacctgaccaccgccggctttgcctgctctcagtgtggccagcccctgttcgtgtacaagctggagcaggtgtctgagaagggcaaggcttacaccaactacttcggacggtgcaatgtggccgagcacgaaaagctgatcctgctggcccagctgaagcccgagaaggatagcgacgaagccgtgacatatagcctgggaaagtttgggcagagggccctggatttctacagcattcatgtgaccaaggagtccacccaccccgtgaagcccctggcccagatcgccggaaacagatacgcctccggacctgtgggaaaggccctgagcgacgcatgtatgggcacaatcgcctccttcctgtctaagtaccaggacatcatcatcgaacaccagaaggtggtgaagggcaaccagaagagactggagagcctgcgggagctggccggcaaggaaaacctggaataccctagcgtgaccctgccacctcagcctcacaccaaggagggcgttgatgcctacaacgaagtgatcgcccgggtgcgaatgtgggtgaacctgaacctgtggcagaagctgaagctaagcagagatgatgccaagcctctgctgagactgaagggattcccttcctttcctctggtcgagagacaggccaacgaagtggactggtgggacatggtgtgtaacgtgaagaagctgatcaacgagaaaaaggaggatggcaaggtgttttggcagaatctggctggctacaagagacaggaagccctgagaccatacctgagcagcgaggaagatcggaagaagggaaagaaattcgctcggtaccagctgggcgacctgctgctgcacctggaaaagaagcacggcgaggactggggaaaggtgtacgacgaggcctgggagcggattgacaagaaagtggaaggcctgagcaagcacatcaagctggaagaggaacggagaagcgaggacgcccagagcaaggccgccctgaccgactggctgcgggctaaggccagcttcgtgatcgagggcctgaaggaggccgacaaggacgagttctgcagatgcgagctgaagctgcagaagtggtacggggacctgcggggaaagcccttcgccatcgaagccgagaacagcatcctggacatcagcggcttcagcaagcagtacaactgtgccttcatctggcagaaggacggcgtgaagaagctgaacctgtacctgatcatcaactacttcaagggcggcaagctgcggttcaagaagatcaaacctgaagccttcgaagccaacagattctacaccgtgatcaacaaaaagagcggcgagatcgtgcccatggaggtgaacttcaacttcgacgaccccaacctgatcatcctgcctctggcctttggcaagagacagggcagagaattcatctggaacgacctgctgtccctggaaaccggcagcctgaagctggccaacggaagagtgatcgagaagacactgtacaacagaagaacccggcaggatgagcctgccctgttcgtggccctgaccttcgagcggcgggaggtcctggactcctccaatatcaaaccaatgaacctgatcggcgtggcaagaggcgaaaacatccccgccgtgatcgccctgaccgaccccgagggctgcccactgagccggtttaaggatagcctgggaaacccaacccacatcctgagaatcggcgagagctataaggagaagcagcggaccatccaggccaagaaggaggtggagcagcggagagccggcggctacagccggaagtacgccagcaaagccaagaatctggcagacgatatggtgagaaacaccgctagagatctgctgtactacgccgtgacccaggatgccatgctgatcttcgccaacctgagccggggcttcggccggcagggcaagcggaccttcatggccgagagacagtacacacggatggaggactggctgaccgccaagctggcctacgagggcctgagcaagacctacctgtccaagacactggcccagtacacctccaagacatgcagcaactgtgggtttaccatcaccagcgccgactacgacagggtgctggagaagctgaagaagacagcaacaggctggatgaccacaattaacggcaaggagctgaaggtggagggccagattacctactacaacagatacaagagacagaacgtagtcaaggacctgtccgtcgagctggatagactgagcgaagaatctgtgaacaacgacatctcctcctggacaaagggcagaagcggagaagctctgagcctcctgaagaaaagattctcccatagacccgtgcaggagaagttcgtgtgcctgaactgcggcttcgagacacacgcagccgagcaagccgccctgaacatcgccagatcctggctgttcctgcggagccaggagtacaagaaataccagacaaacaagacaaccggcaacaccgataagagagccttcgtcgagacctggcagtccttttaccggaagaagcttaaggaggtgtggaaacctgccgtgcggtctggcggatctggcggaggctccaccagccccaagaaaaagagaaaagtctaagctgccttctgcggggcttgccttctggccatgcccttcttctctcccttgcacctgtacctcttggtctttgaataaagcctgagtaggaaggctagcaaaaaaaaaaaaaaaaaaaaaaaaaaaaaaaaaaaaaaaaaaaaaaaaaaaaaaaaaaaaaaaaaaaaaaaaaaaaaaaa

SEQ ID NO: 8924 - RNA, 8787 nt, synthetic construct
  source 1..8787: mol_type = other RNA
aggaaataagagagaaaagaagagtaagaagaaatataagagccaccatggcccctaagaagaagcgtaaagtgagccggatgaaccacgaccaggagttcgacccccctaaggtgtaccctcccgtccccgccgagaagagaaagcccatccgggtcctgagcctgttcgatggcatcgccaccggtctgctggtgctgaaggacctgggcatccaggtggataggtacattgcctccgaggtgtgcgaggactccatcaccgtgggaatggtgcgtcatcagggcaagatcatgtacgtgggcgacgtgcggagcgtgacacagaagcatatccaggagtggggccctttcgacctggtgatcggcggcagcccttgcaatgacctgagcatcgtgaacccagcccggaagggcctgtacgagggaaccggcagactgttcttcgagttttacagactgctgcacgacgcccggcctaaggaaggcgacgaccggcccttcttttggctgttcgagaatgtggtggccatgggagtcagcgacaagcgggatattagccggttcctggagagcaaccccgtgatgatcgatgccaaggaagtgagcgccgcccaccgggccagatacttctggggcaatctgcctggcatgaacagacccctggccagcaccgtgaacgacaagctggagctgcaggagtgcctggagcacggccggatcgccaagttcagcaaggtgagaaccatcaccacccgaagcaacagcatcaaacaaggcaaggaccagcactttcctgtgttcatgaacgagaaggaggacatcctgtggtgtaccgagatggagagagtgttcgggttcccagtccactacacagatgtcagcaacatgtctagactggccagacagagactgctgggaagaagctggtccgtccctgtgatcagacacctgttcgcccctctgaaggagtacttcgcctgcgtgagcagcggcaacagcaacgccaacagccggggccccagcttctctagcggcctggtgccactgtccctgagagggagccacatgggccccatggagatctacaaaaccgtgagcgcctggaagcggcagcctgtgcgcgtgctgagcctgtttcggaatatcgataaagtcctgaaaagcctgggattcctggagagcggctctggctccggcggtggcaccctgaagtacgtggaggatgtgacaaacgtggtcagacgggatgtggagaagtggggccccttcgatctggtgtacggcagcacccaacccctgggcagctcttgtgaccggtgccctggctggtacatgtttcagttccaccggatcctgcagtacgccctgccgagacaggagtcccagcggccattcttttggattttcatggacaacttgctgctgaccgaggatgaccaggaaactaccactcggttcctgcagaccgaagccgtgaccctgcaggacgtgagaggccgggactaccagaacgccatgcgggtgtggtccaacatccctggactgaaaagcaagcacgcacctctgacccctaaagaagaggagtacctgcaggcccaggtgcggagcagaagcaagctggacgcccctaaggtggatctgctggtgaagaattgcctcctgcccctgagagagtacttcaagtatttcagccagaatagtctgcccctgggaggcagcggcggcggcatggccttcgaggacgtggccgtgtacttcagccaggaggagtggggcctgctggacaccgcccagagggccctgtacaggagggtgatgctggacaacttcgccctggtggccagcctgggcctgagcaccagcaggcccagggtggtgatccagctggagaggggcgaggagccctgggtgcccagcggcaccgacaccgtgctgagcaggaacacctacaggaggaggaaccccggcagcggcggcccaagcagcggcgcccctcctcccagcggcggcaggcggcccaagcagcggcgcccctcctcccagcggcggcagcccagccggctccccaacctctaccgaggagggcacctctgagtccgccacccccgagagcggccctggcacctccaccgagcccagcgagggcagcgcacccggcagccctgccggcagccccacctccacagaggagggaaccagcaccgagcccagcgaaggcagcgccccaggcaccagcaccgagcctagtgagcaggagattaaacggatcaacaagatcagaagaagacttgtgaaagacagcaacaccaagaaggccggcaagacaggccccatgaaaaccctgctggttagagtgatgacacccgatctgagagagcggctggaaaacctgagaaagaagcctgaaaatatcccccagcccatcagcaatacatctagagccaacctgaataagctgctgaccgattacaccgaaatgaagaaggcgatcctgcatgtgtactgggaagagttccagaaggaccctgtgggcctgatgagccgggtggcccagcctgccagcaagaagatcgatcagaacaagctgaaacctgagatggacgagaagggcaacctgaccaccgccggctttgcctgctctcagtgtggccagcccctgttcgtgtacaagctggagcaggtgtctgagaagggcaaggcttacaccaactacttcggacggtgcaatgtggccgagcacgaaaagctgatcctgctggcccagctgaagcccgagaaggatagcgacgaagccgtgacatatagcctgggaaagtttgggcagagggccctggatttctacagcattcatgtgaccaaggagtccacccaccccgtgaagcccctggcccagatcgccggaaacagatacgcctccggacctgtgggaaaggccctgagcgacgcatgtatgggcacaatcgcctccttcctgtctaagtaccaggacatcatcatcgaacaccagaaggtggtgaagggcaaccagaagagactggagagcctgcgggagctggccggcaaggaaaacctggaataccctagcgtgaccctgccacctcagcctcacaccaaggagggcgttgatgcctacaacgaagtgatcgcccgggtgcgaatgtgggtgaacctgaacctgtggcagaagctgaagctaagcagagatgatgccaagcctctgctgagactgaagggattcccttcctttcctctggtcgagagacaggccaacgaagtggactggtgggacatggtgtgtaacgtgaagaagctgatcaacgagaaaaaggaggatggcaaggtgttttggcagaatctggctggctacaagagacaggaagccctgagaccatacctgagcagcgaggaagatcggaagaagggaaagaaattcgctcggtaccagctgggcgacctgctgctgcacctggaaaagaagcacggcgaggactggggaaaggtgtacgacgaggcctgggagcggattgacaagaaagtggaaggcctgagcaagcacatcaagctggaagaggaacggagaagcgaggacgcccagagcaaggccgccctgaccgactggctgcgggctaaggccagcttcgtgatcgagggcctgaaggaggccgacaaggacgagttctgcagatgcgagctgaagctgcagaagtggtacggggacctgcggggaaagcccttcgccatcgaagccgagaacagcatcctggacatcagcggcttcagcaagcagtacaactgtgccttcatctggcagaaggacggcgtgaagaagctgaacctgtacctgatcatcaactacttcaagggcggcaagctgcggttcaagaagatcaaacctgaagccttcgaagccaacagattctacaccgtgatcaacaaaaagagcggcgagatcgtgcccatggaggtgaacttcaacttcgacgaccccaacctgatcatcctgcctctggcctttggcaagagacagggcagagaattcatctggaacgacctgctgtccctggaaaccggcagcctgaagctggccaacggaagagtgatcgagaagacactgtacaacagaagaacccggcaggatgagcctgccctgttcgtggccctgaccttcgagcggcgggaggtcctggactcctccaatatcaaaccaatgaacctgatcggcgtggcaagaggcgaaaacatccccgccgtgatcgccctgaccgaccccgagggctgcccactgagccggtttaaggatagcctgggaaacccaacccacatcctgagaatcggcgagagctataaggagaagcagcggaccatccaggccaagaaggaggtggagcagcggagagccggcggctacagccggaagtacgccagcaaagccaagaatctggcagacgatatggtgagaaacaccgctagagatctgctgtactacgccgtgacccaggatgccatgctgatcttcgccaacctgagccggggcttcggccggcagggcaagcggaccttcatggccgagagacagtacacacggatggaggactggctgaccgccaagctggcctacgagggcctgagcaagacctacctgtccaagacactggcccagtacacctccaagacatgcagcaactgtgggtttaccatcaccagcgccgactacgacagggtgctggagaagctgaagaagacagcaacaggctggatgaccacaattaacggcaaggagctgaaggtggagggccagattacctactacaacagatacaagagacagaacgtagtcaaggacctgtccgtcgagctggatagactgagcgaagaatctgtgaacaacgacatctcctcctggacaaagggcagaagcggagaagctctgagcctcctgaagaaaagattctcccatagacccgtgcaggagaagttcgtgtgcctgaactgcggcttcgagacacacgcagccgagcaagccgccctgaacatcgccagatcctggctgttcctgcggagccaggagtacaagaaataccagacaaacaagacaaccggcaacaccgataagagagccttcgtcgagacctggcagtccttttaccggaagaagcttaaggaggtgtggaaacctgccgtgcggtctggcggatctggcggaggctccaccagccccaagaaaaagagaaaagtctaagctgccttctgcggggcttgccttctggccatgcccttcttctctcccttgcacctgtacctcttggtctttgaataaagcctgagtaggaaggctagcaaaaaaaaaaaaaaaaaaaaaaaaaaaaaaaaaaaaaaaaaaaaaaaaaaaaaaaaaaaaaaaaaaaaaaaaaaaaaaaagcccagccggctccccaacctctaccgaggagggcacctctgagtccgccacccccgagagcggccctggcacctccaccgagcccagcgagggcagcgcacccggcagccctgccggcagccccacctccacagaggagggaaccagcaccgagcccagcgaaggcagcgccccaggcaccagcaccgagcctagtgagcaggagattaaacggatcaacaagatcagaagaagacttgtgaaagacagcaacaccaagaaggccggcaagacaggccccatgaaaaccctgctggttagagtgatgacacccgatctgagagagcggctggaaaacctgagaaagaagcctgaaaatatcccccagcccatcagcaatacatctagagccaacctgaataagctgctgaccgattacaccgaaatgaagaaggcgatcctgcatgtgtactgggaagagttccagaaggaccctgtgggcctgatgagccgggtggcccagcctgccagcaagaagatcgatcagaacaagctgaaacctgagatggacgagaagggcaacctgaccaccgccggctttgcctgctctcagtgtggccagcccctgttcgtgtacaagctggagcaggtgtctgagaagggcaaggcttacaccaactacttcggacggtgcaatgtggccgagcacgaaaagctgatcctgctggcccagctgaagcccgagaaggatagcgacgaagccgtgacatatagcctgggaaagtttgggcagagggccctggatttctacagcattcatgtgaccaaggagtccacccaccccgtgaagcccctggcccagatcgccggaaacagatacgcctccggacctgtgggaaaggccctgagcgacgcatgtatgggcacaatcgcctccttcctgtctaagtaccaggacatcatcatcgaacaccagaaggtggtgaagggcaaccagaagagactggagagcctgcgggagctggccggcaaggaaaacctggaataccctagcgtgaccctgccacctcagcctcacaccaaggagggcgttgatgcctacaacgaagtgatcgcccgggtgcgaatgtgggtgaacctgaacctgtggcagaagctgaagctaagcagagatgatgccaagcctctgctgagactgaagggattcccttcctttcctctggtcgagagacaggccaacgaagtggactggtgggacatggtgtgtaacgtgaagaagctgatcaacgagaaaaaggaggatggcaaggtgttttggcagaatctggctggctacaagagacaggaagccctgagaccatacctgagcagcgaggaagatcggaagaagggaaagaaattcgctcggtaccagctgggcgacctgctgctgcacctggaaaagaagcacggcgaggactggggaaaggtgtacgacgaggcctgggagcggattgacaagaaagtggaaggcctgagcaagcacatcaagctggaagaggaacggagaagcgaggacgcccagagcaaggccgccctgaccgactggctgcgggctaaggccagcttcgtgatcgagggcctgaaggaggccgacaaggacgagttctgcagatgcgagctgaagctgcagaagtggtacggggacctgcggggaaagcccttcgccatcgaagccgagaacagcatcctggacatcagcggcttcagcaagcagtacaactgtgccttcatctggcagaaggacggcgtgaagaagctgaacctgtacctgatcatcaactacttcaagggcggcaagctgcggttcaagaagatcaaacctgaagccttcgaagccaacagattctacaccgtgatcaacaaaaagagcggcgagatcgtgcccatggaggtgaacttcaacttcgacgaccccaacctgatcatcctgcctctggcctttggcaagagacagggcagagaattcatctggaacgacctgctgtccctggaaaccggcagcctgaagctggccaacggaagagtgatcgagaagacactgtacaacagaagaacccggcaggatgagcctgccctgttcgtggccctgaccttcgagcggcgggaggtcctggactcctccaatatcaaaccaatgaacctgatcggcgtggcaagaggcgaaaacatccccgccgtgatcgccctgaccgaccccgagggctgcccactgagccggtttaaggatagcctgggaaacccaacccacatcctgagaatcggcgagagctataaggagaagcagcggaccatccaggccaagaaggaggtggagcagcggagagccggcggctacagccggaagtacgccagcaaagccaagaatctggcagacgatatggtgagaaacaccgctagagatctgctgtactacgccgtgacccaggatgccatgctgatcttcgccaacctgagccggggcttcggccggcagggcaagcggaccttcatggccgagagacagtacacacggatggaggactggctgaccgccaagctggcctacgagggcctgagcaagacctacctgtccaagacactggcccagtacacctccaagacatgcagcaactgtgggtttaccatcaccagcgccgactacgacagggtgctggagaagctgaagaagacagcaacaggctggatgaccacaattaacggcaaggagctgaaggtggagggccagattacctactacaacagatacaagagacagaacgtagtcaaggacctgtccgtcgagctggatagactgagcgaagaatctgtgaacaacgacatctcctcctggacaaagggcagaagcggagaagctctgagcctcctgaagaaaagattctcccatagacccgtgcaggagaagttcgtgtgcctgaactgcggcttcgagacacacgcagccgagcaagccgccctgaacatcgccagatcctggctgttcctgcggagccaggagtacaagaaataccagacaaacaagacaaccggcaacaccgataagagagccttcgtcgagacctggcagtccttttaccggaagaagcttaaggaggtgtggaaacctgccgtgcggtctggcggatctggcggaggctccaccagccccaagaaaaagagaaaagtctaagctgccttctgcggggcttgccttctggccatgcccttcttctctcccttgcacctgtacctcttggtctttgaataaagcctgagtaggaaggctagcaaaaaaaaaaaaaaaaaaaaaaaaaaaaaaaaaaaaaaaaaaaaaaaaaaaaaaaaaaaaaaaaaaaaaaaaaaaaaaaa

SEQ ID NO: 8925 - RNA, 8787 nt, synthetic construct
  source 1..8787: mol_type = other RNA
aggaaataagagagaaaagaagagtaagaagaaatataagagccaccatggcccctaagaagaagcgtaaagtgagccggatgaaccacgaccaggagttcgacccccctaaggtgtaccctcccgtccccgccgagaagagaaagcccatccgggtcctgagcctgttcgatggcatcgccaccggtctgctggtgctgaaggacctgggcatccaggtggataggtacattgcctccgaggtgtgcgaggactccatcaccgtgggaatggtgcgtcatcagggcaagatcatgtacgtgggcgacgtgcggagcgtgacacagaagcatatccaggagtggggccctttcgacctggtgatcggcggcagcccttgcaatgacctgagcatcgtgaacccagcccggaagggcctgtacgagggaaccggcagactgttcttcgagttttacagactgctgcacgacgcccggcctaaggaaggcgacgaccggcccttcttttggctgttcgagaatgtggtggccatgggagtcagcgacaagcgggatattagccggttcctggagagcaaccccgtgatgatcgatgccaaggaagtgagcgccgcccaccgggccagatacttctggggcaatctgcctggcatgaacagacccctggccagcaccgtgaacgacaagctggagctgcaggagtgcctggagcacggccggatcgccaagttcagcaaggtgagaaccatcaccacccgaagcaacagcatcaaacaaggcaaggaccagcactttcctgtgttcatgaacgagaaggaggacatcctgtggtgtaccgagatggagagagtgttcgggttcccagtccactacacagatgtcagcaacatgtctagactggccagacagagactgctgggaagaagctggtccgtccctgtgatcagacacctgttcgcccctctgaaggagtacttcgcctgcgtgagcagcggcaacagcaacgccaacagccggggccccagcttctctagcggcctggtgccactgtccctgagagggagccacatgggccccatggagatctacaaaaccgtgagcgcctggaagcggcagcctgtgcgcgtgctgagcctgtttcggaatatcgataaagtcctgaaaagcctgggattcctggagagcggctctggctccggcggtggcaccctgaagtacgtggaggatgtgacaaacgtggtcagacgggatgtggagaagtggggccccttcgatctggtgtacggcagcacccaacccctgggcagctcttgtgaccggtgccctggctggtacatgtttcagttccaccggatcctgcagtacgccctgccgagacaggagtcccagcggccattcttttggattttcatggacaacttgctgctgaccgaggatgaccaggaaactaccactcggttcctgcagaccgaagccgtgaccctgcaggacgtgagaggccgggactaccagaacgccatgcgggtgtggtccaacatccctggactgaaaagcaagcacgcacctctgacccctaaagaagaggagtacctgcaggcccaggtgcggagcagaagcaagctggacgcccctaaggtggatctgctggtgaagaattgcctcctgcccctgagagagtacttcaagtatttcagccagaatagtctgcccctgggaggcagcggcggcggcaagcccggcgccgtgagcttcgccgacgtggccgtgtacttcagccccgaggagtggggctgcctgaggcccgcccagagggccctgtacagggacgtgatgagggagacctacggccacctgggcgccctgggcttccccggccccaagcccgccctgatcagctggatggagcaggagaccgaggcctggagccccgccgcccaggaccccgagaagggcgagaggctgggcggcgccaggggcggcccaagcagcggcgcccctcctcccagcggcggcaggcggcccaagcagcggcgcccctcctcccagcggcggcagcccagccggctccccaacctctaccgaggagggcacctctgagtccgccacccccgagagcggccctggcacctccaccgagcccagcgagggcagcgcacccggcagccctgccggcagccccacctccacagaggagggaaccagcaccgagcccagcgaaggcagcgccccaggcaccagcaccgagcctagtgagcaggagattaaacggatcaacaagatcagaagaagacttgtgaaagacagcaacaccaagaaggccggcaagacaggccccatgaaaaccctgctggttagagtgatgacacccgatctgagagagcggctggaaaacctgagaaagaagcctgaaaatatcccccagcccatcagcaatacatctagagccaacctgaataagctgctgaccgattacaccgaaatgaagaaggcgatcctgcatgtgtactgggaagagttccagaaggaccctgtgggcctgatgagccgggtggcccagcctgccagcaagaagatcgatcagaacaagctgaaacctgagatggacgagaagggcaacctgaccaccgccggctttgcctgctctcagtgtggccagcccctgttcgtgtacaagctggagcaggtgtctgagaagggcaaggcttacaccaactacttcggacggtgcaatgtggccgagcacgaaaagctgatcctgctggcccagctgaagcccgagaaggatagcgacgaagccgtgacatatagcctgggaaagtttgggcagagggccctggatttctacagcattcatgtgaccaaggagtccacccaccccgtgaagcccctggcccagatcgccggaaacagatacgcctccggacctgtgggaaaggccctgagcgacgcatgtatgggcacaatcgcctccttcctgtctaagtaccaggacatcatcatcgaacaccagaaggtggtgaagggcaaccagaagagactggagagcctgcgggagctggccggcaaggaaaacctggaataccctagcgtgaccctgccacctcagcctcacaccaaggagggcgttgatgcctacaacgaagtgatcgcccgggtgcgaatgtgggtgaacctgaacctgtggcagaagctgaagctaagcagagatgatgccaagcctctgctgagactgaagggattcccttcctttcctctggtcgagagacaggccaacgaagtggactggtgggacatggtgtgtaacgtgaagaagctgatcaacgagaaaaaggaggatggcaaggtgttttggcagaatctggctggctacaagagacaggaagccctgagaccatacctgagcagcgaggaagatcggaagaagggaaagaaattcgctcggtaccagctgggcgacctgctgctgcacctggaaaagaagcacggcgaggactggggaaaggtgtacgacgaggcctgggagcggattgacaagaaagtggaaggcctgagcaagcacatcaagctggaagaggaacggagaagcgaggacgcccagagcaaggccgccctgaccgactggctgcgggctaaggccagcttcgtgatcgagggcctgaaggaggccgacaaggacgagttctgcagatgcgagctgaagctgcagaagtggtacggggacctgcggggaaagcccttcgccatcgaagccgagaacagcatcctggacatcagcggcttcagcaagcagtacaactgtgccttcatctggcagaaggacggcgtgaagaagctgaacctgtacctgatcatcaactacttcaagggcggcaagctgcggttcaagaagatcaaacctgaagccttcgaagccaacagattctacaccgtgatcaacaaaaagagcggcgagatcgtgcccatggaggtgaacttcaacttcgacgaccccaacctgatcatcctgcctctggcctttggcaagagacagggcagagaattcatctggaacgacctgctgtccctggaaaccggcagcctgaagctggccaacggaagagtgatcgagaagacactgtacaacagaagaacccggcaggatgagcctgccctgttcgtggccctgaccttcgagcggcgggaggtcctggactcctccaatatcaaaccaatgaacctgatcggcgtggcaagaggcgaaaacatccccgccgtgatcgccctgaccgaccccgagggctgcccactgagccggtttaaggatagcctgggaaacccaacccacatcctgagaatcggcgagagctataaggagaagcagcggaccatccaggccaagaaggaggtggagcagcggagagccggcggctacagccggaagtacgccagcaaagccaagaatctggcagacgatatggtgagaaacaccgctagagatctgctgtactacgccgtgacccaggatgccatgctgatcttcgccaacctgagccggggcttcggccggcagggcaagcggaccttcatggccgagagacagtacacacggatggaggactggctgaccgccaagctggcctacgagggcctgagcaagacctacctgtccaagacactggcccagtacacctccaagacatgcagcaactgtgggtttaccatcaccagcgccgactacgacagggtgctggagaagctgaagaagacagcaacaggctggatgaccacaattaacggcaaggagctgaaggtggagggccagattacctactacaacagatacaagagacagaacgtagtcaaggacctgtccgtcgagctggatagactgagcgaagaatctgtgaacaacgacatctcctcctggacaaagggcagaagcggagaagctctgagcctcctgaagaaaagattctcccatagacccgtgcaggagaagttcgtgtgcctgaactgcggcttcgagacacacgcagccgagcaagccgccctgaacatcgccagatcctggctgttcctgcggagccaggagtacaagaaataccagacaaacaagacaaccggcaacaccgataagagagccttcgtcgagacctggcagtccttttaccggaagaagcttaaggaggtgtggaaacctgccgtgcggtctggcggatctggcggaggctccaccagccccaagaaaaagagaaaagtctaagctgccttctgcggggcttgccttctggccatgcccttcttctctcccttgcacctgtacctcttggtctttgaataaagcctgagtaggaaggctagcaaaaaaaaaaaaaaaaaaaaaaaaaaaaaaaaaaaaaaaaaaaaaaaaaaaaaaaaaaaaaaaaaaaaaaaaaaaaaaaagcccagccggctccccaacctctaccgaggagggcacctctgagtccgccacccccgagagcggccctggcacctccaccgagcccagcgagggcagcgcacccggcagccctgccggcagccccacctccacagaggagggaaccagcaccgagcccagcgaaggcagcgccccaggcaccagcaccgagcctagtgagcaggagattaaacggatcaacaagatcagaagaagacttgtgaaagacagcaacaccaagaaggccggcaagacaggccccatgaaaaccctgctggttagagtgatgacacccgatctgagagagcggctggaaaacctgagaaagaagcctgaaaatatcccccagcccatcagcaatacatctagagccaacctgaataagctgctgaccgattacaccgaaatgaagaaggcgatcctgcatgtgtactgggaagagttccagaaggaccctgtgggcctgatgagccgggtggcccagcctgccagcaagaagatcgatcagaacaagctgaaacctgagatggacgagaagggcaacctgaccaccgccggctttgcctgctctcagtgtggccagcccctgttcgtgtacaagctggagcaggtgtctgagaagggcaaggcttacaccaactacttcggacggtgcaatgtggccgagcacgaaaagctgatcctgctggcccagctgaagcccgagaaggatagcgacgaagccgtgacatatagcctgggaaagtttgggcagagggccctggatttctacagcattcatgtgaccaaggagtccacccaccccgtgaagcccctggcccagatcgccggaaacagatacgcctccggacctgtgggaaaggccctgagcgacgcatgtatgggcacaatcgcctccttcctgtctaagtaccaggacatcatcatcgaacaccagaaggtggtgaagggcaaccagaagagactggagagcctgcgggagctggccggcaaggaaaacctggaataccctagcgtgaccctgccacctcagcctcacaccaaggagggcgttgatgcctacaacgaagtgatcgcccgggtgcgaatgtgggtgaacctgaacctgtggcagaagctgaagctaagcagagatgatgccaagcctctgctgagactgaagggattcccttcctttcctctggtcgagagacaggccaacgaagtggactggtgggacatggtgtgtaacgtgaagaagctgatcaacgagaaaaaggaggatggcaaggtgttttggcagaatctggctggctacaagagacaggaagccctgagaccatacctgagcagcgaggaagatcggaagaagggaaagaaattcgctcggtaccagctgggcgacctgctgctgcacctggaaaagaagcacggcgaggactggggaaaggtgtacgacgaggcctgggagcggattgacaagaaagtggaaggcctgagcaagcacatcaagctggaagaggaacggagaagcgaggacgcccagagcaaggccgccctgaccgactggctgcgggctaaggccagcttcgtgatcgagggcctgaaggaggccgacaaggacgagttctgcagatgcgagctgaagctgcagaagtggtacggggacctgcggggaaagcccttcgccatcgaagccgagaacagcatcctggacatcagcggcttcagcaagcagtacaactgtgccttcatctggcagaaggacggcgtgaagaagctgaacctgtacctgatcatcaactacttcaagggcggcaagctgcggttcaagaagatcaaacctgaagccttcgaagccaacagattctacaccgtgatcaacaaaaagagcggcgagatcgtgcccatggaggtgaacttcaacttcgacgaccccaacctgatcatcctgcctctggcctttggcaagagacagggcagagaattcatctggaacgacctgctgtccctggaaaccggcagcctgaagctggccaacggaagagtgatcgagaagacactgtacaacagaagaacccggcaggatgagcctgccctgttcgtggccctgaccttcgagcggcgggaggtcctggactcctccaatatcaaaccaatgaacctgatcggcgtggcaagaggcgaaaacatccccgccgtgatcgccctgaccgaccccgagggctgcccactgagccggtttaaggatagcctgggaaacccaacccacatcctgagaatcggcgagagctataaggagaagcagcggaccatccaggccaagaaggaggtggagcagcggagagccggcggctacagccggaagtacgccagcaaagccaagaatctggcagacgatatggtgagaaacaccgctagagatctgctgtactacgccgtgacccaggatgccatgctgatcttcgccaacctgagccggggcttcggccggcagggcaagcggaccttcatggccgagagacagtacacacggatggaggactggctgaccgccaagctggcctacgagggcctgagcaagacctacctgtccaagacactggcccagtacacctccaagacatgcagcaactgtgggtttaccatcaccagcgccgactacgacagggtgctggagaagctgaagaagacagcaacaggctggatgaccacaattaacggcaaggagctgaaggtggagggccagattacctactacaacagatacaagagacagaacgtagtcaaggacctgtccgtcgagctggatagactgagcgaagaatctgtgaacaacgacatctcctcctggacaaagggcagaagcggagaagctctgagcctcctgaagaaaagattctcccatagacccgtgcaggagaagttcgtgtgcctgaactgcggcttcgagacacacgcagccgagcaagccgccctgaacatcgccagatcctggctgttcctgcggagccaggagtacaagaaataccagacaaacaagacaaccggcaacaccgataagagagccttcgtcgagacctggcagtccttttaccggaagaagcttaaggaggtgtggaaacctgccgtgcggtctggcggatctggcggaggctccaccagccccaagaaaaagagaaaagtctaagctgccttctgcggggcttgccttctggccatgcccttcttctctcccttgcacctgtacctcttggtctttgaataaagcctgagtaggaaggctagcaaaaaaaaaaaaaaaaaaaaaaaaaaaaaaaaaaaaaaaaaaaaaaaaaaaaaaaaaaaaaaaaaaaaaaaaaaaaaaaa

SEQ ID NO: 8926 - RNA, 8787 nt, synthetic construct
  source 1..8787: mol_type = other RNA
aggaaataagagagaaaagaagagtaagaagaaatataagagccaccatggcccctaagaagaagcgtaaagtgagccggatgaaccacgaccaggagttcgacccccctaaggtgtaccctcccgtccccgccgagaagagaaagcccatccgggtcctgagcctgttcgatggcatcgccaccggtctgctggtgctgaaggacctgggcatccaggtggataggtacattgcctccgaggtgtgcgaggactccatcaccgtgggaatggtgcgtcatcagggcaagatcatgtacgtgggcgacgtgcggagcgtgacacagaagcatatccaggagtggggccctttcgacctggtgatcggcggcagcccttgcaatgacctgagcatcgtgaacccagcccggaagggcctgtacgagggaaccggcagactgttcttcgagttttacagactgctgcacgacgcccggcctaaggaaggcgacgaccggcccttcttttggctgttcgagaatgtggtggccatgggagtcagcgacaagcgggatattagccggttcctggagagcaaccccgtgatgatcgatgccaaggaagtgagcgccgcccaccgggccagatacttctggggcaatctgcctggcatgaacagacccctggccagcaccgtgaacgacaagctggagctgcaggagtgcctggagcacggccggatcgccaagttcagcaaggtgagaaccatcaccacccgaagcaacagcatcaaacaaggcaaggaccagcactttcctgtgttcatgaacgagaaggaggacatcctgtggtgtaccgagatggagagagtgttcgggttcccagtccactacacagatgtcagcaacatgtctagactggccagacagagactgctgggaagaagctggtccgtccctgtgatcagacacctgttcgcccctctgaaggagtacttcgcctgcgtgagcagcggcaacagcaacgccaacagccggggccccagcttctctagcggcctggtgccactgtccctgagagggagccacatgggccccatggagatctacaaaaccgtgagcgcctggaagcggcagcctgtgcgcgtgctgagcctgtttcggaatatcgataaagtcctgaaaagcctgggattcctggagagcggctctggctccggcggtggcaccctgaagtacgtggaggatgtgacaaacgtggtcagacgggatgtggagaagtggggccccttcgatctggtgtacggcagcacccaacccctgggcagctcttgtgaccggtgccctggctggtacatgtttcagttccaccggatcctgcagtacgccctgccgagacaggagtcccagcggccattcttttggattttcatggacaacttgctgctgaccgaggatgaccaggaaactaccactcggttcctgcagaccgaagccgtgaccctgcaggacgtgagaggccgggactaccagaacgccatgcgggtgtggtccaacatccctggactgaaaagcaagcacgcacctctgacccctaaagaagaggagtacctgcaggcccaggtgcggagcagaagcaagctggacgcccctaaggtggatctgctggtgaagaattgcctcctgcccctgagagagtacttcaagtatttcagccagaatagtctgcccctgggaggcagcggcggcggcatggccttcgaggacgtggccgtgtacttcagccaggaggagtggggcctgctggacaccgcccagagggccctgtacaggagggtgatgctggacaacttcgccctggtggccagcctgggcctgagcaccagcaggcccagggtggtgatccagctggagaggggcgaggagccctgggtgcccagcggcaaggacatgaccctggccaggaacacctacggcaggctgaacagcggcagcggcggcccaagcagcggcgcccctcctcccagcggcggcaggcggcccaagcagcggcgcccctcctcccagcggcggcagcccagccggctccccaacctctaccgaggagggcacctctgagtccgccacccccgagagcggccctggcacctccaccgagcccagcgagggcagcgcacccggcagccctgccggcagccccacctccacagaggagggaaccagcaccgagcccagcgaaggcagcgccccaggcaccagcaccgagcctagtgagcaggagattaaacggatcaacaagatcagaagaagacttgtgaaagacagcaacaccaagaaggccggcaagacaggccccatgaaaaccctgctggttagagtgatgacacccgatctgagagagcggctggaaaacctgagaaagaagcctgaaaatatcccccagcccatcagcaatacatctagagccaacctgaataagctgctgaccgattacaccgaaatgaagaaggcgatcctgcatgtgtactgggaagagttccagaaggaccctgtgggcctgatgagccgggtggcccagcctgccagcaagaagatcgatcagaacaagctgaaacctgagatggacgagaagggcaacctgaccaccgccggctttgcctgctctcagtgtggccagcccctgttcgtgtacaagctggagcaggtgtctgagaagggcaaggcttacaccaactacttcggacggtgcaatgtggccgagcacgaaaagctgatcctgctggcccagctgaagcccgagaaggatagcgacgaagccgtgacatatagcctgggaaagtttgggcagagggccctggatttctacagcattcatgtgaccaaggagtccacccaccccgtgaagcccctggcccagatcgccggaaacagatacgcctccggacctgtgggaaaggccctgagcgacgcatgtatgggcacaatcgcctccttcctgtctaagtaccaggacatcatcatcgaacaccagaaggtggtgaagggcaaccagaagagactggagagcctgcgggagctggccggcaaggaaaacctggaataccctagcgtgaccctgccacctcagcctcacaccaaggagggcgttgatgcctacaacgaagtgatcgcccgggtgcgaatgtgggtgaacctgaacctgtggcagaagctgaagctaagcagagatgatgccaagcctctgctgagactgaagggattcccttcctttcctctggtcgagagacaggccaacgaagtggactggtgggacatggtgtgtaacgtgaagaagctgatcaacgagaaaaaggaggatggcaaggtgttttggcagaatctggctggctacaagagacaggaagccctgagaccatacctgagcagcgaggaagatcggaagaagggaaagaaattcgctcggtaccagctgggcgacctgctgctgcacctggaaaagaagcacggcgaggactggggaaaggtgtacgacgaggcctgggagcggattgacaagaaagtggaaggcctgagcaagcacatcaagctggaagaggaacggagaagcgaggacgcccagagcaaggccgccctgaccgactggctgcgggctaaggccagcttcgtgatcgagggcctgaaggaggccgacaaggacgagttctgcagatgcgagctgaagctgcagaagtggtacggggacctgcggggaaagcccttcgccatcgaagccgagaacagcatcctggacatcagcggcttcagcaagcagtacaactgtgccttcatctggcagaaggacggcgtgaagaagctgaacctgtacctgatcatcaactacttcaagggcggcaagctgcggttcaagaagatcaaacctgaagccttcgaagccaacagattctacaccgtgatcaacaaaaagagcggcgagatcgtgcccatggaggtgaacttcaacttcgacgaccccaacctgatcatcctgcctctggcctttggcaagagacagggcagagaattcatctggaacgacctgctgtccctggaaaccggcagcctgaagctggccaacggaagagtgatcgagaagacactgtacaacagaagaacccggcaggatgagcctgccctgttcgtggccctgaccttcgagcggcgggaggtcctggactcctccaatatcaaaccaatgaacctgatcggcgtggcaagaggcgaaaacatccccgccgtgatcgccctgaccgaccccgagggctgcccactgagccggtttaaggatagcctgggaaacccaacccacatcctgagaatcggcgagagctataaggagaagcagcggaccatccaggccaagaaggaggtggagcagcggagagccggcggctacagccggaagtacgccagcaaagccaagaatctggcagacgatatggtgagaaacaccgctagagatctgctgtactacgccgtgacccaggatgccatgctgatcttcgccaacctgagccggggcttcggccggcagggcaagcggaccttcatggccgagagacagtacacacggatggaggactggctgaccgccaagctggcctacgagggcctgagcaagacctacctgtccaagacactggcccagtacacctccaagacatgcagcaactgtgggtttaccatcaccagcgccgactacgacagggtgctggagaagctgaagaagacagcaacaggctggatgaccacaattaacggcaaggagctgaaggtggagggccagattacctactacaacagatacaagagacagaacgtagtcaaggacctgtccgtcgagctggatagactgagcgaagaatctgtgaacaacgacatctcctcctggacaaagggcagaagcggagaagctctgagcctcctgaagaaaagattctcccatagacccgtgcaggagaagttcgtgtgcctgaactgcggcttcgagacacacgcagccgagcaagccgccctgaacatcgccagatcctggctgttcctgcggagccaggagtacaagaaataccagacaaacaagacaaccggcaacaccgataagagagccttcgtcgagacctggcagtccttttaccggaagaagcttaaggaggtgtggaaacctgccgtgcggtctggcggatctggcggaggctccaccagccccaagaaaaagagaaaagtctaagctgccttctgcggggcttgccttctggccatgcccttcttctctcccttgcacctgtacctcttggtctttgaataaagcctgagtaggaaggctagcaaaaaaaaaaaaaaaaaaaaaaaaaaaaaaaaaaaaaaaaaaaaaaaaaaaaaaaaaaaaaaaaaaaaaaaaaaaaaaaagcccagccggctccccaacctctaccgaggagggcacctctgagtccgccacccccgagagcggccctggcacctccaccgagcccagcgagggcagcgcacccggcagccctgccggcagccccacctccacagaggagggaaccagcaccgagcccagcgaaggcagcgccccaggcaccagcaccgagcctagtgagcaggagattaaacggatcaacaagatcagaagaagacttgtgaaagacagcaacaccaagaaggccggcaagacaggccccatgaaaaccctgctggttagagtgatgacacccgatctgagagagcggctggaaaacctgagaaagaagcctgaaaatatcccccagcccatcagcaatacatctagagccaacctgaataagctgctgaccgattacaccgaaatgaagaaggcgatcctgcatgtgtactgggaagagttccagaaggaccctgtgggcctgatgagccgggtggcccagcctgccagcaagaagatcgatcagaacaagctgaaacctgagatggacgagaagggcaacctgaccaccgccggctttgcctgctctcagtgtggccagcccctgttcgtgtacaagctggagcaggtgtctgagaagggcaaggcttacaccaactacttcggacggtgcaatgtggccgagcacgaaaagctgatcctgctggcccagctgaagcccgagaaggatagcgacgaagccgtgacatatagcctgggaaagtttgggcagagggccctggatttctacagcattcatgtgaccaaggagtccacccaccccgtgaagcccctggcccagatcgccggaaacagatacgcctccggacctgtgggaaaggccctgagcgacgcatgtatgggcacaatcgcctccttcctgtctaagtaccaggacatcatcatcgaacaccagaaggtggtgaagggcaaccagaagagactggagagcctgcgggagctggccggcaaggaaaacctggaataccctagcgtgaccctgccacctcagcctcacaccaaggagggcgttgatgcctacaacgaagtgatcgcccgggtgcgaatgtgggtgaacctgaacctgtggcagaagctgaagctaagcagagatgatgccaagcctctgctgagactgaagggattcccttcctttcctctggtcgagagacaggccaacgaagtggactggtgggacatggtgtgtaacgtgaagaagctgatcaacgagaaaaaggaggatggcaaggtgttttggcagaatctggctggctacaagagacaggaagccctgagaccatacctgagcagcgaggaagatcggaagaagggaaagaaattcgctcggtaccagctgggcgacctgctgctgcacctggaaaagaagcacggcgaggactggggaaaggtgtacgacgaggcctgggagcggattgacaagaaagtggaaggcctgagcaagcacatcaagctggaagaggaacggagaagcgaggacgcccagagcaaggccgccctgaccgactggctgcgggctaaggccagcttcgtgatcgagggcctgaaggaggccgacaaggacgagttctgcagatgcgagctgaagctgcagaagtggtacggggacctgcggggaaagcccttcgccatcgaagccgagaacagcatcctggacatcagcggcttcagcaagcagtacaactgtgccttcatctggcagaaggacggcgtgaagaagctgaacctgtacctgatcatcaactacttcaagggcggcaagctgcggttcaagaagatcaaacctgaagccttcgaagccaacagattctacaccgtgatcaacaaaaagagcggcgagatcgtgcccatggaggtgaacttcaacttcgacgaccccaacctgatcatcctgcctctggcctttggcaagagacagggcagagaattcatctggaacgacctgctgtccctggaaaccggcagcctgaagctggccaacggaagagtgatcgagaagacactgtacaacagaagaacccggcaggatgagcctgccctgttcgtggccctgaccttcgagcggcgggaggtcctggactcctccaatatcaaaccaatgaacctgatcggcgtggcaagaggcgaaaacatccccgccgtgatcgccctgaccgaccccgagggctgcccactgagccggtttaaggatagcctgggaaacccaacccacatcctgagaatcggcgagagctataaggagaagcagcggaccatccaggccaagaaggaggtggagcagcggagagccggcggctacagccggaagtacgccagcaaagccaagaatctggcagacgatatggtgagaaacaccgctagagatctgctgtactacgccgtgacccaggatgccatgctgatcttcgccaacctgagccggggcttcggccggcagggcaagcggaccttcatggccgagagacagtacacacggatggaggactggctgaccgccaagctggcctacgagggcctgagcaagacctacctgtccaagacactggcccagtacacctccaagacatgcagcaactgtgggtttaccatcaccagcgccgactacgacagggtgctggagaagctgaagaagacagcaacaggctggatgaccacaattaacggcaaggagctgaaggtggagggccagattacctactacaacagatacaagagacagaacgtagtcaaggacctgtccgtcgagctggatagactgagcgaagaatctgtgaacaacgacatctcctcctggacaaagggcagaagcggagaagctctgagcctcctgaagaaaagattctcccatagacccgtgcaggagaagttcgtgtgcctgaactgcggcttcgagacacacgcagccgagcaagccgccctgaacatcgccagatcctggctgttcctgcggagccaggagtacaagaaataccagacaaacaagacaaccggcaacaccgataagagagccttcgtcgagacctggcagtccttttaccggaagaagcttaaggaggtgtggaaacctgccgtgcggtctggcggatctggcggaggctccaccagccccaagaaaaagagaaaagtctaagctgccttctgcggggcttgccttctggccatgcccttcttctctcccttgcacctgtacctcttggtctttgaataaagcctgagtaggaaggctagcaaaaaaaaaaaaaaaaaaaaaaaaaaaaaaaaaaaaaaaaaaaaaaaaaaaaaaaaaaaaaaaaaaaaaaaaaaaaaaaa

SEQ ID NO: 8927 - RNA, 8787 nt, synthetic construct
  source 1..8787: mol_type = other RNA
aggaaataagagagaaaagaagagtaagaagaaatataagagccaccatggcccctaagaagaagcgtaaagtgagccggatgaaccacgaccaggagttcgacccccctaaggtgtaccctcccgtccccgccgagaagagaaagcccatccgggtcctgagcctgttcgatggcatcgccaccggtctgctggtgctgaaggacctgggcatccaggtggataggtacattgcctccgaggtgtgcgaggactccatcaccgtgggaatggtgcgtcatcagggcaagatcatgtacgtgggcgacgtgcggagcgtgacacagaagcatatccaggagtggggccctttcgacctggtgatcggcggcagcccttgcaatgacctgagcatcgtgaacccagcccggaagggcctgtacgagggaaccggcagactgttcttcgagttttacagactgctgcacgacgcccggcctaaggaaggcgacgaccggcccttcttttggctgttcgagaatgtggtggccatgggagtcagcgacaagcgggatattagccggttcctggagagcaaccccgtgatgatcgatgccaaggaagtgagcgccgcccaccgggccagatacttctggggcaatctgcctggcatgaacagacccctggccagcaccgtgaacgacaagctggagctgcaggagtgcctggagcacggccggatcgccaagttcagcaaggtgagaaccatcaccacccgaagcaacagcatcaaacaaggcaaggaccagcactttcctgtgttcatgaacgagaaggaggacatcctgtggtgtaccgagatggagagagtgttcgggttcccagtccactacacagatgtcagcaacatgtctagactggccagacagagactgctgggaagaagctggtccgtccctgtgatcagacacctgttcgcccctctgaaggagtacttcgcctgcgtgagcagcggcaacagcaacgccaacagccggggccccagcttctctagcggcctggtgccactgtccctgagagggagccacatgggccccatggagatctacaaaaccgtgagcgcctggaagcggcagcctgtgcgcgtgctgagcctgtttcggaatatcgataaagtcctgaaaagcctgggattcctggagagcggctctggctccggcggtggcaccctgaagtacgtggaggatgtgacaaacgtggtcagacgggatgtggagaagtggggccccttcgatctggtgtacggcagcacccaacccctgggcagctcttgtgaccggtgccctggctggtacatgtttcagttccaccggatcctgcagtacgccctgccgagacaggagtcccagcggccattcttttggattttcatggacaacttgctgctgaccgaggatgaccaggaaactaccactcggttcctgcagaccgaagccgtgaccctgcaggacgtgagaggccgggactaccagaacgccatgcgggtgtggtccaacatccctggactgaaaagcaagcacgcacctctgacccctaaagaagaggagtacctgcaggcccaggtgcggagcagaagcaagctggacgcccctaaggtggatctgctggtgaagaattgcctcctgcccctgagagagtacttcaagtatttcagccagaatagtctgcccctgggaggcagcggcggcggcagccagagccccctgaccttcggcgacgtggccgtggagttcagcggcgaggagtgggcctggctggacagcgcccagaggagcctgcacaggagcgtgatgctggagaactacaggaacctggccagcctgggcctgtgcctgagcaagcccgagatgatcagcagcctggagcagaggaaggagccctgggccgtgaagaggaagctgaccggcggcgagtgccccgacagccagaccctgggcggcccaagcagcggcgcccctcctcccagcggcggcaggcggcccaagcagcggcgcccctcctcccagcggcggcagcccagccggctccccaacctctaccgaggagggcacctctgagtccgccacccccgagagcggccctggcacctccaccgagcccagcgagggcagcgcacccggcagccctgccggcagccccacctccacagaggagggaaccagcaccgagcccagcgaaggcagcgccccaggcaccagcaccgagcctagtgagcaggagattaaacggatcaacaagatcagaagaagacttgtgaaagacagcaacaccaagaaggccggcaagacaggccccatgaaaaccctgctggttagagtgatgacacccgatctgagagagcggctggaaaacctgagaaagaagcctgaaaatatcccccagcccatcagcaatacatctagagccaacctgaataagctgctgaccgattacaccgaaatgaagaaggcgatcctgcatgtgtactgggaagagttccagaaggaccctgtgggcctgatgagccgggtggcccagcctgccagcaagaagatcgatcagaacaagctgaaacctgagatggacgagaagggcaacctgaccaccgccggctttgcctgctctcagtgtggccagcccctgttcgtgtacaagctggagcaggtgtctgagaagggcaaggcttacaccaactacttcggacggtgcaatgtggccgagcacgaaaagctgatcctgctggcccagctgaagcccgagaaggatagcgacgaagccgtgacatatagcctgggaaagtttgggcagagggccctggatttctacagcattcatgtgaccaaggagtccacccaccccgtgaagcccctggcccagatcgccggaaacagatacgcctccggacctgtgggaaaggccctgagcgacgcatgtatgggcacaatcgcctccttcctgtctaagtaccaggacatcatcatcgaacaccagaaggtggtgaagggcaaccagaagagactggagagcctgcgggagctggccggcaaggaaaacctggaataccctagcgtgaccctgccacctcagcctcacaccaaggagggcgttgatgcctacaacgaagtgatcgcccgggtgcgaatgtgggtgaacctgaacctgtggcagaagctgaagctaagcagagatgatgccaagcctctgctgagactgaagggattcccttcctttcctctggtcgagagacaggccaacgaagtggactggtgggacatggtgtgtaacgtgaagaagctgatcaacgagaaaaaggaggatggcaaggtgttttggcagaatctggctggctacaagagacaggaagccctgagaccatacctgagcagcgaggaagatcggaagaagggaaagaaattcgctcggtaccagctgggcgacctgctgctgcacctggaaaagaagcacggcgaggactggggaaaggtgtacgacgaggcctgggagcggattgacaagaaagtggaaggcctgagcaagcacatcaagctggaagaggaacggagaagcgaggacgcccagagcaaggccgccctgaccgactggctgcgggctaaggccagcttcgtgatcgagggcctgaaggaggccgacaaggacgagttctgcagatgcgagctgaagctgcagaagtggtacggggacctgcggggaaagcccttcgccatcgaagccgagaacagcatcctggacatcagcggcttcagcaagcagtacaactgtgccttcatctggcagaaggacggcgtgaagaagctgaacctgtacctgatcatcaactacttcaagggcggcaagctgcggttcaagaagatcaaacctgaagccttcgaagccaacagattctacaccgtgatcaacaaaaagagcggcgagatcgtgcccatggaggtgaacttcaacttcgacgaccccaacctgatcatcctgcctctggcctttggcaagagacagggcagagaattcatctggaacgacctgctgtccctggaaaccggcagcctgaagctggccaacggaagagtgatcgagaagacactgtacaacagaagaacccggcaggatgagcctgccctgttcgtggccctgaccttcgagcggcgggaggtcctggactcctccaatatcaaaccaatgaacctgatcggcgtggcaagaggcgaaaacatccccgccgtgatcgccctgaccgaccccgagggctgcccactgagccggtttaaggatagcctgggaaacccaacccacatcctgagaatcggcgagagctataaggagaagcagcggaccatccaggccaagaaggaggtggagcagcggagagccggcggctacagccggaagtacgccagcaaagccaagaatctggcagacgatatggtgagaaacaccgctagagatctgctgtactacgccgtgacccaggatgccatgctgatcttcgccaacctgagccggggcttcggccggcagggcaagcggaccttcatggccgagagacagtacacacggatggaggactggctgaccgccaagctggcctacgagggcctgagcaagacctacctgtccaagacactggcccagtacacctccaagacatgcagcaactgtgggtttaccatcaccagcgccgactacgacagggtgctggagaagctgaagaagacagcaacaggctggatgaccacaattaacggcaaggagctgaaggtggagggccagattacctactacaacagatacaagagacagaacgtagtcaaggacctgtccgtcgagctggatagactgagcgaagaatctgtgaacaacgacatctcctcctggacaaagggcagaagcggagaagctctgagcctcctgaagaaaagattctcccatagacccgtgcaggagaagttcgtgtgcctgaactgcggcttcgagacacacgcagccgagcaagccgccctgaacatcgccagatcctggctgttcctgcggagccaggagtacaagaaataccagacaaacaagacaaccggcaacaccgataagagagccttcgtcgagacctggcagtccttttaccggaagaagcttaaggaggtgtggaaacctgccgtgcggtctggcggatctggcggaggctccaccagccccaagaaaaagagaaaagtctaagctgccttctgcggggcttgccttctggccatgcccttcttctctcccttgcacctgtacctcttggtctttgaataaagcctgagtaggaaggctagcaaaaaaaaaaaaaaaaaaaaaaaaaaaaaaaaaaaaaaaaaaaaaaaaaaaaaaaaaaaaaaaaaaaaaaaaaaaaaaaagcccagccggctccccaacctctaccgaggagggcacctctgagtccgccacccccgagagcggccctggcacctccaccgagcccagcgagggcagcgcacccggcagccctgccggcagccccacctccacagaggagggaaccagcaccgagcccagcgaaggcagcgccccaggcaccagcaccgagcctagtgagcaggagattaaacggatcaacaagatcagaagaagacttgtgaaagacagcaacaccaagaaggccggcaagacaggccccatgaaaaccctgctggttagagtgatgacacccgatctgagagagcggctggaaaacctgagaaagaagcctgaaaatatcccccagcccatcagcaatacatctagagccaacctgaataagctgctgaccgattacaccgaaatgaagaaggcgatcctgcatgtgtactgggaagagttccagaaggaccctgtgggcctgatgagccgggtggcccagcctgccagcaagaagatcgatcagaacaagctgaaacctgagatggacgagaagggcaacctgaccaccgccggctttgcctgctctcagtgtggccagcccctgttcgtgtacaagctggagcaggtgtctgagaagggcaaggcttacaccaactacttcggacggtgcaatgtggccgagcacgaaaagctgatcctgctggcccagctgaagcccgagaaggatagcgacgaagccgtgacatatagcctgggaaagtttgggcagagggccctggatttctacagcattcatgtgaccaaggagtccacccaccccgtgaagcccctggcccagatcgccggaaacagatacgcctccggacctgtgggaaaggccctgagcgacgcatgtatgggcacaatcgcctccttcctgtctaagtaccaggacatcatcatcgaacaccagaaggtggtgaagggcaaccagaagagactggagagcctgcgggagctggccggcaaggaaaacctggaataccctagcgtgaccctgccacctcagcctcacaccaaggagggcgttgatgcctacaacgaagtgatcgcccgggtgcgaatgtgggtgaacctgaacctgtggcagaagctgaagctaagcagagatgatgccaagcctctgctgagactgaagggattcccttcctttcctctggtcgagagacaggccaacgaagtggactggtgggacatggtgtgtaacgtgaagaagctgatcaacgagaaaaaggaggatggcaaggtgttttggcagaatctggctggctacaagagacaggaagccctgagaccatacctgagcagcgaggaagatcggaagaagggaaagaaattcgctcggtaccagctgggcgacctgctgctgcacctggaaaagaagcacggcgaggactggggaaaggtgtacgacgaggcctgggagcggattgacaagaaagtggaaggcctgagcaagcacatcaagctggaagaggaacggagaagcgaggacgcccagagcaaggccgccctgaccgactggctgcgggctaaggccagcttcgtgatcgagggcctgaaggaggccgacaaggacgagttctgcagatgcgagctgaagctgcagaagtggtacggggacctgcggggaaagcccttcgccatcgaagccgagaacagcatcctggacatcagcggcttcagcaagcagtacaactgtgccttcatctggcagaaggacggcgtgaagaagctgaacctgtacctgatcatcaactacttcaagggcggcaagctgcggttcaagaagatcaaacctgaagccttcgaagccaacagattctacaccgtgatcaacaaaaagagcggcgagatcgtgcccatggaggtgaacttcaacttcgacgaccccaacctgatcatcctgcctctggcctttggcaagagacagggcagagaattcatctggaacgacctgctgtccctggaaaccggcagcctgaagctggccaacggaagagtgatcgagaagacactgtacaacagaagaacccggcaggatgagcctgccctgttcgtggccctgaccttcgagcggcgggaggtcctggactcctccaatatcaaaccaatgaacctgatcggcgtggcaagaggcgaaaacatccccgccgtgatcgccctgaccgaccccgagggctgcccactgagccggtttaaggatagcctgggaaacccaacccacatcctgagaatcggcgagagctataaggagaagcagcggaccatccaggccaagaaggaggtggagcagcggagagccggcggctacagccggaagtacgccagcaaagccaagaatctggcagacgatatggtgagaaacaccgctagagatctgctgtactacgccgtgacccaggatgccatgctgatcttcgccaacctgagccggggcttcggccggcagggcaagcggaccttcatggccgagagacagtacacacggatggaggactggctgaccgccaagctggcctacgagggcctgagcaagacctacctgtccaagacactggcccagtacacctccaagacatgcagcaactgtgggtttaccatcaccagcgccgactacgacagggtgctggagaagctgaagaagacagcaacaggctggatgaccacaattaacggcaaggagctgaaggtggagggccagattacctactacaacagatacaagagacagaacgtagtcaaggacctgtccgtcgagctggatagactgagcgaagaatctgtgaacaacgacatctcctcctggacaaagggcagaagcggagaagctctgagcctcctgaagaaaagattctcccatagacccgtgcaggagaagttcgtgtgcctgaactgcggcttcgagacacacgcagccgagcaagccgccctgaacatcgccagatcctggctgttcctgcggagccaggagtacaagaaataccagacaaacaagacaaccggcaacaccgataagagagccttcgtcgagacctggcagtccttttaccggaagaagcttaaggaggtgtggaaacctgccgtgcggtctggcggatctggcggaggctccaccagccccaagaaaaagagaaaagtctaagctgccttctgcggggcttgccttctggccatgcccttcttctctcccttgcacctgtacctcttggtctttgaataaagcctgagtaggaaggctagcaaaaaaaaaaaaaaaaaaaaaaaaaaaaaaaaaaaaaaaaaaaaaaaaaaaaaaaaaaaaaaaaaaaaaaaaaaaaaaaa

SEQ ID NO: 8928 - RNA, 8787 nt, synthetic construct
  source 1..8787: mol_type = other RNA
aggaaataagagagaaaagaagagtaagaagaaatataagagccaccatggcccctaagaagaagcgtaaagtgagccggatgaaccacgaccaggagttcgacccccctaaggtgtaccctcccgtccccgccgagaagagaaagcccatccgggtcctgagcctgttcgatggcatcgccaccggtctgctggtgctgaaggacctgggcatccaggtggataggtacattgcctccgaggtgtgcgaggactccatcaccgtgggaatggtgcgtcatcagggcaagatcatgtacgtgggcgacgtgcggagcgtgacacagaagcatatccaggagtggggccctttcgacctggtgatcggcggcagcccttgcaatgacctgagcatcgtgaacccagcccggaagggcctgtacgagggaaccggcagactgttcttcgagttttacagactgctgcacgacgcccggcctaaggaaggcgacgaccggcccttcttttggctgttcgagaatgtggtggccatgggagtcagcgacaagcgggatattagccggttcctggagagcaaccccgtgatgatcgatgccaaggaagtgagcgccgcccaccgggccagatacttctggggcaatctgcctggcatgaacagacccctggccagcaccgtgaacgacaagctggagctgcaggagtgcctggagcacggccggatcgccaagttcagcaaggtgagaaccatcaccacccgaagcaacagcatcaaacaaggcaaggaccagcactttcctgtgttcatgaacgagaaggaggacatcctgtggtgtaccgagatggagagagtgttcgggttcccagtccactacacagatgtcagcaacatgtctagactggccagacagagactgctgggaagaagctggtccgtccctgtgatcagacacctgttcgcccctctgaaggagtacttcgcctgcgtgagcagcggcaacagcaacgccaacagccggggccccagcttctctagcggcctggtgccactgtccctgagagggagccacatgggccccatggagatctacaaaaccgtgagcgcctggaagcggcagcctgtgcgcgtgctgagcctgtttcggaatatcgataaagtcctgaaaagcctgggattcctggagagcggctctggctccggcggtggcaccctgaagtacgtggaggatgtgacaaacgtggtcagacgggatgtggagaagtggggccccttcgatctggtgtacggcagcacccaacccctgggcagctcttgtgaccggtgccctggctggtacatgtttcagttccaccggatcctgcagtacgccctgccgagacaggagtcccagcggccattcttttggattttcatggacaacttgctgctgaccgaggatgaccaggaaactaccactcggttcctgcagaccgaagccgtgaccctgcaggacgtgagaggccgggactaccagaacgccatgcgggtgtggtccaacatccctggactgaaaagcaagcacgcacctctgacccctaaagaagaggagtacctgcaggcccaggtgcggagcagaagcaagctggacgcccctaaggtggatctgctggtgaagaattgcctcctgcccctgagagagtacttcaagtatttcagccagaatagtctgcccctgggaggcagcggcggcggcagccagagccccctgaccttcggcgacgtggccgtggagttcagcggcgaggagtgggcctggctggacagcgcccagaggagcctgcacaggagcgtgatgctggagaactacaggaacctggccagcctgggcctgtgcctgagcaagcccgagatgatcagcagcctggagcagaggaaggagccctgggccgtgaagaggaagagcaccggcggcgagtgcgccgacagccagaccctgggcggcccaagcagcggcgcccctcctcccagcggcggcaggcggcccaagcagcggcgcccctcctcccagcggcggcagcccagccggctccccaacctctaccgaggagggcacctctgagtccgccacccccgagagcggccctggcacctccaccgagcccagcgagggcagcgcacccggcagccctgccggcagccccacctccacagaggagggaaccagcaccgagcccagcgaaggcagcgccccaggcaccagcaccgagcctagtgagcaggagattaaacggatcaacaagatcagaagaagacttgtgaaagacagcaacaccaagaaggccggcaagacaggccccatgaaaaccctgctggttagagtgatgacacccgatctgagagagcggctggaaaacctgagaaagaagcctgaaaatatcccccagcccatcagcaatacatctagagccaacctgaataagctgctgaccgattacaccgaaatgaagaaggcgatcctgcatgtgtactgggaagagttccagaaggaccctgtgggcctgatgagccgggtggcccagcctgccagcaagaagatcgatcagaacaagctgaaacctgagatggacgagaagggcaacctgaccaccgccggctttgcctgctctcagtgtggccagcccctgttcgtgtacaagctggagcaggtgtctgagaagggcaaggcttacaccaactacttcggacggtgcaatgtggccgagcacgaaaagctgatcctgctggcccagctgaagcccgagaaggatagcgacgaagccgtgacatatagcctgggaaagtttgggcagagggccctggatttctacagcattcatgtgaccaaggagtccacccaccccgtgaagcccctggcccagatcgccggaaacagatacgcctccggacctgtgggaaaggccctgagcgacgcatgtatgggcacaatcgcctccttcctgtctaagtaccaggacatcatcatcgaacaccagaaggtggtgaagggcaaccagaagagactggagagcctgcgggagctggccggcaaggaaaacctggaataccctagcgtgaccctgccacctcagcctcacaccaaggagggcgttgatgcctacaacgaagtgatcgcccgggtgcgaatgtgggtgaacctgaacctgtggcagaagctgaagctaagcagagatgatgccaagcctctgctgagactgaagggattcccttcctttcctctggtcgagagacaggccaacgaagtggactggtgggacatggtgtgtaacgtgaagaagctgatcaacgagaaaaaggaggatggcaaggtgttttggcagaatctggctggctacaagagacaggaagccctgagaccatacctgagcagcgaggaagatcggaagaagggaaagaaattcgctcggtaccagctgggcgacctgctgctgcacctggaaaagaagcacggcgaggactggggaaaggtgtacgacgaggcctgggagcggattgacaagaaagtggaaggcctgagcaagcacatcaagctggaagaggaacggagaagcgaggacgcccagagcaaggccgccctgaccgactggctgcgggctaaggccagcttcgtgatcgagggcctgaaggaggccgacaaggacgagttctgcagatgcgagctgaagctgcagaagtggtacggggacctgcggggaaagcccttcgccatcgaagccgagaacagcatcctggacatcagcggcttcagcaagcagtacaactgtgccttcatctggcagaaggacggcgtgaagaagctgaacctgtacctgatcatcaactacttcaagggcggcaagctgcggttcaagaagatcaaacctgaagccttcgaagccaacagattctacaccgtgatcaacaaaaagagcggcgagatcgtgcccatggaggtgaacttcaacttcgacgaccccaacctgatcatcctgcctctggcctttggcaagagacagggcagagaattcatctggaacgacctgctgtccctggaaaccggcagcctgaagctggccaacggaagagtgatcgagaagacactgtacaacagaagaacccggcaggatgagcctgccctgttcgtggccctgaccttcgagcggcgggaggtcctggactcctccaatatcaaaccaatgaacctgatcggcgtggcaagaggcgaaaacatccccgccgtgatcgccctgaccgaccccgagggctgcccactgagccggtttaaggatagcctgggaaacccaacccacatcctgagaatcggcgagagctataaggagaagcagcggaccatccaggccaagaaggaggtggagcagcggagagccggcggctacagccggaagtacgccagcaaagccaagaatctggcagacgatatggtgagaaacaccgctagagatctgctgtactacgccgtgacccaggatgccatgctgatcttcgccaacctgagccggggcttcggccggcagggcaagcggaccttcatggccgagagacagtacacacggatggaggactggctgaccgccaagctggcctacgagggcctgagcaagacctacctgtccaagacactggcccagtacacctccaagacatgcagcaactgtgggtttaccatcaccagcgccgactacgacagggtgctggagaagctgaagaagacagcaacaggctggatgaccacaattaacggcaaggagctgaaggtggagggccagattacctactacaacagatacaagagacagaacgtagtcaaggacctgtccgtcgagctggatagactgagcgaagaatctgtgaacaacgacatctcctcctggacaaagggcagaagcggagaagctctgagcctcctgaagaaaagattctcccatagacccgtgcaggagaagttcgtgtgcctgaactgcggcttcgagacacacgcagccgagcaagccgccctgaacatcgccagatcctggctgttcctgcggagccaggagtacaagaaataccagacaaacaagacaaccggcaacaccgataagagagccttcgtcgagacctggcagtccttttaccggaagaagcttaaggaggtgtggaaacctgccgtgcggtctggcggatctggcggaggctccaccagccccaagaaaaagagaaaagtctaagctgccttctgcggggcttgccttctggccatgcccttcttctctcccttgcacctgtacctcttggtctttgaataaagcctgagtaggaaggctagcaaaaaaaaaaaaaaaaaaaaaaaaaaaaaaaaaaaaaaaaaaaaaaaaaaaaaaaaaaaaaaaaaaaaaaaaaaaaaaaagcccagccggctccccaacctctaccgaggagggcacctctgagtccgccacccccgagagcggccctggcacctccaccgagcccagcgagggcagcgcacccggcagccctgccggcagccccacctccacagaggagggaaccagcaccgagcccagcgaaggcagcgccccaggcaccagcaccgagcctagtgagcaggagattaaacggatcaacaagatcagaagaagacttgtgaaagacagcaacaccaagaaggccggcaagacaggccccatgaaaaccctgctggttagagtgatgacacccgatctgagagagcggctggaaaacctgagaaagaagcctgaaaatatcccccagcccatcagcaatacatctagagccaacctgaataagctgctgaccgattacaccgaaatgaagaaggcgatcctgcatgtgtactgggaagagttccagaaggaccctgtgggcctgatgagccgggtggcccagcctgccagcaagaagatcgatcagaacaagctgaaacctgagatggacgagaagggcaacctgaccaccgccggctttgcctgctctcagtgtggccagcccctgttcgtgtacaagctggagcaggtgtctgagaagggcaaggcttacaccaactacttcggacggtgcaatgtggccgagcacgaaaagctgatcctgctggcccagctgaagcccgagaaggatagcgacgaagccgtgacatatagcctgggaaagtttgggcagagggccctggatttctacagcattcatgtgaccaaggagtccacccaccccgtgaagcccctggcccagatcgccggaaacagatacgcctccggacctgtgggaaaggccctgagcgacgcatgtatgggcacaatcgcctccttcctgtctaagtaccaggacatcatcatcgaacaccagaaggtggtgaagggcaaccagaagagactggagagcctgcgggagctggccggcaaggaaaacctggaataccctagcgtgaccctgccacctcagcctcacaccaaggagggcgttgatgcctacaacgaagtgatcgcccgggtgcgaatgtgggtgaacctgaacctgtggcagaagctgaagctaagcagagatgatgccaagcctctgctgagactgaagggattcccttcctttcctctggtcgagagacaggccaacgaagtggactggtgggacatggtgtgtaacgtgaagaagctgatcaacgagaaaaaggaggatggcaaggtgttttggcagaatctggctggctacaagagacaggaagccctgagaccatacctgagcagcgaggaagatcggaagaagggaaagaaattcgctcggtaccagctgggcgacctgctgctgcacctggaaaagaagcacggcgaggactggggaaaggtgtacgacgaggcctgggagcggattgacaagaaagtggaaggcctgagcaagcacatcaagctggaagaggaacggagaagcgaggacgcccagagcaaggccgccctgaccgactggctgcgggctaaggccagcttcgtgatcgagggcctgaaggaggccgacaaggacgagttctgcagatgcgagctgaagctgcagaagtggtacggggacctgcggggaaagcccttcgccatcgaagccgagaacagcatcctggacatcagcggcttcagcaagcagtacaactgtgccttcatctggcagaaggacggcgtgaagaagctgaacctgtacctgatcatcaactacttcaagggcggcaagctgcggttcaagaagatcaaacctgaagccttcgaagccaacagattctacaccgtgatcaacaaaaagagcggcgagatcgtgcccatggaggtgaacttcaacttcgacgaccccaacctgatcatcctgcctctggcctttggcaagagacagggcagagaattcatctggaacgacctgctgtccctggaaaccggcagcctgaagctggccaacggaagagtgatcgagaagacactgtacaacagaagaacccggcaggatgagcctgccctgttcgtggccctgaccttcgagcggcgggaggtcctggactcctccaatatcaaaccaatgaacctgatcggcgtggcaagaggcgaaaacatccccgccgtgatcgccctgaccgaccccgagggctgcccactgagccggtttaaggatagcctgggaaacccaacccacatcctgagaatcggcgagagctataaggagaagcagcggaccatccaggccaagaaggaggtggagcagcggagagccggcggctacagccggaagtacgccagcaaagccaagaatctggcagacgatatggtgagaaacaccgctagagatctgctgtactacgccgtgacccaggatgccatgctgatcttcgccaacctgagccggggcttcggccggcagggcaagcggaccttcatggccgagagacagtacacacggatggaggactggctgaccgccaagctggcctacgagggcctgagcaagacctacctgtccaagacactggcccagtacacctccaagacatgcagcaactgtgggtttaccatcaccagcgccgactacgacagggtgctggagaagctgaagaagacagcaacaggctggatgaccacaattaacggcaaggagctgaaggtggagggccagattacctactacaacagatacaagagacagaacgtagtcaaggacctgtccgtcgagctggatagactgagcgaagaatctgtgaacaacgacatctcctcctggacaaagggcagaagcggagaagctctgagcctcctgaagaaaagattctcccatagacccgtgcaggagaagttcgtgtgcctgaactgcggcttcgagacacacgcagccgagcaagccgccctgaacatcgccagatcctggctgttcctgcggagccaggagtacaagaaataccagacaaacaagacaaccggcaacaccgataagagagccttcgtcgagacctggcagtccttttaccggaagaagcttaaggaggtgtggaaacctgccgtgcggtctggcggatctggcggaggctccaccagccccaagaaaaagagaaaagtctaagctgccttctgcggggcttgccttctggccatgcccttcttctctcccttgcacctgtacctcttggtctttgaataaagcctgagtaggaaggctagcaaaaaaaaaaaaaaaaaaaaaaaaaaaaaaaaaaaaaaaaaaaaaaaaaaaaaaaaaaaaaaaaaaaaaaaaaaaaaaaa

SEQ ID NO: 8929 - RNA, 8787 nt, synthetic construct
  source 1..8787: mol_type = other RNA
aggaaataagagagaaaagaagagtaagaagaaatataagagccaccatggcccctaagaagaagcgtaaagtgagccggatgaaccacgaccaggagttcgacccccctaaggtgtaccctcccgtccccgccgagaagagaaagcccatccgggtcctgagcctgttcgatggcatcgccaccggtctgctggtgctgaaggacctgggcatccaggtggataggtacattgcctccgaggtgtgcgaggactccatcaccgtgggaatggtgcgtcatcagggcaagatcatgtacgtgggcgacgtgcggagcgtgacacagaagcatatccaggagtggggccctttcgacctggtgatcggcggcagcccttgcaatgacctgagcatcgtgaacccagcccggaagggcctgtacgagggaaccggcagactgttcttcgagttttacagactgctgcacgacgcccggcctaaggaaggcgacgaccggcccttcttttggctgttcgagaatgtggtggccatgggagtcagcgacaagcgggatattagccggttcctggagagcaaccccgtgatgatcgatgccaaggaagtgagcgccgcccaccgggccagatacttctggggcaatctgcctggcatgaacagacccctggccagcaccgtgaacgacaagctggagctgcaggagtgcctggagcacggccggatcgccaagttcagcaaggtgagaaccatcaccacccgaagcaacagcatcaaacaaggcaaggaccagcactttcctgtgttcatgaacgagaaggaggacatcctgtggtgtaccgagatggagagagtgttcgggttcccagtccactacacagatgtcagcaacatgtctagactggccagacagagactgctgggaagaagctggtccgtccctgtgatcagacacctgttcgcccctctgaaggagtacttcgcctgcgtgagcagcggcaacagcaacgccaacagccggggccccagcttctctagcggcctggtgccactgtccctgagagggagccacatgggccccatggagatctacaaaaccgtgagcgcctggaagcggcagcctgtgcgcgtgctgagcctgtttcggaatatcgataaagtcctgaaaagcctgggattcctggagagcggctctggctccggcggtggcaccctgaagtacgtggaggatgtgacaaacgtggtcagacgggatgtggagaagtggggccccttcgatctggtgtacggcagcacccaacccctgggcagctcttgtgaccggtgccctggctggtacatgtttcagttccaccggatcctgcagtacgccctgccgagacaggagtcccagcggccattcttttggattttcatggacaacttgctgctgaccgaggatgaccaggaaactaccactcggttcctgcagaccgaagccgtgaccctgcaggacgtgagaggccgggactaccagaacgccatgcgggtgtggtccaacatccctggactgaaaagcaagcacgcacctctgacccctaaagaagaggagtacctgcaggcccaggtgcggagcagaagcaagctggacgcccctaaggtggatctgctggtgaagaattgcctcctgcccctgagagagtacttcaagtatttcagccagaatagtctgcccctgggaggcagcggcggcggcgacagggtgaagttcaccttcagcgacgtggccgtgtacttcagcgaggaggagtggcagctgctggaggagcagcagaaggagctgtaccagaacgtgatgaaggagaactacaccaccctgatgagcctgggctacaccaccgtgaagcccgacgtgatcagcaagatcgagcagggcaagcagcccctggtgagcagccccagcggcagcaagggcaggagggccatcggcaggcccagcggcggcccaagcagcggcgcccctcctcccagcggcggcaggcggcccaagcagcggcgcccctcctcccagcggcggcagcccagccggctccccaacctctaccgaggagggcacctctgagtccgccacccccgagagcggccctggcacctccaccgagcccagcgagggcagcgcacccggcagccctgccggcagccccacctccacagaggagggaaccagcaccgagcccagcgaaggcagcgccccaggcaccagcaccgagcctagtgagcaggagattaaacggatcaacaagatcagaagaagacttgtgaaagacagcaacaccaagaaggccggcaagacaggccccatgaaaaccctgctggttagagtgatgacacccgatctgagagagcggctggaaaacctgagaaagaagcctgaaaatatcccccagcccatcagcaatacatctagagccaacctgaataagctgctgaccgattacaccgaaatgaagaaggcgatcctgcatgtgtactgggaagagttccagaaggaccctgtgggcctgatgagccgggtggcccagcctgccagcaagaagatcgatcagaacaagctgaaacctgagatggacgagaagggcaacctgaccaccgccggctttgcctgctctcagtgtggccagcccctgttcgtgtacaagctggagcaggtgtctgagaagggcaaggcttacaccaactacttcggacggtgcaatgtggccgagcacgaaaagctgatcctgctggcccagctgaagcccgagaaggatagcgacgaagccgtgacatatagcctgggaaagtttgggcagagggccctggatttctacagcattcatgtgaccaaggagtccacccaccccgtgaagcccctggcccagatcgccggaaacagatacgcctccggacctgtgggaaaggccctgagcgacgcatgtatgggcacaatcgcctccttcctgtctaagtaccaggacatcatcatcgaacaccagaaggtggtgaagggcaaccagaagagactggagagcctgcgggagctggccggcaaggaaaacctggaataccctagcgtgaccctgccacctcagcctcacaccaaggagggcgttgatgcctacaacgaagtgatcgcccgggtgcgaatgtgggtgaacctgaacctgtggcagaagctgaagctaagcagagatgatgccaagcctctgctgagactgaagggattcccttcctttcctctggtcgagagacaggccaacgaagtggactggtgggacatggtgtgtaacgtgaagaagctgatcaacgagaaaaaggaggatggcaaggtgttttggcagaatctggctggctacaagagacaggaagccctgagaccatacctgagcagcgaggaagatcggaagaagggaaagaaattcgctcggtaccagctgggcgacctgctgctgcacctggaaaagaagcacggcgaggactggggaaaggtgtacgacgaggcctgggagcggattgacaagaaagtggaaggcctgagcaagcacatcaagctggaagaggaacggagaagcgaggacgcccagagcaaggccgccctgaccgactggctgcgggctaaggccagcttcgtgatcgagggcctgaaggaggccgacaaggacgagttctgcagatgcgagctgaagctgcagaagtggtacggggacctgcggggaaagcccttcgccatcgaagccgagaacagcatcctggacatcagcggcttcagcaagcagtacaactgtgccttcatctggcagaaggacggcgtgaagaagctgaacctgtacctgatcatcaactacttcaagggcggcaagctgcggttcaagaagatcaaacctgaagccttcgaagccaacagattctacaccgtgatcaacaaaaagagcggcgagatcgtgcccatggaggtgaacttcaacttcgacgaccccaacctgatcatcctgcctctggcctttggcaagagacagggcagagaattcatctggaacgacctgctgtccctggaaaccggcagcctgaagctggccaacggaagagtgatcgagaagacactgtacaacagaagaacccggcaggatgagcctgccctgttcgtggccctgaccttcgagcggcgggaggtcctggactcctccaatatcaaaccaatgaacctgatcggcgtggcaagaggcgaaaacatccccgccgtgatcgccctgaccgaccccgagggctgcccactgagccggtttaaggatagcctgggaaacccaacccacatcctgagaatcggcgagagctataaggagaagcagcggaccatccaggccaagaaggaggtggagcagcggagagccggcggctacagccggaagtacgccagcaaagccaagaatctggcagacgatatggtgagaaacaccgctagagatctgctgtactacgccgtgacccaggatgccatgctgatcttcgccaacctgagccggggcttcggccggcagggcaagcggaccttcatggccgagagacagtacacacggatggaggactggctgaccgccaagctggcctacgagggcctgagcaagacctacctgtccaagacactggcccagtacacctccaagacatgcagcaactgtgggtttaccatcaccagcgccgactacgacagggtgctggagaagctgaagaagacagcaacaggctggatgaccacaattaacggcaaggagctgaaggtggagggccagattacctactacaacagatacaagagacagaacgtagtcaaggacctgtccgtcgagctggatagactgagcgaagaatctgtgaacaacgacatctcctcctggacaaagggcagaagcggagaagctctgagcctcctgaagaaaagattctcccatagacccgtgcaggagaagttcgtgtgcctgaactgcggcttcgagacacacgcagccgagcaagccgccctgaacatcgccagatcctggctgttcctgcggagccaggagtacaagaaataccagacaaacaagacaaccggcaacaccgataagagagccttcgtcgagacctggcagtccttttaccggaagaagcttaaggaggtgtggaaacctgccgtgcggtctggcggatctggcggaggctccaccagccccaagaaaaagagaaaagtctaagctgccttctgcggggcttgccttctggccatgcccttcttctctcccttgcacctgtacctcttggtctttgaataaagcctgagtaggaaggctagcaaaaaaaaaaaaaaaaaaaaaaaaaaaaaaaaaaaaaaaaaaaaaaaaaaaaaaaaaaaaaaaaaaaaaaaaaaaaaaaagcccagccggctccccaacctctaccgaggagggcacctctgagtccgccacccccgagagcggccctggcacctccaccgagcccagcgagggcagcgcacccggcagccctgccggcagccccacctccacagaggagggaaccagcaccgagcccagcgaaggcagcgccccaggcaccagcaccgagcctagtgagcaggagattaaacggatcaacaagatcagaagaagacttgtgaaagacagcaacaccaagaaggccggcaagacaggccccatgaaaaccctgctggttagagtgatgacacccgatctgagagagcggctggaaaacctgagaaagaagcctgaaaatatcccccagcccatcagcaatacatctagagccaacctgaataagctgctgaccgattacaccgaaatgaagaaggcgatcctgcatgtgtactgggaagagttccagaaggaccctgtgggcctgatgagccgggtggcccagcctgccagcaagaagatcgatcagaacaagctgaaacctgagatggacgagaagggcaacctgaccaccgccggctttgcctgctctcagtgtggccagcccctgttcgtgtacaagctggagcaggtgtctgagaagggcaaggcttacaccaactacttcggacggtgcaatgtggccgagcacgaaaagctgatcctgctggcccagctgaagcccgagaaggatagcgacgaagccgtgacatatagcctgggaaagtttgggcagagggccctggatttctacagcattcatgtgaccaaggagtccacccaccccgtgaagcccctggcccagatcgccggaaacagatacgcctccggacctgtgggaaaggccctgagcgacgcatgtatgggcacaatcgcctccttcctgtctaagtaccaggacatcatcatcgaacaccagaaggtggtgaagggcaaccagaagagactggagagcctgcgggagctggccggcaaggaaaacctggaataccctagcgtgaccctgccacctcagcctcacaccaaggagggcgttgatgcctacaacgaagtgatcgcccgggtgcgaatgtgggtgaacctgaacctgtggcagaagctgaagctaagcagagatgatgccaagcctctgctgagactgaagggattcccttcctttcctctggtcgagagacaggccaacgaagtggactggtgggacatggtgtgtaacgtgaagaagctgatcaacgagaaaaaggaggatggcaaggtgttttggcagaatctggctggctacaagagacaggaagccctgagaccatacctgagcagcgaggaagatcggaagaagggaaagaaattcgctcggtaccagctgggcgacctgctgctgcacctggaaaagaagcacggcgaggactggggaaaggtgtacgacgaggcctgggagcggattgacaagaaagtggaaggcctgagcaagcacatcaagctggaagaggaacggagaagcgaggacgcccagagcaaggccgccctgaccgactggctgcgggctaaggccagcttcgtgatcgagggcctgaaggaggccgacaaggacgagttctgcagatgcgagctgaagctgcagaagtggtacggggacctgcggggaaagcccttcgccatcgaagccgagaacagcatcctggacatcagcggcttcagcaagcagtacaactgtgccttcatctggcagaaggacggcgtgaagaagctgaacctgtacctgatcatcaactacttcaagggcggcaagctgcggttcaagaagatcaaacctgaagccttcgaagccaacagattctacaccgtgatcaacaaaaagagcggcgagatcgtgcccatggaggtgaacttcaacttcgacgaccccaacctgatcatcctgcctctggcctttggcaagagacagggcagagaattcatctggaacgacctgctgtccctggaaaccggcagcctgaagctggccaacggaagagtgatcgagaagacactgtacaacagaagaacccggcaggatgagcctgccctgttcgtggccctgaccttcgagcggcgggaggtcctggactcctccaatatcaaaccaatgaacctgatcggcgtggcaagaggcgaaaacatccccgccgtgatcgccctgaccgaccccgagggctgcccactgagccggtttaaggatagcctgggaaacccaacccacatcctgagaatcggcgagagctataaggagaagcagcggaccatccaggccaagaaggaggtggagcagcggagagccggcggctacagccggaagtacgccagcaaagccaagaatctggcagacgatatggtgagaaacaccgctagagatctgctgtactacgccgtgacccaggatgccatgctgatcttcgccaacctgagccggggcttcggccggcagggcaagcggaccttcatggccgagagacagtacacacggatggaggactggctgaccgccaagctggcctacgagggcctgagcaagacctacctgtccaagacactggcccagtacacctccaagacatgcagcaactgtgggtttaccatcaccagcgccgactacgacagggtgctggagaagctgaagaagacagcaacaggctggatgaccacaattaacggcaaggagctgaaggtggagggccagattacctactacaacagatacaagagacagaacgtagtcaaggacctgtccgtcgagctggatagactgagcgaagaatctgtgaacaacgacatctcctcctggacaaagggcagaagcggagaagctctgagcctcctgaagaaaagattctcccatagacccgtgcaggagaagttcgtgtgcctgaactgcggcttcgagacacacgcagccgagcaagccgccctgaacatcgccagatcctggctgttcctgcggagccaggagtacaagaaataccagacaaacaagacaaccggcaacaccgataagagagccttcgtcgagacctggcagtccttttaccggaagaagcttaaggaggtgtggaaacctgccgtgcggtctggcggatctggcggaggctccaccagccccaagaaaaagagaaaagtctaagctgccttctgcggggcttgccttctggccatgcccttcttctctcccttgcacctgtacctcttggtctttgaataaagcctgagtaggaaggctagcaaaaaaaaaaaaaaaaaaaaaaaaaaaaaaaaaaaaaaaaaaaaaaaaaaaaaaaaaaaaaaaaaaaaaaaaaaaaaaaa

SEQ ID NO: 8930 - RNA, 8787 nt, synthetic construct
  source 1..8787: mol_type = other RNA
aggaaataagagagaaaagaagagtaagaagaaatataagagccaccatggcccctaagaagaagcgtaaagtgagccggatgaaccacgaccaggagttcgacccccctaaggtgtaccctcccgtccccgccgagaagagaaagcccatccgggtcctgagcctgttcgatggcatcgccaccggtctgctggtgctgaaggacctgggcatccaggtggataggtacattgcctccgaggtgtgcgaggactccatcaccgtgggaatggtgcgtcatcagggcaagatcatgtacgtgggcgacgtgcggagcgtgacacagaagcatatccaggagtggggccctttcgacctggtgatcggcggcagcccttgcaatgacctgagcatcgtgaacccagcccggaagggcctgtacgagggaaccggcagactgttcttcgagttttacagactgctgcacgacgcccggcctaaggaaggcgacgaccggcccttcttttggctgttcgagaatgtggtggccatgggagtcagcgacaagcgggatattagccggttcctggagagcaaccccgtgatgatcgatgccaaggaagtgagcgccgcccaccgggccagatacttctggggcaatctgcctggcatgaacagacccctggccagcaccgtgaacgacaagctggagctgcaggagtgcctggagcacggccggatcgccaagttcagcaaggtgagaaccatcaccacccgaagcaacagcatcaaacaaggcaaggaccagcactttcctgtgttcatgaacgagaaggaggacatcctgtggtgtaccgagatggagagagtgttcgggttcccagtccactacacagatgtcagcaacatgtctagactggccagacagagactgctgggaagaagctggtccgtccctgtgatcagacacctgttcgcccctctgaaggagtacttcgcctgcgtgagcagcggcaacagcaacgccaacagccggggccccagcttctctagcggcctggtgccactgtccctgagagggagccacatgggccccatggagatctacaaaaccgtgagcgcctggaagcggcagcctgtgcgcgtgctgagcctgtttcggaatatcgataaagtcctgaaaagcctgggattcctggagagcggctctggctccggcggtggcaccctgaagtacgtggaggatgtgacaaacgtggtcagacgggatgtggagaagtggggccccttcgatctggtgtacggcagcacccaacccctgggcagctcttgtgaccggtgccctggctggtacatgtttcagttccaccggatcctgcagtacgccctgccgagacaggagtcccagcggccattcttttggattttcatggacaacttgctgctgaccgaggatgaccaggaaactaccactcggttcctgcagaccgaagccgtgaccctgcaggacgtgagaggccgggactaccagaacgccatgcgggtgtggtccaacatccctggactgaaaagcaagcacgcacctctgacccctaaagaagaggagtacctgcaggcccaggtgcggagcagaagcaagctggacgcccctaaggtggatctgctggtgaagaattgcctcctgcccctgagagagtacttcaagtatttcagccagaatagtctgcccctgggaggcagcggcggcggcgccctgaggagcgtgatgttcagcgacatcagcatcgacttcagccccgaggagtgggactgcctggacctggagcagaaggacctgtacagggacgtgatgctggagaactacagcaacctggtgagcctgggctgcttcatcagcaagcccgacgtgatcagcctgctggagcagggcaaggagccctggaaggtggtgaggaagaggaggggccagtgccccgacctgcagaccaagtacggcggcccaagcagcggcgcccctcctcccagcggcggcaggcggcccaagcagcggcgcccctcctcccagcggcggcagcccagccggctccccaacctctaccgaggagggcacctctgagtccgccacccccgagagcggccctggcacctccaccgagcccagcgagggcagcgcacccggcagccctgccggcagccccacctccacagaggagggaaccagcaccgagcccagcgaaggcagcgccccaggcaccagcaccgagcctagtgagcaggagattaaacggatcaacaagatcagaagaagacttgtgaaagacagcaacaccaagaaggccggcaagacaggccccatgaaaaccctgctggttagagtgatgacacccgatctgagagagcggctggaaaacctgagaaagaagcctgaaaatatcccccagcccatcagcaatacatctagagccaacctgaataagctgctgaccgattacaccgaaatgaagaaggcgatcctgcatgtgtactgggaagagttccagaaggaccctgtgggcctgatgagccgggtggcccagcctgccagcaagaagatcgatcagaacaagctgaaacctgagatggacgagaagggcaacctgaccaccgccggctttgcctgctctcagtgtggccagcccctgttcgtgtacaagctggagcaggtgtctgagaagggcaaggcttacaccaactacttcggacggtgcaatgtggccgagcacgaaaagctgatcctgctggcccagctgaagcccgagaaggatagcgacgaagccgtgacatatagcctgggaaagtttgggcagagggccctggatttctacagcattcatgtgaccaaggagtccacccaccccgtgaagcccctggcccagatcgccggaaacagatacgcctccggacctgtgggaaaggccctgagcgacgcatgtatgggcacaatcgcctccttcctgtctaagtaccaggacatcatcatcgaacaccagaaggtggtgaagggcaaccagaagagactggagagcctgcgggagctggccggcaaggaaaacctggaataccctagcgtgaccctgccacctcagcctcacaccaaggagggcgttgatgcctacaacgaagtgatcgcccgggtgcgaatgtgggtgaacctgaacctgtggcagaagctgaagctaagcagagatgatgccaagcctctgctgagactgaagggattcccttcctttcctctggtcgagagacaggccaacgaagtggactggtgggacatggtgtgtaacgtgaagaagctgatcaacgagaaaaaggaggatggcaaggtgttttggcagaatctggctggctacaagagacaggaagccctgagaccatacctgagcagcgaggaagatcggaagaagggaaagaaattcgctcggtaccagctgggcgacctgctgctgcacctggaaaagaagcacggcgaggactggggaaaggtgtacgacgaggcctgggagcggattgacaagaaagtggaaggcctgagcaagcacatcaagctggaagaggaacggagaagcgaggacgcccagagcaaggccgccctgaccgactggctgcgggctaaggccagcttcgtgatcgagggcctgaaggaggccgacaaggacgagttctgcagatgcgagctgaagctgcagaagtggtacggggacctgcggggaaagcccttcgccatcgaagccgagaacagcatcctggacatcagcggcttcagcaagcagtacaactgtgccttcatctggcagaaggacggcgtgaagaagctgaacctgtacctgatcatcaactacttcaagggcggcaagctgcggttcaagaagatcaaacctgaagccttcgaagccaacagattctacaccgtgatcaacaaaaagagcggcgagatcgtgcccatggaggtgaacttcaacttcgacgaccccaacctgatcatcctgcctctggcctttggcaagagacagggcagagaattcatctggaacgacctgctgtccctggaaaccggcagcctgaagctggccaacggaagagtgatcgagaagacactgtacaacagaagaacccggcaggatgagcctgccctgttcgtggccctgaccttcgagcggcgggaggtcctggactcctccaatatcaaaccaatgaacctgatcggcgtggcaagaggcgaaaacatccccgccgtgatcgccctgaccgaccccgagggctgcccactgagccggtttaaggatagcctgggaaacccaacccacatcctgagaatcggcgagagctataaggagaagcagcggaccatccaggccaagaaggaggtggagcagcggagagccggcggctacagccggaagtacgccagcaaagccaagaatctggcagacgatatggtgagaaacaccgctagagatctgctgtactacgccgtgacccaggatgccatgctgatcttcgccaacctgagccggggcttcggccggcagggcaagcggaccttcatggccgagagacagtacacacggatggaggactggctgaccgccaagctggcctacgagggcctgagcaagacctacctgtccaagacactggcccagtacacctccaagacatgcagcaactgtgggtttaccatcaccagcgccgactacgacagggtgctggagaagctgaagaagacagcaacaggctggatgaccacaattaacggcaaggagctgaaggtggagggccagattacctactacaacagatacaagagacagaacgtagtcaaggacctgtccgtcgagctggatagactgagcgaagaatctgtgaacaacgacatctcctcctggacaaagggcagaagcggagaagctctgagcctcctgaagaaaagattctcccatagacccgtgcaggagaagttcgtgtgcctgaactgcggcttcgagacacacgcagccgagcaagccgccctgaacatcgccagatcctggctgttcctgcggagccaggagtacaagaaataccagacaaacaagacaaccggcaacaccgataagagagccttcgtcgagacctggcagtccttttaccggaagaagcttaaggaggtgtggaaacctgccgtgcggtctggcggatctggcggaggctccaccagccccaagaaaaagagaaaagtctaagctgccttctgcggggcttgccttctggccatgcccttcttctctcccttgcacctgtacctcttggtctttgaataaagcctgagtaggaaggctagcaaaaaaaaaaaaaaaaaaaaaaaaaaaaaaaaaaaaaaaaaaaaaaaaaaaaaaaaaaaaaaaaaaaaaaaaaaaaaaaagcccagccggctccccaacctctaccgaggagggcacctctgagtccgccacccccgagagcggccctggcacctccaccgagcccagcgagggcagcgcacccggcagccctgccggcagccccacctccacagaggagggaaccagcaccgagcccagcgaaggcagcgccccaggcaccagcaccgagcctagtgagcaggagattaaacggatcaacaagatcagaagaagacttgtgaaagacagcaacaccaagaaggccggcaagacaggccccatgaaaaccctgctggttagagtgatgacacccgatctgagagagcggctggaaaacctgagaaagaagcctgaaaatatcccccagcccatcagcaatacatctagagccaacctgaataagctgctgaccgattacaccgaaatgaagaaggcgatcctgcatgtgtactgggaagagttccagaaggaccctgtgggcctgatgagccgggtggcccagcctgccagcaagaagatcgatcagaacaagctgaaacctgagatggacgagaagggcaacctgaccaccgccggctttgcctgctctcagtgtggccagcccctgttcgtgtacaagctggagcaggtgtctgagaagggcaaggcttacaccaactacttcggacggtgcaatgtggccgagcacgaaaagctgatcctgctggcccagctgaagcccgagaaggatagcgacgaagccgtgacatatagcctgggaaagtttgggcagagggccctggatttctacagcattcatgtgaccaaggagtccacccaccccgtgaagcccctggcccagatcgccggaaacagatacgcctccggacctgtgggaaaggccctgagcgacgcatgtatgggcacaatcgcctccttcctgtctaagtaccaggacatcatcatcgaacaccagaaggtggtgaagggcaaccagaagagactggagagcctgcgggagctggccggcaaggaaaacctggaataccctagcgtgaccctgccacctcagcctcacaccaaggagggcgttgatgcctacaacgaagtgatcgcccgggtgcgaatgtgggtgaacctgaacctgtggcagaagctgaagctaagcagagatgatgccaagcctctgctgagactgaagggattcccttcctttcctctggtcgagagacaggccaacgaagtggactggtgggacatggtgtgtaacgtgaagaagctgatcaacgagaaaaaggaggatggcaaggtgttttggcagaatctggctggctacaagagacaggaagccctgagaccatacctgagcagcgaggaagatcggaagaagggaaagaaattcgctcggtaccagctgggcgacctgctgctgcacctggaaaagaagcacggcgaggactggggaaaggtgtacgacgaggcctgggagcggattgacaagaaagtggaaggcctgagcaagcacatcaagctggaagaggaacggagaagcgaggacgcccagagcaaggccgccctgaccgactggctgcgggctaaggccagcttcgtgatcgagggcctgaaggaggccgacaaggacgagttctgcagatgcgagctgaagctgcagaagtggtacggggacctgcggggaaagcccttcgccatcgaagccgagaacagcatcctggacatcagcggcttcagcaagcagtacaactgtgccttcatctggcagaaggacggcgtgaagaagctgaacctgtacctgatcatcaactacttcaagggcggcaagctgcggttcaagaagatcaaacctgaagccttcgaagccaacagattctacaccgtgatcaacaaaaagagcggcgagatcgtgcccatggaggtgaacttcaacttcgacgaccccaacctgatcatcctgcctctggcctttggcaagagacagggcagagaattcatctggaacgacctgctgtccctggaaaccggcagcctgaagctggccaacggaagagtgatcgagaagacactgtacaacagaagaacccggcaggatgagcctgccctgttcgtggccctgaccttcgagcggcgggaggtcctggactcctccaatatcaaaccaatgaacctgatcggcgtggcaagaggcgaaaacatccccgccgtgatcgccctgaccgaccccgagggctgcccactgagccggtttaaggatagcctgggaaacccaacccacatcctgagaatcggcgagagctataaggagaagcagcggaccatccaggccaagaaggaggtggagcagcggagagccggcggctacagccggaagtacgccagcaaagccaagaatctggcagacgatatggtgagaaacaccgctagagatctgctgtactacgccgtgacccaggatgccatgctgatcttcgccaacctgagccggggcttcggccggcagggcaagcggaccttcatggccgagagacagtacacacggatggaggactggctgaccgccaagctggcctacgagggcctgagcaagacctacctgtccaagacactggcccagtacacctccaagacatgcagcaactgtgggtttaccatcaccagcgccgactacgacagggtgctggagaagctgaagaagacagcaacaggctggatgaccacaattaacggcaaggagctgaaggtggagggccagattacctactacaacagatacaagagacagaacgtagtcaaggacctgtccgtcgagctggatagactgagcgaagaatctgtgaacaacgacatctcctcctggacaaagggcagaagcggagaagctctgagcctcctgaagaaaagattctcccatagacccgtgcaggagaagttcgtgtgcctgaactgcggcttcgagacacacgcagccgagcaagccgccctgaacatcgccagatcctggctgttcctgcggagccaggagtacaagaaataccagacaaacaagacaaccggcaacaccgataagagagccttcgtcgagacctggcagtccttttaccggaagaagcttaaggaggtgtggaaacctgccgtgcggtctggcggatctggcggaggctccaccagccccaagaaaaagagaaaagtctaagctgccttctgcggggcttgccttctggccatgcccttcttctctcccttgcacctgtacctcttggtctttgaataaagcctgagtaggaaggctagcaaaaaaaaaaaaaaaaaaaaaaaaaaaaaaaaaaaaaaaaaaaaaaaaaaaaaaaaaaaaaaaaaaaaaaaaaaaaaaaa

SEQ ID NO: 8931 - RNA, 8787 nt, synthetic construct
  source 1..8787: mol_type = other RNA
aggaaataagagagaaaagaagagtaagaagaaatataagagccaccatggcccctaagaagaagcgtaaagtgagccggatgaaccacgaccaggagttcgacccccctaaggtgtaccctcccgtccccgccgagaagagaaagcccatccgggtcctgagcctgttcgatggcatcgccaccggtctgctggtgctgaaggacctgggcatccaggtggataggtacattgcctccgaggtgtgcgaggactccatcaccgtgggaatggtgcgtcatcagggcaagatcatgtacgtgggcgacgtgcggagcgtgacacagaagcatatccaggagtggggccctttcgacctggtgatcggcggcagcccttgcaatgacctgagcatcgtgaacccagcccggaagggcctgtacgagggaaccggcagactgttcttcgagttttacagactgctgcacgacgcccggcctaaggaaggcgacgaccggcccttcttttggctgttcgagaatgtggtggccatgggagtcagcgacaagcgggatattagccggttcctggagagcaaccccgtgatgatcgatgccaaggaagtgagcgccgcccaccgggccagatacttctggggcaatctgcctggcatgaacagacccctggccagcaccgtgaacgacaagctggagctgcaggagtgcctggagcacggccggatcgccaagttcagcaaggtgagaaccatcaccacccgaagcaacagcatcaaacaaggcaaggaccagcactttcctgtgttcatgaacgagaaggaggacatcctgtggtgtaccgagatggagagagtgttcgggttcccagtccactacacagatgtcagcaacatgtctagactggccagacagagactgctgggaagaagctggtccgtccctgtgatcagacacctgttcgcccctctgaaggagtacttcgcctgcgtgagcagcggcaacagcaacgccaacagccggggccccagcttctctagcggcctggtgccactgtccctgagagggagccacatgggccccatggagatctacaaaaccgtgagcgcctggaagcggcagcctgtgcgcgtgctgagcctgtttcggaatatcgataaagtcctgaaaagcctgggattcctggagagcggctctggctccggcggtggcaccctgaagtacgtggaggatgtgacaaacgtggtcagacgggatgtggagaagtggggccccttcgatctggtgtacggcagcacccaacccctgggcagctcttgtgaccggtgccctggctggtacatgtttcagttccaccggatcctgcagtacgccctgccgagacaggagtcccagcggccattcttttggattttcatggacaacttgctgctgaccgaggatgaccaggaaactaccactcggttcctgcagaccgaagccgtgaccctgcaggacgtgagaggccgggactaccagaacgccatgcgggtgtggtccaacatccctggactgaaaagcaagcacgcacctctgacccctaaagaagaggagtacctgcaggcccaggtgcggagcagaagcaagctggacgcccctaaggtggatctgctggtgaagaattgcctcctgcccctgagagagtacttcaagtatttcagccagaatagtctgcccctgggaggcagcggcggcggcgccagggtggccgtgatgttcagcgacgtgagcatcgccttcagccaggaggagtgggagtacctggacctggcccagagggacctgtacaaggacgtgatgatggagaactacaggaacgtggccagcctggccggctgcttcatcagcaagcccgacgtgatcagcctgctggagcagggcaaggagccctggaaggtggtgaggaagaggaggaggaaccccgacctggagaccaaggacggcggcccaagcagcggcgcccctcctcccagcggcggcaggcggcccaagcagcggcgcccctcctcccagcggcggcagcccagccggctccccaacctctaccgaggagggcacctctgagtccgccacccccgagagcggccctggcacctccaccgagcccagcgagggcagcgcacccggcagccctgccggcagccccacctccacagaggagggaaccagcaccgagcccagcgaaggcagcgccccaggcaccagcaccgagcctagtgagcaggagattaaacggatcaacaagatcagaagaagacttgtgaaagacagcaacaccaagaaggccggcaagacaggccccatgaaaaccctgctggttagagtgatgacacccgatctgagagagcggctggaaaacctgagaaagaagcctgaaaatatcccccagcccatcagcaatacatctagagccaacctgaataagctgctgaccgattacaccgaaatgaagaaggcgatcctgcatgtgtactgggaagagttccagaaggaccctgtgggcctgatgagccgggtggcccagcctgccagcaagaagatcgatcagaacaagctgaaacctgagatggacgagaagggcaacctgaccaccgccggctttgcctgctctcagtgtggccagcccctgttcgtgtacaagctggagcaggtgtctgagaagggcaaggcttacaccaactacttcggacggtgcaatgtggccgagcacgaaaagctgatcctgctggcccagctgaagcccgagaaggatagcgacgaagccgtgacatatagcctgggaaagtttgggcagagggccctggatttctacagcattcatgtgaccaaggagtccacccaccccgtgaagcccctggcccagatcgccggaaacagatacgcctccggacctgtgggaaaggccctgagcgacgcatgtatgggcacaatcgcctccttcctgtctaagtaccaggacatcatcatcgaacaccagaaggtggtgaagggcaaccagaagagactggagagcctgcgggagctggccggcaaggaaaacctggaataccctagcgtgaccctgccacctcagcctcacaccaaggagggcgttgatgcctacaacgaagtgatcgcccgggtgcgaatgtgggtgaacctgaacctgtggcagaagctgaagctaagcagagatgatgccaagcctctgctgagactgaagggattcccttcctttcctctggtcgagagacaggccaacgaagtggactggtgggacatggtgtgtaacgtgaagaagctgatcaacgagaaaaaggaggatggcaaggtgttttggcagaatctggctggctacaagagacaggaagccctgagaccatacctgagcagcgaggaagatcggaagaagggaaagaaattcgctcggtaccagctgggcgacctgctgctgcacctggaaaagaagcacggcgaggactggggaaaggtgtacgacgaggcctgggagcggattgacaagaaagtggaaggcctgagcaagcacatcaagctggaagaggaacggagaagcgaggacgcccagagcaaggccgccctgaccgactggctgcgggctaaggccagcttcgtgatcgagggcctgaaggaggccgacaaggacgagttctgcagatgcgagctgaagctgcagaagtggtacggggacctgcggggaaagcccttcgccatcgaagccgagaacagcatcctggacatcagcggcttcagcaagcagtacaactgtgccttcatctggcagaaggacggcgtgaagaagctgaacctgtacctgatcatcaactacttcaagggcggcaagctgcggttcaagaagatcaaacctgaagccttcgaagccaacagattctacaccgtgatcaacaaaaagagcggcgagatcgtgcccatggaggtgaacttcaacttcgacgaccccaacctgatcatcctgcctctggcctttggcaagagacagggcagagaattcatctggaacgacctgctgtccctggaaaccggcagcctgaagctggccaacggaagagtgatcgagaagacactgtacaacagaagaacccggcaggatgagcctgccctgttcgtggccctgaccttcgagcggcgggaggtcctggactcctccaatatcaaaccaatgaacctgatcggcgtggcaagaggcgaaaacatccccgccgtgatcgccctgaccgaccccgagggctgcccactgagccggtttaaggatagcctgggaaacccaacccacatcctgagaatcggcgagagctataaggagaagcagcggaccatccaggccaagaaggaggtggagcagcggagagccggcggctacagccggaagtacgccagcaaagccaagaatctggcagacgatatggtgagaaacaccgctagagatctgctgtactacgccgtgacccaggatgccatgctgatcttcgccaacctgagccggggcttcggccggcagggcaagcggaccttcatggccgagagacagtacacacggatggaggactggctgaccgccaagctggcctacgagggcctgagcaagacctacctgtccaagacactggcccagtacacctccaagacatgcagcaactgtgggtttaccatcaccagcgccgactacgacagggtgctggagaagctgaagaagacagcaacaggctggatgaccacaattaacggcaaggagctgaaggtggagggccagattacctactacaacagatacaagagacagaacgtagtcaaggacctgtccgtcgagctggatagactgagcgaagaatctgtgaacaacgacatctcctcctggacaaagggcagaagcggagaagctctgagcctcctgaagaaaagattctcccatagacccgtgcaggagaagttcgtgtgcctgaactgcggcttcgagacacacgcagccgagcaagccgccctgaacatcgccagatcctggctgttcctgcggagccaggagtacaagaaataccagacaaacaagacaaccggcaacaccgataagagagccttcgtcgagacctggcagtccttttaccggaagaagcttaaggaggtgtggaaacctgccgtgcggtctggcggatctggcggaggctccaccagccccaagaaaaagagaaaagtctaagctgccttctgcggggcttgccttctggccatgcccttcttctctcccttgcacctgtacctcttggtctttgaataaagcctgagtaggaaggctagcaaaaaaaaaaaaaaaaaaaaaaaaaaaaaaaaaaaaaaaaaaaaaaaaaaaaaaaaaaaaaaaaaaaaaaaaaaaaaaaagcccagccggctccccaacctctaccgaggagggcacctctgagtccgccacccccgagagcggccctggcacctccaccgagcccagcgagggcagcgcacccggcagccctgccggcagccccacctccacagaggagggaaccagcaccgagcccagcgaaggcagcgccccaggcaccagcaccgagcctagtgagcaggagattaaacggatcaacaagatcagaagaagacttgtgaaagacagcaacaccaagaaggccggcaagacaggccccatgaaaaccctgctggttagagtgatgacacccgatctgagagagcggctggaaaacctgagaaagaagcctgaaaatatcccccagcccatcagcaatacatctagagccaacctgaataagctgctgaccgattacaccgaaatgaagaaggcgatcctgcatgtgtactgggaagagttccagaaggaccctgtgggcctgatgagccgggtggcccagcctgccagcaagaagatcgatcagaacaagctgaaacctgagatggacgagaagggcaacctgaccaccgccggctttgcctgctctcagtgtggccagcccctgttcgtgtacaagctggagcaggtgtctgagaagggcaaggcttacaccaactacttcggacggtgcaatgtggccgagcacgaaaagctgatcctgctggcccagctgaagcccgagaaggatagcgacgaagccgtgacatatagcctgggaaagtttgggcagagggccctggatttctacagcattcatgtgaccaaggagtccacccaccccgtgaagcccctggcccagatcgccggaaacagatacgcctccggacctgtgggaaaggccctgagcgacgcatgtatgggcacaatcgcctccttcctgtctaagtaccaggacatcatcatcgaacaccagaaggtggtgaagggcaaccagaagagactggagagcctgcgggagctggccggcaaggaaaacctggaataccctagcgtgaccctgccacctcagcctcacaccaaggagggcgttgatgcctacaacgaagtgatcgcccgggtgcgaatgtgggtgaacctgaacctgtggcagaagctgaagctaagcagagatgatgccaagcctctgctgagactgaagggattcccttcctttcctctggtcgagagacaggccaacgaagtggactggtgggacatggtgtgtaacgtgaagaagctgatcaacgagaaaaaggaggatggcaaggtgttttggcagaatctggctggctacaagagacaggaagccctgagaccatacctgagcagcgaggaagatcggaagaagggaaagaaattcgctcggtaccagctgggcgacctgctgctgcacctggaaaagaagcacggcgaggactggggaaaggtgtacgacgaggcctgggagcggattgacaagaaagtggaaggcctgagcaagcacatcaagctggaagaggaacggagaagcgaggacgcccagagcaaggccgccctgaccgactggctgcgggctaaggccagcttcgtgatcgagggcctgaaggaggccgacaaggacgagttctgcagatgcgagctgaagctgcagaagtggtacggggacctgcggggaaagcccttcgccatcgaagccgagaacagcatcctggacatcagcggcttcagcaagcagtacaactgtgccttcatctggcagaaggacggcgtgaagaagctgaacctgtacctgatcatcaactacttcaagggcggcaagctgcggttcaagaagatcaaacctgaagccttcgaagccaacagattctacaccgtgatcaacaaaaagagcggcgagatcgtgcccatggaggtgaacttcaacttcgacgaccccaacctgatcatcctgcctctggcctttggcaagagacagggcagagaattcatctggaacgacctgctgtccctggaaaccggcagcctgaagctggccaacggaagagtgatcgagaagacactgtacaacagaagaacccggcaggatgagcctgccctgttcgtggccctgaccttcgagcggcgggaggtcctggactcctccaatatcaaaccaatgaacctgatcggcgtggcaagaggcgaaaacatccccgccgtgatcgccctgaccgaccccgagggctgcccactgagccggtttaaggatagcctgggaaacccaacccacatcctgagaatcggcgagagctataaggagaagcagcggaccatccaggccaagaaggaggtggagcagcggagagccggcggctacagccggaagtacgccagcaaagccaagaatctggcagacgatatggtgagaaacaccgctagagatctgctgtactacgccgtgacccaggatgccatgctgatcttcgccaacctgagccggggcttcggccggcagggcaagcggaccttcatggccgagagacagtacacacggatggaggactggctgaccgccaagctggcctacgagggcctgagcaagacctacctgtccaagacactggcccagtacacctccaagacatgcagcaactgtgggtttaccatcaccagcgccgactacgacagggtgctggagaagctgaagaagacagcaacaggctggatgaccacaattaacggcaaggagctgaaggtggagggccagattacctactacaacagatacaagagacagaacgtagtcaaggacctgtccgtcgagctggatagactgagcgaagaatctgtgaacaacgacatctcctcctggacaaagggcagaagcggagaagctctgagcctcctgaagaaaagattctcccatagacccgtgcaggagaagttcgtgtgcctgaactgcggcttcgagacacacgcagccgagcaagccgccctgaacatcgccagatcctggctgttcctgcggagccaggagtacaagaaataccagacaaacaagacaaccggcaacaccgataagagagccttcgtcgagacctggcagtccttttaccggaagaagcttaaggaggtgtggaaacctgccgtgcggtctggcggatctggcggaggctccaccagccccaagaaaaagagaaaagtctaagctgccttctgcggggcttgccttctggccatgcccttcttctctcccttgcacctgtacctcttggtctttgaataaagcctgagtaggaaggctagcaaaaaaaaaaaaaaaaaaaaaaaaaaaaaaaaaaaaaaaaaaaaaaaaaaaaaaaaaaaaaaaaaaaaaaaaaaaaaaaa

SEQ ID NO: 8932 - RNA, 8787 nt, synthetic construct
  source 1..8787: mol_type = other RNA
aggaaataagagagaaaagaagagtaagaagaaatataagagccaccatggcccctaagaagaagcgtaaagtgagccggatgaaccacgaccaggagttcgacccccctaaggtgtaccctcccgtccccgccgagaagagaaagcccatccgggtcctgagcctgttcgatggcatcgccaccggtctgctggtgctgaaggacctgggcatccaggtggataggtacattgcctccgaggtgtgcgaggactccatcaccgtgggaatggtgcgtcatcagggcaagatcatgtacgtgggcgacgtgcggagcgtgacacagaagcatatccaggagtggggccctttcgacctggtgatcggcggcagcccttgcaatgacctgagcatcgtgaacccagcccggaagggcctgtacgagggaaccggcagactgttcttcgagttttacagactgctgcacgacgcccggcctaaggaaggcgacgaccggcccttcttttggctgttcgagaatgtggtggccatgggagtcagcgacaagcgggatattagccggttcctggagagcaaccccgtgatgatcgatgccaaggaagtgagcgccgcccaccgggccagatacttctggggcaatctgcctggcatgaacagacccctggccagcaccgtgaacgacaagctggagctgcaggagtgcctggagcacggccggatcgccaagttcagcaaggtgagaaccatcaccacccgaagcaacagcatcaaacaaggcaaggaccagcactttcctgtgttcatgaacgagaaggaggacatcctgtggtgtaccgagatggagagagtgttcgggttcccagtccactacacagatgtcagcaacatgtctagactggccagacagagactgctgggaagaagctggtccgtccctgtgatcagacacctgttcgcccctctgaaggagtacttcgcctgcgtgagcagcggcaacagcaacgccaacagccggggccccagcttctctagcggcctggtgccactgtccctgagagggagccacatgggccccatggagatctacaaaaccgtgagcgcctggaagcggcagcctgtgcgcgtgctgagcctgtttcggaatatcgataaagtcctgaaaagcctgggattcctggagagcggctctggctccggcggtggcaccctgaagtacgtggaggatgtgacaaacgtggtcagacgggatgtggagaagtggggccccttcgatctggtgtacggcagcacccaacccctgggcagctcttgtgaccggtgccctggctggtacatgtttcagttccaccggatcctgcagtacgccctgccgagacaggagtcccagcggccattcttttggattttcatggacaacttgctgctgaccgaggatgaccaggaaactaccactcggttcctgcagaccgaagccgtgaccctgcaggacgtgagaggccgggactaccagaacgccatgcgggtgtggtccaacatccctggactgaaaagcaagcacgcacctctgacccctaaagaagaggagtacctgcaggcccaggtgcggagcagaagcaagctggacgcccctaaggtggatctgctggtgaagaattgcctcctgcccctgagagagtacttcaagtatttcagccagaatagtctgcccctgggaggcagcggcggcggcccccagaagagcgtgaccttcgaggacgtggccgtgtacttcacccagaccgagtgggacggcctgagccccgcccagagggccctgtacagggacgtgatgctggagaactacggcaacgtggccagcctgggcttcagcctgctgaagcccgccgtgatcagccagctggagggcgccggcgagctgggcggccccagccccctggtggacggcaccgagaccggcccccagggcctgtggggcggcccaagcagcggcgcccctcctcccagcggcggcaggcggcccaagcagcggcgcccctcctcccagcggcggcagcccagccggctccccaacctctaccgaggagggcacctctgagtccgccacccccgagagcggccctggcacctccaccgagcccagcgagggcagcgcacccggcagccctgccggcagccccacctccacagaggagggaaccagcaccgagcccagcgaaggcagcgccccaggcaccagcaccgagcctagtgagcaggagattaaacggatcaacaagatcagaagaagacttgtgaaagacagcaacaccaagaaggccggcaagacaggccccatgaaaaccctgctggttagagtgatgacacccgatctgagagagcggctggaaaacctgagaaagaagcctgaaaatatcccccagcccatcagcaatacatctagagccaacctgaataagctgctgaccgattacaccgaaatgaagaaggcgatcctgcatgtgtactgggaagagttccagaaggaccctgtgggcctgatgagccgggtggcccagcctgccagcaagaagatcgatcagaacaagctgaaacctgagatggacgagaagggcaacctgaccaccgccggctttgcctgctctcagtgtggccagcccctgttcgtgtacaagctggagcaggtgtctgagaagggcaaggcttacaccaactacttcggacggtgcaatgtggccgagcacgaaaagctgatcctgctggcccagctgaagcccgagaaggatagcgacgaagccgtgacatatagcctgggaaagtttgggcagagggccctggatttctacagcattcatgtgaccaaggagtccacccaccccgtgaagcccctggcccagatcgccggaaacagatacgcctccggacctgtgggaaaggccctgagcgacgcatgtatgggcacaatcgcctccttcctgtctaagtaccaggacatcatcatcgaacaccagaaggtggtgaagggcaaccagaagagactggagagcctgcgggagctggccggcaaggaaaacctggaataccctagcgtgaccctgccacctcagcctcacaccaaggagggcgttgatgcctacaacgaagtgatcgcccgggtgcgaatgtgggtgaacctgaacctgtggcagaagctgaagctaagcagagatgatgccaagcctctgctgagactgaagggattcccttcctttcctctggtcgagagacaggccaacgaagtggactggtgggacatggtgtgtaacgtgaagaagctgatcaacgagaaaaaggaggatggcaaggtgttttggcagaatctggctggctacaagagacaggaagccctgagaccatacctgagcagcgaggaagatcggaagaagggaaagaaattcgctcggtaccagctgggcgacctgctgctgcacctggaaaagaagcacggcgaggactggggaaaggtgtacgacgaggcctgggagcggattgacaagaaagtggaaggcctgagcaagcacatcaagctggaagaggaacggagaagcgaggacgcccagagcaaggccgccctgaccgactggctgcgggctaaggccagcttcgtgatcgagggcctgaaggaggccgacaaggacgagttctgcagatgcgagctgaagctgcagaagtggtacggggacctgcggggaaagcccttcgccatcgaagccgagaacagcatcctggacatcagcggcttcagcaagcagtacaactgtgccttcatctggcagaaggacggcgtgaagaagctgaacctgtacctgatcatcaactacttcaagggcggcaagctgcggttcaagaagatcaaacctgaagccttcgaagccaacagattctacaccgtgatcaacaaaaagagcggcgagatcgtgcccatggaggtgaacttcaacttcgacgaccccaacctgatcatcctgcctctggcctttggcaagagacagggcagagaattcatctggaacgacctgctgtccctggaaaccggcagcctgaagctggccaacggaagagtgatcgagaagacactgtacaacagaagaacccggcaggatgagcctgccctgttcgtggccctgaccttcgagcggcgggaggtcctggactcctccaatatcaaaccaatgaacctgatcggcgtggcaagaggcgaaaacatccccgccgtgatcgccctgaccgaccccgagggctgcccactgagccggtttaaggatagcctgggaaacccaacccacatcctgagaatcggcgagagctataaggagaagcagcggaccatccaggccaagaaggaggtggagcagcggagagccggcggctacagccggaagtacgccagcaaagccaagaatctggcagacgatatggtgagaaacaccgctagagatctgctgtactacgccgtgacccaggatgccatgctgatcttcgccaacctgagccggggcttcggccggcagggcaagcggaccttcatggccgagagacagtacacacggatggaggactggctgaccgccaagctggcctacgagggcctgagcaagacctacctgtccaagacactggcccagtacacctccaagacatgcagcaactgtgggtttaccatcaccagcgccgactacgacagggtgctggagaagctgaagaagacagcaacaggctggatgaccacaattaacggcaaggagctgaaggtggagggccagattacctactacaacagatacaagagacagaacgtagtcaaggacctgtccgtcgagctggatagactgagcgaagaatctgtgaacaacgacatctcctcctggacaaagggcagaagcggagaagctctgagcctcctgaagaaaagattctcccatagacccgtgcaggagaagttcgtgtgcctgaactgcggcttcgagacacacgcagccgagcaagccgccctgaacatcgccagatcctggctgttcctgcggagccaggagtacaagaaataccagacaaacaagacaaccggcaacaccgataagagagccttcgtcgagacctggcagtccttttaccggaagaagcttaaggaggtgtggaaacctgccgtgcggtctggcggatctggcggaggctccaccagccccaagaaaaagagaaaagtctaagctgccttctgcggggcttgccttctggccatgcccttcttctctcccttgcacctgtacctcttggtctttgaataaagcctgagtaggaaggctagcaaaaaaaaaaaaaaaaaaaaaaaaaaaaaaaaaaaaaaaaaaaaaaaaaaaaaaaaaaaaaaaaaaaaaaaaaaaaaaaagcccagccggctccccaacctctaccgaggagggcacctctgagtccgccacccccgagagcggccctggcacctccaccgagcccagcgagggcagcgcacccggcagccctgccggcagccccacctccacagaggagggaaccagcaccgagcccagcgaaggcagcgccccaggcaccagcaccgagcctagtgagcaggagattaaacggatcaacaagatcagaagaagacttgtgaaagacagcaacaccaagaaggccggcaagacaggccccatgaaaaccctgctggttagagtgatgacacccgatctgagagagcggctggaaaacctgagaaagaagcctgaaaatatcccccagcccatcagcaatacatctagagccaacctgaataagctgctgaccgattacaccgaaatgaagaaggcgatcctgcatgtgtactgggaagagttccagaaggaccctgtgggcctgatgagccgggtggcccagcctgccagcaagaagatcgatcagaacaagctgaaacctgagatggacgagaagggcaacctgaccaccgccggctttgcctgctctcagtgtggccagcccctgttcgtgtacaagctggagcaggtgtctgagaagggcaaggcttacaccaactacttcggacggtgcaatgtggccgagcacgaaaagctgatcctgctggcccagctgaagcccgagaaggatagcgacgaagccgtgacatatagcctgggaaagtttgggcagagggccctggatttctacagcattcatgtgaccaaggagtccacccaccccgtgaagcccctggcccagatcgccggaaacagatacgcctccggacctgtgggaaaggccctgagcgacgcatgtatgggcacaatcgcctccttcctgtctaagtaccaggacatcatcatcgaacaccagaaggtggtgaagggcaaccagaagagactggagagcctgcgggagctggccggcaaggaaaacctggaataccctagcgtgaccctgccacctcagcctcacaccaaggagggcgttgatgcctacaacgaagtgatcgcccgggtgcgaatgtgggtgaacctgaacctgtggcagaagctgaagctaagcagagatgatgccaagcctctgctgagactgaagggattcccttcctttcctctggtcgagagacaggccaacgaagtggactggtgggacatggtgtgtaacgtgaagaagctgatcaacgagaaaaaggaggatggcaaggtgttttggcagaatctggctggctacaagagacaggaagccctgagaccatacctgagcagcgaggaagatcggaagaagggaaagaaattcgctcggtaccagctgggcgacctgctgctgcacctggaaaagaagcacggcgaggactggggaaaggtgtacgacgaggcctgggagcggattgacaagaaagtggaaggcctgagcaagcacatcaagctggaagaggaacggagaagcgaggacgcccagagcaaggccgccctgaccgactggctgcgggctaaggccagcttcgtgatcgagggcctgaaggaggccgacaaggacgagttctgcagatgcgagctgaagctgcagaagtggtacggggacctgcggggaaagcccttcgccatcgaagccgagaacagcatcctggacatcagcggcttcagcaagcagtacaactgtgccttcatctggcagaaggacggcgtgaagaagctgaacctgtacctgatcatcaactacttcaagggcggcaagctgcggttcaagaagatcaaacctgaagccttcgaagccaacagattctacaccgtgatcaacaaaaagagcggcgagatcgtgcccatggaggtgaacttcaacttcgacgaccccaacctgatcatcctgcctctggcctttggcaagagacagggcagagaattcatctggaacgacctgctgtccctggaaaccggcagcctgaagctggccaacggaagagtgatcgagaagacactgtacaacagaagaacccggcaggatgagcctgccctgttcgtggccctgaccttcgagcggcgggaggtcctggactcctccaatatcaaaccaatgaacctgatcggcgtggcaagaggcgaaaacatccccgccgtgatcgccctgaccgaccccgagggctgcccactgagccggtttaaggatagcctgggaaacccaacccacatcctgagaatcggcgagagctataaggagaagcagcggaccatccaggccaagaaggaggtggagcagcggagagccggcggctacagccggaagtacgccagcaaagccaagaatctggcagacgatatggtgagaaacaccgctagagatctgctgtactacgccgtgacccaggatgccatgctgatcttcgccaacctgagccggggcttcggccggcagggcaagcggaccttcatggccgagagacagtacacacggatggaggactggctgaccgccaagctggcctacgagggcctgagcaagacctacctgtccaagacactggcccagtacacctccaagacatgcagcaactgtgggtttaccatcaccagcgccgactacgacagggtgctggagaagctgaagaagacagcaacaggctggatgaccacaattaacggcaaggagctgaaggtggagggccagattacctactacaacagatacaagagacagaacgtagtcaaggacctgtccgtcgagctggatagactgagcgaagaatctgtgaacaacgacatctcctcctggacaaagggcagaagcggagaagctctgagcctcctgaagaaaagattctcccatagacccgtgcaggagaagttcgtgtgcctgaactgcggcttcgagacacacgcagccgagcaagccgccctgaacatcgccagatcctggctgttcctgcggagccaggagtacaagaaataccagacaaacaagacaaccggcaacaccgataagagagccttcgtcgagacctggcagtccttttaccggaagaagcttaaggaggtgtggaaacctgccgtgcggtctggcggatctggcggaggctccaccagccccaagaaaaagagaaaagtctaagctgccttctgcggggcttgccttctggccatgcccttcttctctcccttgcacctgtacctcttggtctttgaataaagcctgagtaggaaggctagcaaaaaaaaaaaaaaaaaaaaaaaaaaaaaaaaaaaaaaaaaaaaaaaaaaaaaaaaaaaaaaaaaaaaaaaaaaaaaaaa

SEQ ID NO: 8933 - RNA, 8787 nt, synthetic construct
  source 1..8787: mol_type = other RNA
aggaaataagagagaaaagaagagtaagaagaaatataagagccaccatggcccctaagaagaagcgtaaagtgagccggatgaaccacgaccaggagttcgacccccctaaggtgtaccctcccgtccccgccgagaagagaaagcccatccgggtcctgagcctgttcgatggcatcgccaccggtctgctggtgctgaaggacctgggcatccaggtggataggtacattgcctccgaggtgtgcgaggactccatcaccgtgggaatggtgcgtcatcagggcaagatcatgtacgtgggcgacgtgcggagcgtgacacagaagcatatccaggagtggggccctttcgacctggtgatcggcggcagcccttgcaatgacctgagcatcgtgaacccagcccggaagggcctgtacgagggaaccggcagactgttcttcgagttttacagactgctgcacgacgcccggcctaaggaaggcgacgaccggcccttcttttggctgttcgagaatgtggtggccatgggagtcagcgacaagcgggatattagccggttcctggagagcaaccccgtgatgatcgatgccaaggaagtgagcgccgcccaccgggccagatacttctggggcaatctgcctggcatgaacagacccctggccagcaccgtgaacgacaagctggagctgcaggagtgcctggagcacggccggatcgccaagttcagcaaggtgagaaccatcaccacccgaagcaacagcatcaaacaaggcaaggaccagcactttcctgtgttcatgaacgagaaggaggacatcctgtggtgtaccgagatggagagagtgttcgggttcccagtccactacacagatgtcagcaacatgtctagactggccagacagagactgctgggaagaagctggtccgtccctgtgatcagacacctgttcgcccctctgaaggagtacttcgcctgcgtgagcagcggcaacagcaacgccaacagccggggccccagcttctctagcggcctggtgccactgtccctgagagggagccacatgggccccatggagatctacaaaaccgtgagcgcctggaagcggcagcctgtgcgcgtgctgagcctgtttcggaatatcgataaagtcctgaaaagcctgggattcctggagagcggctctggctccggcggtggcaccctgaagtacgtggaggatgtgacaaacgtggtcagacgggatgtggagaagtggggccccttcgatctggtgtacggcagcacccaacccctgggcagctcttgtgaccggtgccctggctggtacatgtttcagttccaccggatcctgcagtacgccctgccgagacaggagtcccagcggccattcttttggattttcatggacaacttgctgctgaccgaggatgaccaggaaactaccactcggttcctgcagaccgaagccgtgaccctgcaggacgtgagaggccgggactaccagaacgccatgcgggtgtggtccaacatccctggactgaaaagcaagcacgcacctctgacccctaaagaagaggagtacctgcaggcccaggtgcggagcagaagcaagctggacgcccctaaggtggatctgctggtgaagaattgcctcctgcccctgagagagtacttcaagtatttcagccagaatagtctgcccctgggaggcagcggcggcggcttccaggcccccgtgaccttcggcgacctggccatctacttcagccaggaggagtgggagtgcctgagccccatccagaaggacctgtacgaggacgtgatgctggagaactaccagaacctggtgagcctgggcctgagcttcaggaggcccaacgtgatcaccctgctggagaagggcaaggccccctggatggtggagcccgtgaagaggaggaggggcctggacctgggcagcaagtgcggcggcccaagcagcggcgcccctcctcccagcggcggcaggcggcccaagcagcggcgcccctcctcccagcggcggcagcccagccggctccccaacctctaccgaggagggcacctctgagtccgccacccccgagagcggccctggcacctccaccgagcccagcgagggcagcgcacccggcagccctgccggcagccccacctccacagaggagggaaccagcaccgagcccagcgaaggcagcgccccaggcaccagcaccgagcctagtgagcaggagattaaacggatcaacaagatcagaagaagacttgtgaaagacagcaacaccaagaaggccggcaagacaggccccatgaaaaccctgctggttagagtgatgacacccgatctgagagagcggctggaaaacctgagaaagaagcctgaaaatatcccccagcccatcagcaatacatctagagccaacctgaataagctgctgaccgattacaccgaaatgaagaaggcgatcctgcatgtgtactgggaagagttccagaaggaccctgtgggcctgatgagccgggtggcccagcctgccagcaagaagatcgatcagaacaagctgaaacctgagatggacgagaagggcaacctgaccaccgccggctttgcctgctctcagtgtggccagcccctgttcgtgtacaagctggagcaggtgtctgagaagggcaaggcttacaccaactacttcggacggtgcaatgtggccgagcacgaaaagctgatcctgctggcccagctgaagcccgagaaggatagcgacgaagccgtgacatatagcctgggaaagtttgggcagagggccctggatttctacagcattcatgtgaccaaggagtccacccaccccgtgaagcccctggcccagatcgccggaaacagatacgcctccggacctgtgggaaaggccctgagcgacgcatgtatgggcacaatcgcctccttcctgtctaagtaccaggacatcatcatcgaacaccagaaggtggtgaagggcaaccagaagagactggagagcctgcgggagctggccggcaaggaaaacctggaataccctagcgtgaccctgccacctcagcctcacaccaaggagggcgttgatgcctacaacgaagtgatcgcccgggtgcgaatgtgggtgaacctgaacctgtggcagaagctgaagctaagcagagatgatgccaagcctctgctgagactgaagggattcccttcctttcctctggtcgagagacaggccaacgaagtggactggtgggacatggtgtgtaacgtgaagaagctgatcaacgagaaaaaggaggatggcaaggtgttttggcagaatctggctggctacaagagacaggaagccctgagaccatacctgagcagcgaggaagatcggaagaagggaaagaaattcgctcggtaccagctgggcgacctgctgctgcacctggaaaagaagcacggcgaggactggggaaaggtgtacgacgaggcctgggagcggattgacaagaaagtggaaggcctgagcaagcacatcaagctggaagaggaacggagaagcgaggacgcccagagcaaggccgccctgaccgactggctgcgggctaaggccagcttcgtgatcgagggcctgaaggaggccgacaaggacgagttctgcagatgcgagctgaagctgcagaagtggtacggggacctgcggggaaagcccttcgccatcgaagccgagaacagcatcctggacatcagcggcttcagcaagcagtacaactgtgccttcatctggcagaaggacggcgtgaagaagctgaacctgtacctgatcatcaactacttcaagggcggcaagctgcggttcaagaagatcaaacctgaagccttcgaagccaacagattctacaccgtgatcaacaaaaagagcggcgagatcgtgcccatggaggtgaacttcaacttcgacgaccccaacctgatcatcctgcctctggcctttggcaagagacagggcagagaattcatctggaacgacctgctgtccctggaaaccggcagcctgaagctggccaacggaagagtgatcgagaagacactgtacaacagaagaacccggcaggatgagcctgccctgttcgtggccctgaccttcgagcggcgggaggtcctggactcctccaatatcaaaccaatgaacctgatcggcgtggcaagaggcgaaaacatccccgccgtgatcgccctgaccgaccccgagggctgcccactgagccggtttaaggatagcctgggaaacccaacccacatcctgagaatcggcgagagctataaggagaagcagcggaccatccaggccaagaaggaggtggagcagcggagagccggcggctacagccggaagtacgccagcaaagccaagaatctggcagacgatatggtgagaaacaccgctagagatctgctgtactacgccgtgacccaggatgccatgctgatcttcgccaacctgagccggggcttcggccggcagggcaagcggaccttcatggccgagagacagtacacacggatggaggactggctgaccgccaagctggcctacgagggcctgagcaagacctacctgtccaagacactggcccagtacacctccaagacatgcagcaactgtgggtttaccatcaccagcgccgactacgacagggtgctggagaagctgaagaagacagcaacaggctggatgaccacaattaacggcaaggagctgaaggtggagggccagattacctactacaacagatacaagagacagaacgtagtcaaggacctgtccgtcgagctggatagactgagcgaagaatctgtgaacaacgacatctcctcctggacaaagggcagaagcggagaagctctgagcctcctgaagaaaagattctcccatagacccgtgcaggagaagttcgtgtgcctgaactgcggcttcgagacacacgcagccgagcaagccgccctgaacatcgccagatcctggctgttcctgcggagccaggagtacaagaaataccagacaaacaagacaaccggcaacaccgataagagagccttcgtcgagacctggcagtccttttaccggaagaagcttaaggaggtgtggaaacctgccgtgcggtctggcggatctggcggaggctccaccagccccaagaaaaagagaaaagtctaagctgccttctgcggggcttgccttctggccatgcccttcttctctcccttgcacctgtacctcttggtctttgaataaagcctgagtaggaaggctagcaaaaaaaaaaaaaaaaaaaaaaaaaaaaaaaaaaaaaaaaaaaaaaaaaaaaaaaaaaaaaaaaaaaaaaaaaaaaaaaagcccagccggctccccaacctctaccgaggagggcacctctgagtccgccacccccgagagcggccctggcacctccaccgagcccagcgagggcagcgcacccggcagccctgccggcagccccacctccacagaggagggaaccagcaccgagcccagcgaaggcagcgccccaggcaccagcaccgagcctagtgagcaggagattaaacggatcaacaagatcagaagaagacttgtgaaagacagcaacaccaagaaggccggcaagacaggccccatgaaaaccctgctggttagagtgatgacacccgatctgagagagcggctggaaaacctgagaaagaagcctgaaaatatcccccagcccatcagcaatacatctagagccaacctgaataagctgctgaccgattacaccgaaatgaagaaggcgatcctgcatgtgtactgggaagagttccagaaggaccctgtgggcctgatgagccgggtggcccagcctgccagcaagaagatcgatcagaacaagctgaaacctgagatggacgagaagggcaacctgaccaccgccggctttgcctgctctcagtgtggccagcccctgttcgtgtacaagctggagcaggtgtctgagaagggcaaggcttacaccaactacttcggacggtgcaatgtggccgagcacgaaaagctgatcctgctggcccagctgaagcccgagaaggatagcgacgaagccgtgacatatagcctgggaaagtttgggcagagggccctggatttctacagcattcatgtgaccaaggagtccacccaccccgtgaagcccctggcccagatcgccggaaacagatacgcctccggacctgtgggaaaggccctgagcgacgcatgtatgggcacaatcgcctccttcctgtctaagtaccaggacatcatcatcgaacaccagaaggtggtgaagggcaaccagaagagactggagagcctgcgggagctggccggcaaggaaaacctggaataccctagcgtgaccctgccacctcagcctcacaccaaggagggcgttgatgcctacaacgaagtgatcgcccgggtgcgaatgtgggtgaacctgaacctgtggcagaagctgaagctaagcagagatgatgccaagcctctgctgagactgaagggattcccttcctttcctctggtcgagagacaggccaacgaagtggactggtgggacatggtgtgtaacgtgaagaagctgatcaacgagaaaaaggaggatggcaaggtgttttggcagaatctggctggctacaagagacaggaagccctgagaccatacctgagcagcgaggaagatcggaagaagggaaagaaattcgctcggtaccagctgggcgacctgctgctgcacctggaaaagaagcacggcgaggactggggaaaggtgtacgacgaggcctgggagcggattgacaagaaagtggaaggcctgagcaagcacatcaagctggaagaggaacggagaagcgaggacgcccagagcaaggccgccctgaccgactggctgcgggctaaggccagcttcgtgatcgagggcctgaaggaggccgacaaggacgagttctgcagatgcgagctgaagctgcagaagtggtacggggacctgcggggaaagcccttcgccatcgaagccgagaacagcatcctggacatcagcggcttcagcaagcagtacaactgtgccttcatctggcagaaggacggcgtgaagaagctgaacctgtacctgatcatcaactacttcaagggcggcaagctgcggttcaagaagatcaaacctgaagccttcgaagccaacagattctacaccgtgatcaacaaaaagagcggcgagatcgtgcccatggaggtgaacttcaacttcgacgaccccaacctgatcatcctgcctctggcctttggcaagagacagggcagagaattcatctggaacgacctgctgtccctggaaaccggcagcctgaagctggccaacggaagagtgatcgagaagacactgtacaacagaagaacccggcaggatgagcctgccctgttcgtggccctgaccttcgagcggcgggaggtcctggactcctccaatatcaaaccaatgaacctgatcggcgtggcaagaggcgaaaacatccccgccgtgatcgccctgaccgaccccgagggctgcccactgagccggtttaaggatagcctgggaaacccaacccacatcctgagaatcggcgagagctataaggagaagcagcggaccatccaggccaagaaggaggtggagcagcggagagccggcggctacagccggaagtacgccagcaaagccaagaatctggcagacgatatggtgagaaacaccgctagagatctgctgtactacgccgtgacccaggatgccatgctgatcttcgccaacctgagccggggcttcggccggcagggcaagcggaccttcatggccgagagacagtacacacggatggaggactggctgaccgccaagctggcctacgagggcctgagcaagacctacctgtccaagacactggcccagtacacctccaagacatgcagcaactgtgggtttaccatcaccagcgccgactacgacagggtgctggagaagctgaagaagacagcaacaggctggatgaccacaattaacggcaaggagctgaaggtggagggccagattacctactacaacagatacaagagacagaacgtagtcaaggacctgtccgtcgagctggatagactgagcgaagaatctgtgaacaacgacatctcctcctggacaaagggcagaagcggagaagctctgagcctcctgaagaaaagattctcccatagacccgtgcaggagaagttcgtgtgcctgaactgcggcttcgagacacacgcagccgagcaagccgccctgaacatcgccagatcctggctgttcctgcggagccaggagtacaagaaataccagacaaacaagacaaccggcaacaccgataagagagccttcgtcgagacctggcagtccttttaccggaagaagcttaaggaggtgtggaaacctgccgtgcggtctggcggatctggcggaggctccaccagccccaagaaaaagagaaaagtctaagctgccttctgcggggcttgccttctggccatgcccttcttctctcccttgcacctgtacctcttggtctttgaataaagcctgagtaggaaggctagcaaaaaaaaaaaaaaaaaaaaaaaaaaaaaaaaaaaaaaaaaaaaaaaaaaaaaaaaaaaaaaaaaaaaaaaaaaaaaaaa

SEQ ID NO: 8934 - RNA, 8787 nt, synthetic construct
  source 1..8787: mol_type = other RNA
aggaaataagagagaaaagaagagtaagaagaaatataagagccaccatggcccctaagaagaagcgtaaagtgagccggatgaaccacgaccaggagttcgacccccctaaggtgtaccctcccgtccccgccgagaagagaaagcccatccgggtcctgagcctgttcgatggcatcgccaccggtctgctggtgctgaaggacctgggcatccaggtggataggtacattgcctccgaggtgtgcgaggactccatcaccgtgggaatggtgcgtcatcagggcaagatcatgtacgtgggcgacgtgcggagcgtgacacagaagcatatccaggagtggggccctttcgacctggtgatcggcggcagcccttgcaatgacctgagcatcgtgaacccagcccggaagggcctgtacgagggaaccggcagactgttcttcgagttttacagactgctgcacgacgcccggcctaaggaaggcgacgaccggcccttcttttggctgttcgagaatgtggtggccatgggagtcagcgacaagcgggatattagccggttcctggagagcaaccccgtgatgatcgatgccaaggaagtgagcgccgcccaccgggccagatacttctggggcaatctgcctggcatgaacagacccctggccagcaccgtgaacgacaagctggagctgcaggagtgcctggagcacggccggatcgccaagttcagcaaggtgagaaccatcaccacccgaagcaacagcatcaaacaaggcaaggaccagcactttcctgtgttcatgaacgagaaggaggacatcctgtggtgtaccgagatggagagagtgttcgggttcccagtccactacacagatgtcagcaacatgtctagactggccagacagagactgctgggaagaagctggtccgtccctgtgatcagacacctgttcgcccctctgaaggagtacttcgcctgcgtgagcagcggcaacagcaacgccaacagccggggccccagcttctctagcggcctggtgccactgtccctgagagggagccacatgggccccatggagatctacaaaaccgtgagcgcctggaagcggcagcctgtgcgcgtgctgagcctgtttcggaatatcgataaagtcctgaaaagcctgggattcctggagagcggctctggctccggcggtggcaccctgaagtacgtggaggatgtgacaaacgtggtcagacgggatgtggagaagtggggccccttcgatctggtgtacggcagcacccaacccctgggcagctcttgtgaccggtgccctggctggtacatgtttcagttccaccggatcctgcagtacgccctgccgagacaggagtcccagcggccattcttttggattttcatggacaacttgctgctgaccgaggatgaccaggaaactaccactcggttcctgcagaccgaagccgtgaccctgcaggacgtgagaggccgggactaccagaacgccatgcgggtgtggtccaacatccctggactgaaaagcaagcacgcacctctgacccctaaagaagaggagtacctgcaggcccaggtgcggagcagaagcaagctggacgcccctaaggtggatctgctggtgaagaattgcctcctgcccctgagagagtacttcaagtatttcagccagaatagtctgcccctgggaggcagcggcggcggcatggccctgaggagcgtgatcttcagcgacatcagcatcgacttcagccccgaggagtgggagtacctggacctggagcagaaggacctgtacagggacgtgatgctggagaactacagcaacctggtgagcctgggctgcttcatcagcaagcccgacgtgatcagcctgctggagcagggcaaggagccctggaaggtggtgaggaagaggaggaggcagtaccccgacctggagaccaagggcggcccaagcagcggcgcccctcctcccagcggcggcaggcggcccaagcagcggcgcccctcctcccagcggcggcagcccagccggctccccaacctctaccgaggagggcacctctgagtccgccacccccgagagcggccctggcacctccaccgagcccagcgagggcagcgcacccggcagccctgccggcagccccacctccacagaggagggaaccagcaccgagcccagcgaaggcagcgccccaggcaccagcaccgagcctagtgagcaggagattaaacggatcaacaagatcagaagaagacttgtgaaagacagcaacaccaagaaggccggcaagacaggccccatgaaaaccctgctggttagagtgatgacacccgatctgagagagcggctggaaaacctgagaaagaagcctgaaaatatcccccagcccatcagcaatacatctagagccaacctgaataagctgctgaccgattacaccgaaatgaagaaggcgatcctgcatgtgtactgggaagagttccagaaggaccctgtgggcctgatgagccgggtggcccagcctgccagcaagaagatcgatcagaacaagctgaaacctgagatggacgagaagggcaacctgaccaccgccggctttgcctgctctcagtgtggccagcccctgttcgtgtacaagctggagcaggtgtctgagaagggcaaggcttacaccaactacttcggacggtgcaatgtggccgagcacgaaaagctgatcctgctggcccagctgaagcccgagaaggatagcgacgaagccgtgacatatagcctgggaaagtttgggcagagggccctggatttctacagcattcatgtgaccaaggagtccacccaccccgtgaagcccctggcccagatcgccggaaacagatacgcctccggacctgtgggaaaggccctgagcgacgcatgtatgggcacaatcgcctccttcctgtctaagtaccaggacatcatcatcgaacaccagaaggtggtgaagggcaaccagaagagactggagagcctgcgggagctggccggcaaggaaaacctggaataccctagcgtgaccctgccacctcagcctcacaccaaggagggcgttgatgcctacaacgaagtgatcgcccgggtgcgaatgtgggtgaacctgaacctgtggcagaagctgaagctaagcagagatgatgccaagcctctgctgagactgaagggattcccttcctttcctctggtcgagagacaggccaacgaagtggactggtgggacatggtgtgtaacgtgaagaagctgatcaacgagaaaaaggaggatggcaaggtgttttggcagaatctggctggctacaagagacaggaagccctgagaccatacctgagcagcgaggaagatcggaagaagggaaagaaattcgctcggtaccagctgggcgacctgctgctgcacctggaaaagaagcacggcgaggactggggaaaggtgtacgacgaggcctgggagcggattgacaagaaagtggaaggcctgagcaagcacatcaagctggaagaggaacggagaagcgaggacgcccagagcaaggccgccctgaccgactggctgcgggctaaggccagcttcgtgatcgagggcctgaaggaggccgacaaggacgagttctgcagatgcgagctgaagctgcagaagtggtacggggacctgcggggaaagcccttcgccatcgaagccgagaacagcatcctggacatcagcggcttcagcaagcagtacaactgtgccttcatctggcagaaggacggcgtgaagaagctgaacctgtacctgatcatcaactacttcaagggcggcaagctgcggttcaagaagatcaaacctgaagccttcgaagccaacagattctacaccgtgatcaacaaaaagagcggcgagatcgtgcccatggaggtgaacttcaacttcgacgaccccaacctgatcatcctgcctctggcctttggcaagagacagggcagagaattcatctggaacgacctgctgtccctggaaaccggcagcctgaagctggccaacggaagagtgatcgagaagacactgtacaacagaagaacccggcaggatgagcctgccctgttcgtggccctgaccttcgagcggcgggaggtcctggactcctccaatatcaaaccaatgaacctgatcggcgtggcaagaggcgaaaacatccccgccgtgatcgccctgaccgaccccgagggctgcccactgagccggtttaaggatagcctgggaaacccaacccacatcctgagaatcggcgagagctataaggagaagcagcggaccatccaggccaagaaggaggtggagcagcggagagccggcggctacagccggaagtacgccagcaaagccaagaatctggcagacgatatggtgagaaacaccgctagagatctgctgtactacgccgtgacccaggatgccatgctgatcttcgccaacctgagccggggcttcggccggcagggcaagcggaccttcatggccgagagacagtacacacggatggaggactggctgaccgccaagctggcctacgagggcctgagcaagacctacctgtccaagacactggcccagtacacctccaagacatgcagcaactgtgggtttaccatcaccagcgccgactacgacagggtgctggagaagctgaagaagacagcaacaggctggatgaccacaattaacggcaaggagctgaaggtggagggccagattacctactacaacagatacaagagacagaacgtagtcaaggacctgtccgtcgagctggatagactgagcgaagaatctgtgaacaacgacatctcctcctggacaaagggcagaagcggagaagctctgagcctcctgaagaaaagattctcccatagacccgtgcaggagaagttcgtgtgcctgaactgcggcttcgagacacacgcagccgagcaagccgccctgaacatcgccagatcctggctgttcctgcggagccaggagtacaagaaataccagacaaacaagacaaccggcaacaccgataagagagccttcgtcgagacctggcagtccttttaccggaagaagcttaaggaggtgtggaaacctgccgtgcggtctggcggatctggcggaggctccaccagccccaagaaaaagagaaaagtctaagctgccttctgcggggcttgccttctggccatgcccttcttctctcccttgcacctgtacctcttggtctttgaataaagcctgagtaggaaggctagcaaaaaaaaaaaaaaaaaaaaaaaaaaaaaaaaaaaaaaaaaaaaaaaaaaaaaaaaaaaaaaaaaaaaaaaaaaaaaaaagcccagccggctccccaacctctaccgaggagggcacctctgagtccgccacccccgagagcggccctggcacctccaccgagcccagcgagggcagcgcacccggcagccctgccggcagccccacctccacagaggagggaaccagcaccgagcccagcgaaggcagcgccccaggcaccagcaccgagcctagtgagcaggagattaaacggatcaacaagatcagaagaagacttgtgaaagacagcaacaccaagaaggccggcaagacaggccccatgaaaaccctgctggttagagtgatgacacccgatctgagagagcggctggaaaacctgagaaagaagcctgaaaatatcccccagcccatcagcaatacatctagagccaacctgaataagctgctgaccgattacaccgaaatgaagaaggcgatcctgcatgtgtactgggaagagttccagaaggaccctgtgggcctgatgagccgggtggcccagcctgccagcaagaagatcgatcagaacaagctgaaacctgagatggacgagaagggcaacctgaccaccgccggctttgcctgctctcagtgtggccagcccctgttcgtgtacaagctggagcaggtgtctgagaagggcaaggcttacaccaactacttcggacggtgcaatgtggccgagcacgaaaagctgatcctgctggcccagctgaagcccgagaaggatagcgacgaagccgtgacatatagcctgggaaagtttgggcagagggccctggatttctacagcattcatgtgaccaaggagtccacccaccccgtgaagcccctggcccagatcgccggaaacagatacgcctccggacctgtgggaaaggccctgagcgacgcatgtatgggcacaatcgcctccttcctgtctaagtaccaggacatcatcatcgaacaccagaaggtggtgaagggcaaccagaagagactggagagcctgcgggagctggccggcaaggaaaacctggaataccctagcgtgaccctgccacctcagcctcacaccaaggagggcgttgatgcctacaacgaagtgatcgcccgggtgcgaatgtgggtgaacctgaacctgtggcagaagctgaagctaagcagagatgatgccaagcctctgctgagactgaagggattcccttcctttcctctggtcgagagacaggccaacgaagtggactggtgggacatggtgtgtaacgtgaagaagctgatcaacgagaaaaaggaggatggcaaggtgttttggcagaatctggctggctacaagagacaggaagccctgagaccatacctgagcagcgaggaagatcggaagaagggaaagaaattcgctcggtaccagctgggcgacctgctgctgcacctggaaaagaagcacggcgaggactggggaaaggtgtacgacgaggcctgggagcggattgacaagaaagtggaaggcctgagcaagcacatcaagctggaagaggaacggagaagcgaggacgcccagagcaaggccgccctgaccgactggctgcgggctaaggccagcttcgtgatcgagggcctgaaggaggccgacaaggacgagttctgcagatgcgagctgaagctgcagaagtggtacggggacctgcggggaaagcccttcgccatcgaagccgagaacagcatcctggacatcagcggcttcagcaagcagtacaactgtgccttcatctggcagaaggacggcgtgaagaagctgaacctgtacctgatcatcaactacttcaagggcggcaagctgcggttcaagaagatcaaacctgaagccttcgaagccaacagattctacaccgtgatcaacaaaaagagcggcgagatcgtgcccatggaggtgaacttcaacttcgacgaccccaacctgatcatcctgcctctggcctttggcaagagacagggcagagaattcatctggaacgacctgctgtccctggaaaccggcagcctgaagctggccaacggaagagtgatcgagaagacactgtacaacagaagaacccggcaggatgagcctgccctgttcgtggccctgaccttcgagcggcgggaggtcctggactcctccaatatcaaaccaatgaacctgatcggcgtggcaagaggcgaaaacatccccgccgtgatcgccctgaccgaccccgagggctgcccactgagccggtttaaggatagcctgggaaacccaacccacatcctgagaatcggcgagagctataaggagaagcagcggaccatccaggccaagaaggaggtggagcagcggagagccggcggctacagccggaagtacgccagcaaagccaagaatctggcagacgatatggtgagaaacaccgctagagatctgctgtactacgccgtgacccaggatgccatgctgatcttcgccaacctgagccggggcttcggccggcagggcaagcggaccttcatggccgagagacagtacacacggatggaggactggctgaccgccaagctggcctacgagggcctgagcaagacctacctgtccaagacactggcccagtacacctccaagacatgcagcaactgtgggtttaccatcaccagcgccgactacgacagggtgctggagaagctgaagaagacagcaacaggctggatgaccacaattaacggcaaggagctgaaggtggagggccagattacctactacaacagatacaagagacagaacgtagtcaaggacctgtccgtcgagctggatagactgagcgaagaatctgtgaacaacgacatctcctcctggacaaagggcagaagcggagaagctctgagcctcctgaagaaaagattctcccatagacccgtgcaggagaagttcgtgtgcctgaactgcggcttcgagacacacgcagccgagcaagccgccctgaacatcgccagatcctggctgttcctgcggagccaggagtacaagaaataccagacaaacaagacaaccggcaacaccgataagagagccttcgtcgagacctggcagtccttttaccggaagaagcttaaggaggtgtggaaacctgccgtgcggtctggcggatctggcggaggctccaccagccccaagaaaaagagaaaagtctaagctgccttctgcggggcttgccttctggccatgcccttcttctctcccttgcacctgtacctcttggtctttgaataaagcctgagtaggaaggctagcaaaaaaaaaaaaaaaaaaaaaaaaaaaaaaaaaaaaaaaaaaaaaaaaaaaaaaaaaaaaaaaaaaaaaaaaaaaaaaaa

SEQ ID NO: 8935 - RNA, 8787 nt, synthetic construct
  source 1..8787: mol_type = other RNA
aggaaataagagagaaaagaagagtaagaagaaatataagagccaccatggcccctaagaagaagcgtaaagtgagccggatgaaccacgaccaggagttcgacccccctaaggtgtaccctcccgtccccgccgagaagagaaagcccatccgggtcctgagcctgttcgatggcatcgccaccggtctgctggtgctgaaggacctgggcatccaggtggataggtacattgcctccgaggtgtgcgaggactccatcaccgtgggaatggtgcgtcatcagggcaagatcatgtacgtgggcgacgtgcggagcgtgacacagaagcatatccaggagtggggccctttcgacctggtgatcggcggcagcccttgcaatgacctgagcatcgtgaacccagcccggaagggcctgtacgagggaaccggcagactgttcttcgagttttacagactgctgcacgacgcccggcctaaggaaggcgacgaccggcccttcttttggctgttcgagaatgtggtggccatgggagtcagcgacaagcgggatattagccggttcctggagagcaaccccgtgatgatcgatgccaaggaagtgagcgccgcccaccgggccagatacttctggggcaatctgcctggcatgaacagacccctggccagcaccgtgaacgacaagctggagctgcaggagtgcctggagcacggccggatcgccaagttcagcaaggtgagaaccatcaccacccgaagcaacagcatcaaacaaggcaaggaccagcactttcctgtgttcatgaacgagaaggaggacatcctgtggtgtaccgagatggagagagtgttcgggttcccagtccactacacagatgtcagcaacatgtctagactggccagacagagactgctgggaagaagctggtccgtccctgtgatcagacacctgttcgcccctctgaaggagtacttcgcctgcgtgagcagcggcaacagcaacgccaacagccggggccccagcttctctagcggcctggtgccactgtccctgagagggagccacatgggccccatggagatctacaaaaccgtgagcgcctggaagcggcagcctgtgcgcgtgctgagcctgtttcggaatatcgataaagtcctgaaaagcctgggattcctggagagcggctctggctccggcggtggcaccctgaagtacgtggaggatgtgacaaacgtggtcagacgggatgtggagaagtggggccccttcgatctggtgtacggcagcacccaacccctgggcagctcttgtgaccggtgccctggctggtacatgtttcagttccaccggatcctgcagtacgccctgccgagacaggagtcccagcggccattcttttggattttcatggacaacttgctgctgaccgaggatgaccaggaaactaccactcggttcctgcagaccgaagccgtgaccctgcaggacgtgagaggccgggactaccagaacgccatgcgggtgtggtccaacatccctggactgaaaagcaagcacgcacctctgacccctaaagaagaggagtacctgcaggcccaggtgcggagcagaagcaagctggacgcccctaaggtggatctgctggtgaagaattgcctcctgcccctgagagagtacttcaagtatttcagccagaatagtctgcccctgggaggcagcggcggcggcgcccacaggagcgtgatgttcaacgacgtgagcatcgacttcagcagggaggagtgggagtacctgaacctggagcagagggacctgtacagggacgtgatgctggagaactacagcaacctggtgagcctgggctacttcatcagcaagcccgacgtgatcagcctgctggagcagggcgaggagccctggaaggtggtgaggaagggcaggaggaggtaccccgacctgaagaccaactacggcggcccaagcagcggcgcccctcctcccagcggcggcaggcggcccaagcagcggcgcccctcctcccagcggcggcagcccagccggctccccaacctctaccgaggagggcacctctgagtccgccacccccgagagcggccctggcacctccaccgagcccagcgagggcagcgcacccggcagccctgccggcagccccacctccacagaggagggaaccagcaccgagcccagcgaaggcagcgccccaggcaccagcaccgagcctagtgagcaggagattaaacggatcaacaagatcagaagaagacttgtgaaagacagcaacaccaagaaggccggcaagacaggccccatgaaaaccctgctggttagagtgatgacacccgatctgagagagcggctggaaaacctgagaaagaagcctgaaaatatcccccagcccatcagcaatacatctagagccaacctgaataagctgctgaccgattacaccgaaatgaagaaggcgatcctgcatgtgtactgggaagagttccagaaggaccctgtgggcctgatgagccgggtggcccagcctgccagcaagaagatcgatcagaacaagctgaaacctgagatggacgagaagggcaacctgaccaccgccggctttgcctgctctcagtgtggccagcccctgttcgtgtacaagctggagcaggtgtctgagaagggcaaggcttacaccaactacttcggacggtgcaatgtggccgagcacgaaaagctgatcctgctggcccagctgaagcccgagaaggatagcgacgaagccgtgacatatagcctgggaaagtttgggcagagggccctggatttctacagcattcatgtgaccaaggagtccacccaccccgtgaagcccctggcccagatcgccggaaacagatacgcctccggacctgtgggaaaggccctgagcgacgcatgtatgggcacaatcgcctccttcctgtctaagtaccaggacatcatcatcgaacaccagaaggtggtgaagggcaaccagaagagactggagagcctgcgggagctggccggcaaggaaaacctggaataccctagcgtgaccctgccacctcagcctcacaccaaggagggcgttgatgcctacaacgaagtgatcgcccgggtgcgaatgtgggtgaacctgaacctgtggcagaagctgaagctaagcagagatgatgccaagcctctgctgagactgaagggattcccttcctttcctctggtcgagagacaggccaacgaagtggactggtgggacatggtgtgtaacgtgaagaagctgatcaacgagaaaaaggaggatggcaaggtgttttggcagaatctggctggctacaagagacaggaagccctgagaccatacctgagcagcgaggaagatcggaagaagggaaagaaattcgctcggtaccagctgggcgacctgctgctgcacctggaaaagaagcacggcgaggactggggaaaggtgtacgacgaggcctgggagcggattgacaagaaagtggaaggcctgagcaagcacatcaagctggaagaggaacggagaagcgaggacgcccagagcaaggccgccctgaccgactggctgcgggctaaggccagcttcgtgatcgagggcctgaaggaggccgacaaggacgagttctgcagatgcgagctgaagctgcagaagtggtacggggacctgcggggaaagcccttcgccatcgaagccgagaacagcatcctggacatcagcggcttcagcaagcagtacaactgtgccttcatctggcagaaggacggcgtgaagaagctgaacctgtacctgatcatcaactacttcaagggcggcaagctgcggttcaagaagatcaaacctgaagccttcgaagccaacagattctacaccgtgatcaacaaaaagagcggcgagatcgtgcccatggaggtgaacttcaacttcgacgaccccaacctgatcatcctgcctctggcctttggcaagagacagggcagagaattcatctggaacgacctgctgtccctggaaaccggcagcctgaagctggccaacggaagagtgatcgagaagacactgtacaacagaagaacccggcaggatgagcctgccctgttcgtggccctgaccttcgagcggcgggaggtcctggactcctccaatatcaaaccaatgaacctgatcggcgtggcaagaggcgaaaacatccccgccgtgatcgccctgaccgaccccgagggctgcccactgagccggtttaaggatagcctgggaaacccaacccacatcctgagaatcggcgagagctataaggagaagcagcggaccatccaggccaagaaggaggtggagcagcggagagccggcggctacagccggaagtacgccagcaaagccaagaatctggcagacgatatggtgagaaacaccgctagagatctgctgtactacgccgtgacccaggatgccatgctgatcttcgccaacctgagccggggcttcggccggcagggcaagcggaccttcatggccgagagacagtacacacggatggaggactggctgaccgccaagctggcctacgagggcctgagcaagacctacctgtccaagacactggcccagtacacctccaagacatgcagcaactgtgggtttaccatcaccagcgccgactacgacagggtgctggagaagctgaagaagacagcaacaggctggatgaccacaattaacggcaaggagctgaaggtggagggccagattacctactacaacagatacaagagacagaacgtagtcaaggacctgtccgtcgagctggatagactgagcgaagaatctgtgaacaacgacatctcctcctggacaaagggcagaagcggagaagctctgagcctcctgaagaaaagattctcccatagacccgtgcaggagaagttcgtgtgcctgaactgcggcttcgagacacacgcagccgagcaagccgccctgaacatcgccagatcctggctgttcctgcggagccaggagtacaagaaataccagacaaacaagacaaccggcaacaccgataagagagccttcgtcgagacctggcagtccttttaccggaagaagcttaaggaggtgtggaaacctgccgtgcggtctggcggatctggcggaggctccaccagccccaagaaaaagagaaaagtctaagctgccttctgcggggcttgccttctggccatgcccttcttctctcccttgcacctgtacctcttggtctttgaataaagcctgagtaggaaggctagcaaaaaaaaaaaaaaaaaaaaaaaaaaaaaaaaaaaaaaaaaaaaaaaaaaaaaaaaaaaaaaaaaaaaaaaaaaaaaaaagcccagccggctccccaacctctaccgaggagggcacctctgagtccgccacccccgagagcggccctggcacctccaccgagcccagcgagggcagcgcacccggcagccctgccggcagccccacctccacagaggagggaaccagcaccgagcccagcgaaggcagcgccccaggcaccagcaccgagcctagtgagcaggagattaaacggatcaacaagatcagaagaagacttgtgaaagacagcaacaccaagaaggccggcaagacaggccccatgaaaaccctgctggttagagtgatgacacccgatctgagagagcggctggaaaacctgagaaagaagcctgaaaatatcccccagcccatcagcaatacatctagagccaacctgaataagctgctgaccgattacaccgaaatgaagaaggcgatcctgcatgtgtactgggaagagttccagaaggaccctgtgggcctgatgagccgggtggcccagcctgccagcaagaagatcgatcagaacaagctgaaacctgagatggacgagaagggcaacctgaccaccgccggctttgcctgctctcagtgtggccagcccctgttcgtgtacaagctggagcaggtgtctgagaagggcaaggcttacaccaactacttcggacggtgcaatgtggccgagcacgaaaagctgatcctgctggcccagctgaagcccgagaaggatagcgacgaagccgtgacatatagcctgggaaagtttgggcagagggccctggatttctacagcattcatgtgaccaaggagtccacccaccccgtgaagcccctggcccagatcgccggaaacagatacgcctccggacctgtgggaaaggccctgagcgacgcatgtatgggcacaatcgcctccttcctgtctaagtaccaggacatcatcatcgaacaccagaaggtggtgaagggcaaccagaagagactggagagcctgcgggagctggccggcaaggaaaacctggaataccctagcgtgaccctgccacctcagcctcacaccaaggagggcgttgatgcctacaacgaagtgatcgcccgggtgcgaatgtgggtgaacctgaacctgtggcagaagctgaagctaagcagagatgatgccaagcctctgctgagactgaagggattcccttcctttcctctggtcgagagacaggccaacgaagtggactggtgggacatggtgtgtaacgtgaagaagctgatcaacgagaaaaaggaggatggcaaggtgttttggcagaatctggctggctacaagagacaggaagccctgagaccatacctgagcagcgaggaagatcggaagaagggaaagaaattcgctcggtaccagctgggcgacctgctgctgcacctggaaaagaagcacggcgaggactggggaaaggtgtacgacgaggcctgggagcggattgacaagaaagtggaaggcctgagcaagcacatcaagctggaagaggaacggagaagcgaggacgcccagagcaaggccgccctgaccgactggctgcgggctaaggccagcttcgtgatcgagggcctgaaggaggccgacaaggacgagttctgcagatgcgagctgaagctgcagaagtggtacggggacctgcggggaaagcccttcgccatcgaagccgagaacagcatcctggacatcagcggcttcagcaagcagtacaactgtgccttcatctggcagaaggacggcgtgaagaagctgaacctgtacctgatcatcaactacttcaagggcggcaagctgcggttcaagaagatcaaacctgaagccttcgaagccaacagattctacaccgtgatcaacaaaaagagcggcgagatcgtgcccatggaggtgaacttcaacttcgacgaccccaacctgatcatcctgcctctggcctttggcaagagacagggcagagaattcatctggaacgacctgctgtccctggaaaccggcagcctgaagctggccaacggaagagtgatcgagaagacactgtacaacagaagaacccggcaggatgagcctgccctgttcgtggccctgaccttcgagcggcgggaggtcctggactcctccaatatcaaaccaatgaacctgatcggcgtggcaagaggcgaaaacatccccgccgtgatcgccctgaccgaccccgagggctgcccactgagccggtttaaggatagcctgggaaacccaacccacatcctgagaatcggcgagagctataaggagaagcagcggaccatccaggccaagaaggaggtggagcagcggagagccggcggctacagccggaagtacgccagcaaagccaagaatctggcagacgatatggtgagaaacaccgctagagatctgctgtactacgccgtgacccaggatgccatgctgatcttcgccaacctgagccggggcttcggccggcagggcaagcggaccttcatggccgagagacagtacacacggatggaggactggctgaccgccaagctggcctacgagggcctgagcaagacctacctgtccaagacactggcccagtacacctccaagacatgcagcaactgtgggtttaccatcaccagcgccgactacgacagggtgctggagaagctgaagaagacagcaacaggctggatgaccacaattaacggcaaggagctgaaggtggagggccagattacctactacaacagatacaagagacagaacgtagtcaaggacctgtccgtcgagctggatagactgagcgaagaatctgtgaacaacgacatctcctcctggacaaagggcagaagcggagaagctctgagcctcctgaagaaaagattctcccatagacccgtgcaggagaagttcgtgtgcctgaactgcggcttcgagacacacgcagccgagcaagccgccctgaacatcgccagatcctggctgttcctgcggagccaggagtacaagaaataccagacaaacaagacaaccggcaacaccgataagagagccttcgtcgagacctggcagtccttttaccggaagaagcttaaggaggtgtggaaacctgccgtgcggtctggcggatctggcggaggctccaccagccccaagaaaaagagaaaagtctaagctgccttctgcggggcttgccttctggccatgcccttcttctctcccttgcacctgtacctcttggtctttgaataaagcctgagtaggaaggctagcaaaaaaaaaaaaaaaaaaaaaaaaaaaaaaaaaaaaaaaaaaaaaaaaaaaaaaaaaaaaaaaaaaaaaaaaaaaaaaaa

SEQ ID NO: 8936 - RNA, 8787 nt, synthetic construct
  source 1..8787: mol_type = other RNA
aggaaataagagagaaaagaagagtaagaagaaatataagagccaccatggcccctaagaagaagcgtaaagtgagccggatgaaccacgaccaggagttcgacccccctaaggtgtaccctcccgtccccgccgagaagagaaagcccatccgggtcctgagcctgttcgatggcatcgccaccggtctgctggtgctgaaggacctgggcatccaggtggataggtacattgcctccgaggtgtgcgaggactccatcaccgtgggaatggtgcgtcatcagggcaagatcatgtacgtgggcgacgtgcggagcgtgacacagaagcatatccaggagtggggccctttcgacctggtgatcggcggcagcccttgcaatgacctgagcatcgtgaacccagcccggaagggcctgtacgagggaaccggcagactgttcttcgagttttacagactgctgcacgacgcccggcctaaggaaggcgacgaccggcccttcttttggctgttcgagaatgtggtggccatgggagtcagcgacaagcgggatattagccggttcctggagagcaaccccgtgatgatcgatgccaaggaagtgagcgccgcccaccgggccagatacttctggggcaatctgcctggcatgaacagacccctggccagcaccgtgaacgacaagctggagctgcaggagtgcctggagcacggccggatcgccaagttcagcaaggtgagaaccatcaccacccgaagcaacagcatcaaacaaggcaaggaccagcactttcctgtgttcatgaacgagaaggaggacatcctgtggtgtaccgagatggagagagtgttcgggttcccagtccactacacagatgtcagcaacatgtctagactggccagacagagactgctgggaagaagctggtccgtccctgtgatcagacacctgttcgcccctctgaaggagtacttcgcctgcgtgagcagcggcaacagcaacgccaacagccggggccccagcttctctagcggcctggtgccactgtccctgagagggagccacatgggccccatggagatctacaaaaccgtgagcgcctggaagcggcagcctgtgcgcgtgctgagcctgtttcggaatatcgataaagtcctgaaaagcctgggattcctggagagcggctctggctccggcggtggcaccctgaagtacgtggaggatgtgacaaacgtggtcagacgggatgtggagaagtggggccccttcgatctggtgtacggcagcacccaacccctgggcagctcttgtgaccggtgccctggctggtacatgtttcagttccaccggatcctgcagtacgccctgccgagacaggagtcccagcggccattcttttggattttcatggacaacttgctgctgaccgaggatgaccaggaaactaccactcggttcctgcagaccgaagccgtgaccctgcaggacgtgagaggccgggactaccagaacgccatgcgggtgtggtccaacatccctggactgaaaagcaagcacgcacctctgacccctaaagaagaggagtacctgcaggcccaggtgcggagcagaagcaagctggacgcccctaaggtggatctgctggtgaagaattgcctcctgcccctgagagagtacttcaagtatttcagccagaatagtctgcccctgggaggcagcggcggcggcccccaggtgctggtgagcttcgaggaggtggccgtgctgctgagccaggaggagtggggccacctgggccccgcccagaagaggctgtacagggacgtgatgctggagacctacggcaacctggtgagcctgggcctgcagggcagcaagcccgacgtgatcagcaagctggagcagggcgaggagccctgggccccccacagccccaggatcgagggcagctggatctggaggaggaggaggggcggcccaagcagcggcgcccctcctcccagcggcggcaggcggcccaagcagcggcgcccctcctcccagcggcggcagcccagccggctccccaacctctaccgaggagggcacctctgagtccgccacccccgagagcggccctggcacctccaccgagcccagcgagggcagcgcacccggcagccctgccggcagccccacctccacagaggagggaaccagcaccgagcccagcgaaggcagcgccccaggcaccagcaccgagcctagtgagcaggagattaaacggatcaacaagatcagaagaagacttgtgaaagacagcaacaccaagaaggccggcaagacaggccccatgaaaaccctgctggttagagtgatgacacccgatctgagagagcggctggaaaacctgagaaagaagcctgaaaatatcccccagcccatcagcaatacatctagagccaacctgaataagctgctgaccgattacaccgaaatgaagaaggcgatcctgcatgtgtactgggaagagttccagaaggaccctgtgggcctgatgagccgggtggcccagcctgccagcaagaagatcgatcagaacaagctgaaacctgagatggacgagaagggcaacctgaccaccgccggctttgcctgctctcagtgtggccagcccctgttcgtgtacaagctggagcaggtgtctgagaagggcaaggcttacaccaactacttcggacggtgcaatgtggccgagcacgaaaagctgatcctgctggcccagctgaagcccgagaaggatagcgacgaagccgtgacatatagcctgggaaagtttgggcagagggccctggatttctacagcattcatgtgaccaaggagtccacccaccccgtgaagcccctggcccagatcgccggaaacagatacgcctccggacctgtgggaaaggccctgagcgacgcatgtatgggcacaatcgcctccttcctgtctaagtaccaggacatcatcatcgaacaccagaaggtggtgaagggcaaccagaagagactggagagcctgcgggagctggccggcaaggaaaacctggaataccctagcgtgaccctgccacctcagcctcacaccaaggagggcgttgatgcctacaacgaagtgatcgcccgggtgcgaatgtgggtgaacctgaacctgtggcagaagctgaagctaagcagagatgatgccaagcctctgctgagactgaagggattcccttcctttcctctggtcgagagacaggccaacgaagtggactggtgggacatggtgtgtaacgtgaagaagctgatcaacgagaaaaaggaggatggcaaggtgttttggcagaatctggctggctacaagagacaggaagccctgagaccatacctgagcagcgaggaagatcggaagaagggaaagaaattcgctcggtaccagctgggcgacctgctgctgcacctggaaaagaagcacggcgaggactggggaaaggtgtacgacgaggcctgggagcggattgacaagaaagtggaaggcctgagcaagcacatcaagctggaagaggaacggagaagcgaggacgcccagagcaaggccgccctgaccgactggctgcgggctaaggccagcttcgtgatcgagggcctgaaggaggccgacaaggacgagttctgcagatgcgagctgaagctgcagaagtggtacggggacctgcggggaaagcccttcgccatcgaagccgagaacagcatcctggacatcagcggcttcagcaagcagtacaactgtgccttcatctggcagaaggacggcgtgaagaagctgaacctgtacctgatcatcaactacttcaagggcggcaagctgcggttcaagaagatcaaacctgaagccttcgaagccaacagattctacaccgtgatcaacaaaaagagcggcgagatcgtgcccatggaggtgaacttcaacttcgacgaccccaacctgatcatcctgcctctggcctttggcaagagacagggcagagaattcatctggaacgacctgctgtccctggaaaccggcagcctgaagctggccaacggaagagtgatcgagaagacactgtacaacagaagaacccggcaggatgagcctgccctgttcgtggccctgaccttcgagcggcgggaggtcctggactcctccaatatcaaaccaatgaacctgatcggcgtggcaagaggcgaaaacatccccgccgtgatcgccctgaccgaccccgagggctgcccactgagccggtttaaggatagcctgggaaacccaacccacatcctgagaatcggcgagagctataaggagaagcagcggaccatccaggccaagaaggaggtggagcagcggagagccggcggctacagccggaagtacgccagcaaagccaagaatctggcagacgatatggtgagaaacaccgctagagatctgctgtactacgccgtgacccaggatgccatgctgatcttcgccaacctgagccggggcttcggccggcagggcaagcggaccttcatggccgagagacagtacacacggatggaggactggctgaccgccaagctggcctacgagggcctgagcaagacctacctgtccaagacactggcccagtacacctccaagacatgcagcaactgtgggtttaccatcaccagcgccgactacgacagggtgctggagaagctgaagaagacagcaacaggctggatgaccacaattaacggcaaggagctgaaggtggagggccagattacctactacaacagatacaagagacagaacgtagtcaaggacctgtccgtcgagctggatagactgagcgaagaatctgtgaacaacgacatctcctcctggacaaagggcagaagcggagaagctctgagcctcctgaagaaaagattctcccatagacccgtgcaggagaagttcgtgtgcctgaactgcggcttcgagacacacgcagccgagcaagccgccctgaacatcgccagatcctggctgttcctgcggagccaggagtacaagaaataccagacaaacaagacaaccggcaacaccgataagagagccttcgtcgagacctggcagtccttttaccggaagaagcttaaggaggtgtggaaacctgccgtgcggtctggcggatctggcggaggctccaccagccccaagaaaaagagaaaagtctaagctgccttctgcggggcttgccttctggccatgcccttcttctctcccttgcacctgtacctcttggtctttgaataaagcctgagtaggaaggctagcaaaaaaaaaaaaaaaaaaaaaaaaaaaaaaaaaaaaaaaaaaaaaaaaaaaaaaaaaaaaaaaaaaaaaaaaaaaaaaaagcccagccggctccccaacctctaccgaggagggcacctctgagtccgccacccccgagagcggccctggcacctccaccgagcccagcgagggcagcgcacccggcagccctgccggcagccccacctccacagaggagggaaccagcaccgagcccagcgaaggcagcgccccaggcaccagcaccgagcctagtgagcaggagattaaacggatcaacaagatcagaagaagacttgtgaaagacagcaacaccaagaaggccggcaagacaggccccatgaaaaccctgctggttagagtgatgacacccgatctgagagagcggctggaaaacctgagaaagaagcctgaaaatatcccccagcccatcagcaatacatctagagccaacctgaataagctgctgaccgattacaccgaaatgaagaaggcgatcctgcatgtgtactgggaagagttccagaaggaccctgtgggcctgatgagccgggtggcccagcctgccagcaagaagatcgatcagaacaagctgaaacctgagatggacgagaagggcaacctgaccaccgccggctttgcctgctctcagtgtggccagcccctgttcgtgtacaagctggagcaggtgtctgagaagggcaaggcttacaccaactacttcggacggtgcaatgtggccgagcacgaaaagctgatcctgctggcccagctgaagcccgagaaggatagcgacgaagccgtgacatatagcctgggaaagtttgggcagagggccctggatttctacagcattcatgtgaccaaggagtccacccaccccgtgaagcccctggcccagatcgccggaaacagatacgcctccggacctgtgggaaaggccctgagcgacgcatgtatgggcacaatcgcctccttcctgtctaagtaccaggacatcatcatcgaacaccagaaggtggtgaagggcaaccagaagagactggagagcctgcgggagctggccggcaaggaaaacctggaataccctagcgtgaccctgccacctcagcctcacaccaaggagggcgttgatgcctacaacgaagtgatcgcccgggtgcgaatgtgggtgaacctgaacctgtggcagaagctgaagctaagcagagatgatgccaagcctctgctgagactgaagggattcccttcctttcctctggtcgagagacaggccaacgaagtggactggtgggacatggtgtgtaacgtgaagaagctgatcaacgagaaaaaggaggatggcaaggtgttttggcagaatctggctggctacaagagacaggaagccctgagaccatacctgagcagcgaggaagatcggaagaagggaaagaaattcgctcggtaccagctgggcgacctgctgctgcacctggaaaagaagcacggcgaggactggggaaaggtgtacgacgaggcctgggagcggattgacaagaaagtggaaggcctgagcaagcacatcaagctggaagaggaacggagaagcgaggacgcccagagcaaggccgccctgaccgactggctgcgggctaaggccagcttcgtgatcgagggcctgaaggaggccgacaaggacgagttctgcagatgcgagctgaagctgcagaagtggtacggggacctgcggggaaagcccttcgccatcgaagccgagaacagcatcctggacatcagcggcttcagcaagcagtacaactgtgccttcatctggcagaaggacggcgtgaagaagctgaacctgtacctgatcatcaactacttcaagggcggcaagctgcggttcaagaagatcaaacctgaagccttcgaagccaacagattctacaccgtgatcaacaaaaagagcggcgagatcgtgcccatggaggtgaacttcaacttcgacgaccccaacctgatcatcctgcctctggcctttggcaagagacagggcagagaattcatctggaacgacctgctgtccctggaaaccggcagcctgaagctggccaacggaagagtgatcgagaagacactgtacaacagaagaacccggcaggatgagcctgccctgttcgtggccctgaccttcgagcggcgggaggtcctggactcctccaatatcaaaccaatgaacctgatcggcgtggcaagaggcgaaaacatccccgccgtgatcgccctgaccgaccccgagggctgcccactgagccggtttaaggatagcctgggaaacccaacccacatcctgagaatcggcgagagctataaggagaagcagcggaccatccaggccaagaaggaggtggagcagcggagagccggcggctacagccggaagtacgccagcaaagccaagaatctggcagacgatatggtgagaaacaccgctagagatctgctgtactacgccgtgacccaggatgccatgctgatcttcgccaacctgagccggggcttcggccggcagggcaagcggaccttcatggccgagagacagtacacacggatggaggactggctgaccgccaagctggcctacgagggcctgagcaagacctacctgtccaagacactggcccagtacacctccaagacatgcagcaactgtgggtttaccatcaccagcgccgactacgacagggtgctggagaagctgaagaagacagcaacaggctggatgaccacaattaacggcaaggagctgaaggtggagggccagattacctactacaacagatacaagagacagaacgtagtcaaggacctgtccgtcgagctggatagactgagcgaagaatctgtgaacaacgacatctcctcctggacaaagggcagaagcggagaagctctgagcctcctgaagaaaagattctcccatagacccgtgcaggagaagttcgtgtgcctgaactgcggcttcgagacacacgcagccgagcaagccgccctgaacatcgccagatcctggctgttcctgcggagccaggagtacaagaaataccagacaaacaagacaaccggcaacaccgataagagagccttcgtcgagacctggcagtccttttaccggaagaagcttaaggaggtgtggaaacctgccgtgcggtctggcggatctggcggaggctccaccagccccaagaaaaagagaaaagtctaagctgccttctgcggggcttgccttctggccatgcccttcttctctcccttgcacctgtacctcttggtctttgaataaagcctgagtaggaaggctagcaaaaaaaaaaaaaaaaaaaaaaaaaaaaaaaaaaaaaaaaaaaaaaaaaaaaaaaaaaaaaaaaaaaaaaaaaaaaaaaa

SEQ ID NO: 8937 - RNA, 8787 nt, synthetic construct
  source 1..8787: mol_type = other RNA
aggaaataagagagaaaagaagagtaagaagaaatataagagccaccatggcccctaagaagaagcgtaaagtgagccggatgaaccacgaccaggagttcgacccccctaaggtgtaccctcccgtccccgccgagaagagaaagcccatccgggtcctgagcctgttcgatggcatcgccaccggtctgctggtgctgaaggacctgggcatccaggtggataggtacattgcctccgaggtgtgcgaggactccatcaccgtgggaatggtgcgtcatcagggcaagatcatgtacgtgggcgacgtgcggagcgtgacacagaagcatatccaggagtggggccctttcgacctggtgatcggcggcagcccttgcaatgacctgagcatcgtgaacccagcccggaagggcctgtacgagggaaccggcagactgttcttcgagttttacagactgctgcacgacgcccggcctaaggaaggcgacgaccggcccttcttttggctgttcgagaatgtggtggccatgggagtcagcgacaagcgggatattagccggttcctggagagcaaccccgtgatgatcgatgccaaggaagtgagcgccgcccaccgggccagatacttctggggcaatctgcctggcatgaacagacccctggccagcaccgtgaacgacaagctggagctgcaggagtgcctggagcacggccggatcgccaagttcagcaaggtgagaaccatcaccacccgaagcaacagcatcaaacaaggcaaggaccagcactttcctgtgttcatgaacgagaaggaggacatcctgtggtgtaccgagatggagagagtgttcgggttcccagtccactacacagatgtcagcaacatgtctagactggccagacagagactgctgggaagaagctggtccgtccctgtgatcagacacctgttcgcccctctgaaggagtacttcgcctgcgtgagcagcggcaacagcaacgccaacagccggggccccagcttctctagcggcctggtgccactgtccctgagagggagccacatgggccccatggagatctacaaaaccgtgagcgcctggaagcggcagcctgtgcgcgtgctgagcctgtttcggaatatcgataaagtcctgaaaagcctgggattcctggagagcggctctggctccggcggtggcaccctgaagtacgtggaggatgtgacaaacgtggtcagacgggatgtggagaagtggggccccttcgatctggtgtacggcagcacccaacccctgggcagctcttgtgaccggtgccctggctggtacatgtttcagttccaccggatcctgcagtacgccctgccgagacaggagtcccagcggccattcttttggattttcatggacaacttgctgctgaccgaggatgaccaggaaactaccactcggttcctgcagaccgaagccgtgaccctgcaggacgtgagaggccgggactaccagaacgccatgcgggtgtggtccaacatccctggactgaaaagcaagcacgcacctctgacccctaaagaagaggagtacctgcaggcccaggtgcggagcagaagcaagctggacgcccctaaggtggatctgctggtgaagaattgcctcctgcccctgagagagtacttcaagtatttcagccagaatagtctgcccctgggaggcagcggcggcggcagcaaggcccccatcaccttcggcgacctggccatctacttcagccaggaggagtgggagtggctgagccccatccagaaggacctgtacgaggacgtgatgctggagaactacaggaacctggtgagcctgggcctgagcttcaggaggcccaacgtgatcaccctgctggagaagggcaaggccccctggatggtggagcccgccaggaggaggaggggccccgacagcggcagcaaggtgggcggcccaagcagcggcgcccctcctcccagcggcggcaggcggcccaagcagcggcgcccctcctcccagcggcggcagcccagccggctccccaacctctaccgaggagggcacctctgagtccgccacccccgagagcggccctggcacctccaccgagcccagcgagggcagcgcacccggcagccctgccggcagccccacctccacagaggagggaaccagcaccgagcccagcgaaggcagcgccccaggcaccagcaccgagcctagtgagcaggagattaaacggatcaacaagatcagaagaagacttgtgaaagacagcaacaccaagaaggccggcaagacaggccccatgaaaaccctgctggttagagtgatgacacccgatctgagagagcggctggaaaacctgagaaagaagcctgaaaatatcccccagcccatcagcaatacatctagagccaacctgaataagctgctgaccgattacaccgaaatgaagaaggcgatcctgcatgtgtactgggaagagttccagaaggaccctgtgggcctgatgagccgggtggcccagcctgccagcaagaagatcgatcagaacaagctgaaacctgagatggacgagaagggcaacctgaccaccgccggctttgcctgctctcagtgtggccagcccctgttcgtgtacaagctggagcaggtgtctgagaagggcaaggcttacaccaactacttcggacggtgcaatgtggccgagcacgaaaagctgatcctgctggcccagctgaagcccgagaaggatagcgacgaagccgtgacatatagcctgggaaagtttgggcagagggccctggatttctacagcattcatgtgaccaaggagtccacccaccccgtgaagcccctggcccagatcgccggaaacagatacgcctccggacctgtgggaaaggccctgagcgacgcatgtatgggcacaatcgcctccttcctgtctaagtaccaggacatcatcatcgaacaccagaaggtggtgaagggcaaccagaagagactggagagcctgcgggagctggccggcaaggaaaacctggaataccctagcgtgaccctgccacctcagcctcacaccaaggagggcgttgatgcctacaacgaagtgatcgcccgggtgcgaatgtgggtgaacctgaacctgtggcagaagctgaagctaagcagagatgatgccaagcctctgctgagactgaagggattcccttcctttcctctggtcgagagacaggccaacgaagtggactggtgggacatggtgtgtaacgtgaagaagctgatcaacgagaaaaaggaggatggcaaggtgttttggcagaatctggctggctacaagagacaggaagccctgagaccatacctgagcagcgaggaagatcggaagaagggaaagaaattcgctcggtaccagctgggcgacctgctgctgcacctggaaaagaagcacggcgaggactggggaaaggtgtacgacgaggcctgggagcggattgacaagaaagtggaaggcctgagcaagcacatcaagctggaagaggaacggagaagcgaggacgcccagagcaaggccgccctgaccgactggctgcgggctaaggccagcttcgtgatcgagggcctgaaggaggccgacaaggacgagttctgcagatgcgagctgaagctgcagaagtggtacggggacctgcggggaaagcccttcgccatcgaagccgagaacagcatcctggacatcagcggcttcagcaagcagtacaactgtgccttcatctggcagaaggacggcgtgaagaagctgaacctgtacctgatcatcaactacttcaagggcggcaagctgcggttcaagaagatcaaacctgaagccttcgaagccaacagattctacaccgtgatcaacaaaaagagcggcgagatcgtgcccatggaggtgaacttcaacttcgacgaccccaacctgatcatcctgcctctggcctttggcaagagacagggcagagaattcatctggaacgacctgctgtccctggaaaccggcagcctgaagctggccaacggaagagtgatcgagaagacactgtacaacagaagaacccggcaggatgagcctgccctgttcgtggccctgaccttcgagcggcgggaggtcctggactcctccaatatcaaaccaatgaacctgatcggcgtggcaagaggcgaaaacatccccgccgtgatcgccctgaccgaccccgagggctgcccactgagccggtttaaggatagcctgggaaacccaacccacatcctgagaatcggcgagagctataaggagaagcagcggaccatccaggccaagaaggaggtggagcagcggagagccggcggctacagccggaagtacgccagcaaagccaagaatctggcagacgatatggtgagaaacaccgctagagatctgctgtactacgccgtgacccaggatgccatgctgatcttcgccaacctgagccggggcttcggccggcagggcaagcggaccttcatggccgagagacagtacacacggatggaggactggctgaccgccaagctggcctacgagggcctgagcaagacctacctgtccaagacactggcccagtacacctccaagacatgcagcaactgtgggtttaccatcaccagcgccgactacgacagggtgctggagaagctgaagaagacagcaacaggctggatgaccacaattaacggcaaggagctgaaggtggagggccagattacctactacaacagatacaagagacagaacgtagtcaaggacctgtccgtcgagctggatagactgagcgaagaatctgtgaacaacgacatctcctcctggacaaagggcagaagcggagaagctctgagcctcctgaagaaaagattctcccatagacccgtgcaggagaagttcgtgtgcctgaactgcggcttcgagacacacgcagccgagcaagccgccctgaacatcgccagatcctggctgttcctgcggagccaggagtacaagaaataccagacaaacaagacaaccggcaacaccgataagagagccttcgtcgagacctggcagtccttttaccggaagaagcttaaggaggtgtggaaacctgccgtgcggtctggcggatctggcggaggctccaccagccccaagaaaaagagaaaagtctaagctgccttctgcggggcttgccttctggccatgcccttcttctctcccttgcacctgtacctcttggtctttgaataaagcctgagtaggaaggctagcaaaaaaaaaaaaaaaaaaaaaaaaaaaaaaaaaaaaaaaaaaaaaaaaaaaaaaaaaaaaaaaaaaaaaaaaaaaaaaaagcccagccggctccccaacctctaccgaggagggcacctctgagtccgccacccccgagagcggccctggcacctccaccgagcccagcgagggcagcgcacccggcagccctgccggcagccccacctccacagaggagggaaccagcaccgagcccagcgaaggcagcgccccaggcaccagcaccgagcctagtgagcaggagattaaacggatcaacaagatcagaagaagacttgtgaaagacagcaacaccaagaaggccggcaagacaggccccatgaaaaccctgctggttagagtgatgacacccgatctgagagagcggctggaaaacctgagaaagaagcctgaaaatatcccccagcccatcagcaatacatctagagccaacctgaataagctgctgaccgattacaccgaaatgaagaaggcgatcctgcatgtgtactgggaagagttccagaaggaccctgtgggcctgatgagccgggtggcccagcctgccagcaagaagatcgatcagaacaagctgaaacctgagatggacgagaagggcaacctgaccaccgccggctttgcctgctctcagtgtggccagcccctgttcgtgtacaagctggagcaggtgtctgagaagggcaaggcttacaccaactacttcggacggtgcaatgtggccgagcacgaaaagctgatcctgctggcccagctgaagcccgagaaggatagcgacgaagccgtgacatatagcctgggaaagtttgggcagagggccctggatttctacagcattcatgtgaccaaggagtccacccaccccgtgaagcccctggcccagatcgccggaaacagatacgcctccggacctgtgggaaaggccctgagcgacgcatgtatgggcacaatcgcctccttcctgtctaagtaccaggacatcatcatcgaacaccagaaggtggtgaagggcaaccagaagagactggagagcctgcgggagctggccggcaaggaaaacctggaataccctagcgtgaccctgccacctcagcctcacaccaaggagggcgttgatgcctacaacgaagtgatcgcccgggtgcgaatgtgggtgaacctgaacctgtggcagaagctgaagctaagcagagatgatgccaagcctctgctgagactgaagggattcccttcctttcctctggtcgagagacaggccaacgaagtggactggtgggacatggtgtgtaacgtgaagaagctgatcaacgagaaaaaggaggatggcaaggtgttttggcagaatctggctggctacaagagacaggaagccctgagaccatacctgagcagcgaggaagatcggaagaagggaaagaaattcgctcggtaccagctgggcgacctgctgctgcacctggaaaagaagcacggcgaggactggggaaaggtgtacgacgaggcctgggagcggattgacaagaaagtggaaggcctgagcaagcacatcaagctggaagaggaacggagaagcgaggacgcccagagcaaggccgccctgaccgactggctgcgggctaaggccagcttcgtgatcgagggcctgaaggaggccgacaaggacgagttctgcagatgcgagctgaagctgcagaagtggtacggggacctgcggggaaagcccttcgccatcgaagccgagaacagcatcctggacatcagcggcttcagcaagcagtacaactgtgccttcatctggcagaaggacggcgtgaagaagctgaacctgtacctgatcatcaactacttcaagggcggcaagctgcggttcaagaagatcaaacctgaagccttcgaagccaacagattctacaccgtgatcaacaaaaagagcggcgagatcgtgcccatggaggtgaacttcaacttcgacgaccccaacctgatcatcctgcctctggcctttggcaagagacagggcagagaattcatctggaacgacctgctgtccctggaaaccggcagcctgaagctggccaacggaagagtgatcgagaagacactgtacaacagaagaacccggcaggatgagcctgccctgttcgtggccctgaccttcgagcggcgggaggtcctggactcctccaatatcaaaccaatgaacctgatcggcgtggcaagaggcgaaaacatccccgccgtgatcgccctgaccgaccccgagggctgcccactgagccggtttaaggatagcctgggaaacccaacccacatcctgagaatcggcgagagctataaggagaagcagcggaccatccaggccaagaaggaggtggagcagcggagagccggcggctacagccggaagtacgccagcaaagccaagaatctggcagacgatatggtgagaaacaccgctagagatctgctgtactacgccgtgacccaggatgccatgctgatcttcgccaacctgagccggggcttcggccggcagggcaagcggaccttcatggccgagagacagtacacacggatggaggactggctgaccgccaagctggcctacgagggcctgagcaagacctacctgtccaagacactggcccagtacacctccaagacatgcagcaactgtgggtttaccatcaccagcgccgactacgacagggtgctggagaagctgaagaagacagcaacaggctggatgaccacaattaacggcaaggagctgaaggtggagggccagattacctactacaacagatacaagagacagaacgtagtcaaggacctgtccgtcgagctggatagactgagcgaagaatctgtgaacaacgacatctcctcctggacaaagggcagaagcggagaagctctgagcctcctgaagaaaagattctcccatagacccgtgcaggagaagttcgtgtgcctgaactgcggcttcgagacacacgcagccgagcaagccgccctgaacatcgccagatcctggctgttcctgcggagccaggagtacaagaaataccagacaaacaagacaaccggcaacaccgataagagagccttcgtcgagacctggcagtccttttaccggaagaagcttaaggaggtgtggaaacctgccgtgcggtctggcggatctggcggaggctccaccagccccaagaaaaagagaaaagtctaagctgccttctgcggggcttgccttctggccatgcccttcttctctcccttgcacctgtacctcttggtctttgaataaagcctgagtaggaaggctagcaaaaaaaaaaaaaaaaaaaaaaaaaaaaaaaaaaaaaaaaaaaaaaaaaaaaaaaaaaaaaaaaaaaaaaaaaaaaaaaa

SEQ ID NO: 8938 - RNA, 8787 nt, synthetic construct
  source 1..8787: mol_type = other RNA
aggaaataagagagaaaagaagagtaagaagaaatataagagccaccatggcccctaagaagaagcgtaaagtgagccggatgaaccacgaccaggagttcgacccccctaaggtgtaccctcccgtccccgccgagaagagaaagcccatccgggtcctgagcctgttcgatggcatcgccaccggtctgctggtgctgaaggacctgggcatccaggtggataggtacattgcctccgaggtgtgcgaggactccatcaccgtgggaatggtgcgtcatcagggcaagatcatgtacgtgggcgacgtgcggagcgtgacacagaagcatatccaggagtggggccctttcgacctggtgatcggcggcagcccttgcaatgacctgagcatcgtgaacccagcccggaagggcctgtacgagggaaccggcagactgttcttcgagttttacagactgctgcacgacgcccggcctaaggaaggcgacgaccggcccttcttttggctgttcgagaatgtggtggccatgggagtcagcgacaagcgggatattagccggttcctggagagcaaccccgtgatgatcgatgccaaggaagtgagcgccgcccaccgggccagatacttctggggcaatctgcctggcatgaacagacccctggccagcaccgtgaacgacaagctggagctgcaggagtgcctggagcacggccggatcgccaagttcagcaaggtgagaaccatcaccacccgaagcaacagcatcaaacaaggcaaggaccagcactttcctgtgttcatgaacgagaaggaggacatcctgtggtgtaccgagatggagagagtgttcgggttcccagtccactacacagatgtcagcaacatgtctagactggccagacagagactgctgggaagaagctggtccgtccctgtgatcagacacctgttcgcccctctgaaggagtacttcgcctgcgtgagcagcggcaacagcaacgccaacagccggggccccagcttctctagcggcctggtgccactgtccctgagagggagccacatgggccccatggagatctacaaaaccgtgagcgcctggaagcggcagcctgtgcgcgtgctgagcctgtttcggaatatcgataaagtcctgaaaagcctgggattcctggagagcggctctggctccggcggtggcaccctgaagtacgtggaggatgtgacaaacgtggtcagacgggatgtggagaagtggggccccttcgatctggtgtacggcagcacccaacccctgggcagctcttgtgaccggtgccctggctggtacatgtttcagttccaccggatcctgcagtacgccctgccgagacaggagtcccagcggccattcttttggattttcatggacaacttgctgctgaccgaggatgaccaggaaactaccactcggttcctgcagaccgaagccgtgaccctgcaggacgtgagaggccgggactaccagaacgccatgcgggtgtggtccaacatccctggactgaaaagcaagcacgcacctctgacccctaaagaagaggagtacctgcaggcccaggtgcggagcagaagcaagctggacgcccctaaggtggatctgctggtgaagaattgcctcctgcccctgagagagtacttcaagtatttcagccagaatagtctgcccctgggaggcagcggcggcggcttccaggagagcgtggtgttcagcgacgtgagcatcgccttcagccaggaggagtgggcccacctggacctggagcagaaggacctgtacagggacgtgatgctggagaactacagcaacctggtgagcctgggctgcttcgtgagcaagcccgacgtgatcagcctgctggagcagggcaaggagccctggaagatcgtgaggaagggcaggaggaggtaccccgacctggagaccaggtacggcggcccaagcagcggcgcccctcctcccagcggcggcaggcggcccaagcagcggcgcccctcctcccagcggcggcagcccagccggctccccaacctctaccgaggagggcacctctgagtccgccacccccgagagcggccctggcacctccaccgagcccagcgagggcagcgcacccggcagccctgccggcagccccacctccacagaggagggaaccagcaccgagcccagcgaaggcagcgccccaggcaccagcaccgagcctagtgagcaggagattaaacggatcaacaagatcagaagaagacttgtgaaagacagcaacaccaagaaggccggcaagacaggccccatgaaaaccctgctggttagagtgatgacacccgatctgagagagcggctggaaaacctgagaaagaagcctgaaaatatcccccagcccatcagcaatacatctagagccaacctgaataagctgctgaccgattacaccgaaatgaagaaggcgatcctgcatgtgtactgggaagagttccagaaggaccctgtgggcctgatgagccgggtggcccagcctgccagcaagaagatcgatcagaacaagctgaaacctgagatggacgagaagggcaacctgaccaccgccggctttgcctgctctcagtgtggccagcccctgttcgtgtacaagctggagcaggtgtctgagaagggcaaggcttacaccaactacttcggacggtgcaatgtggccgagcacgaaaagctgatcctgctggcccagctgaagcccgagaaggatagcgacgaagccgtgacatatagcctgggaaagtttgggcagagggccctggatttctacagcattcatgtgaccaaggagtccacccaccccgtgaagcccctggcccagatcgccggaaacagatacgcctccggacctgtgggaaaggccctgagcgacgcatgtatgggcacaatcgcctccttcctgtctaagtaccaggacatcatcatcgaacaccagaaggtggtgaagggcaaccagaagagactggagagcctgcgggagctggccggcaaggaaaacctggaataccctagcgtgaccctgccacctcagcctcacaccaaggagggcgttgatgcctacaacgaagtgatcgcccgggtgcgaatgtgggtgaacctgaacctgtggcagaagctgaagctaagcagagatgatgccaagcctctgctgagactgaagggattcccttcctttcctctggtcgagagacaggccaacgaagtggactggtgggacatggtgtgtaacgtgaagaagctgatcaacgagaaaaaggaggatggcaaggtgttttggcagaatctggctggctacaagagacaggaagccctgagaccatacctgagcagcgaggaagatcggaagaagggaaagaaattcgctcggtaccagctgggcgacctgctgctgcacctggaaaagaagcacggcgaggactggggaaaggtgtacgacgaggcctgggagcggattgacaagaaagtggaaggcctgagcaagcacatcaagctggaagaggaacggagaagcgaggacgcccagagcaaggccgccctgaccgactggctgcgggctaaggccagcttcgtgatcgagggcctgaaggaggccgacaaggacgagttctgcagatgcgagctgaagctgcagaagtggtacggggacctgcggggaaagcccttcgccatcgaagccgagaacagcatcctggacatcagcggcttcagcaagcagtacaactgtgccttcatctggcagaaggacggcgtgaagaagctgaacctgtacctgatcatcaactacttcaagggcggcaagctgcggttcaagaagatcaaacctgaagccttcgaagccaacagattctacaccgtgatcaacaaaaagagcggcgagatcgtgcccatggaggtgaacttcaacttcgacgaccccaacctgatcatcctgcctctggcctttggcaagagacagggcagagaattcatctggaacgacctgctgtccctggaaaccggcagcctgaagctggccaacggaagagtgatcgagaagacactgtacaacagaagaacccggcaggatgagcctgccctgttcgtggccctgaccttcgagcggcgggaggtcctggactcctccaatatcaaaccaatgaacctgatcggcgtggcaagaggcgaaaacatccccgccgtgatcgccctgaccgaccccgagggctgcccactgagccggtttaaggatagcctgggaaacccaacccacatcctgagaatcggcgagagctataaggagaagcagcggaccatccaggccaagaaggaggtggagcagcggagagccggcggctacagccggaagtacgccagcaaagccaagaatctggcagacgatatggtgagaaacaccgctagagatctgctgtactacgccgtgacccaggatgccatgctgatcttcgccaacctgagccggggcttcggccggcagggcaagcggaccttcatggccgagagacagtacacacggatggaggactggctgaccgccaagctggcctacgagggcctgagcaagacctacctgtccaagacactggcccagtacacctccaagacatgcagcaactgtgggtttaccatcaccagcgccgactacgacagggtgctggagaagctgaagaagacagcaacaggctggatgaccacaattaacggcaaggagctgaaggtggagggccagattacctactacaacagatacaagagacagaacgtagtcaaggacctgtccgtcgagctggatagactgagcgaagaatctgtgaacaacgacatctcctcctggacaaagggcagaagcggagaagctctgagcctcctgaagaaaagattctcccatagacccgtgcaggagaagttcgtgtgcctgaactgcggcttcgagacacacgcagccgagcaagccgccctgaacatcgccagatcctggctgttcctgcggagccaggagtacaagaaataccagacaaacaagacaaccggcaacaccgataagagagccttcgtcgagacctggcagtccttttaccggaagaagcttaaggaggtgtggaaacctgccgtgcggtctggcggatctggcggaggctccaccagccccaagaaaaagagaaaagtctaagctgccttctgcggggcttgccttctggccatgcccttcttctctcccttgcacctgtacctcttggtctttgaataaagcctgagtaggaaggctagcaaaaaaaaaaaaaaaaaaaaaaaaaaaaaaaaaaaaaaaaaaaaaaaaaaaaaaaaaaaaaaaaaaaaaaaaaaaaaaaagcccagccggctccccaacctctaccgaggagggcacctctgagtccgccacccccgagagcggccctggcacctccaccgagcccagcgagggcagcgcacccggcagccctgccggcagccccacctccacagaggagggaaccagcaccgagcccagcgaaggcagcgccccaggcaccagcaccgagcctagtgagcaggagattaaacggatcaacaagatcagaagaagacttgtgaaagacagcaacaccaagaaggccggcaagacaggccccatgaaaaccctgctggttagagtgatgacacccgatctgagagagcggctggaaaacctgagaaagaagcctgaaaatatcccccagcccatcagcaatacatctagagccaacctgaataagctgctgaccgattacaccgaaatgaagaaggcgatcctgcatgtgtactgggaagagttccagaaggaccctgtgggcctgatgagccgggtggcccagcctgccagcaagaagatcgatcagaacaagctgaaacctgagatggacgagaagggcaacctgaccaccgccggctttgcctgctctcagtgtggccagcccctgttcgtgtacaagctggagcaggtgtctgagaagggcaaggcttacaccaactacttcggacggtgcaatgtggccgagcacgaaaagctgatcctgctggcccagctgaagcccgagaaggatagcgacgaagccgtgacatatagcctgggaaagtttgggcagagggccctggatttctacagcattcatgtgaccaaggagtccacccaccccgtgaagcccctggcccagatcgccggaaacagatacgcctccggacctgtgggaaaggccctgagcgacgcatgtatgggcacaatcgcctccttcctgtctaagtaccaggacatcatcatcgaacaccagaaggtggtgaagggcaaccagaagagactggagagcctgcgggagctggccggcaaggaaaacctggaataccctagcgtgaccctgccacctcagcctcacaccaaggagggcgttgatgcctacaacgaagtgatcgcccgggtgcgaatgtgggtgaacctgaacctgtggcagaagctgaagctaagcagagatgatgccaagcctctgctgagactgaagggattcccttcctttcctctggtcgagagacaggccaacgaagtggactggtgggacatggtgtgtaacgtgaagaagctgatcaacgagaaaaaggaggatggcaaggtgttttggcagaatctggctggctacaagagacaggaagccctgagaccatacctgagcagcgaggaagatcggaagaagggaaagaaattcgctcggtaccagctgggcgacctgctgctgcacctggaaaagaagcacggcgaggactggggaaaggtgtacgacgaggcctgggagcggattgacaagaaagtggaaggcctgagcaagcacatcaagctggaagaggaacggagaagcgaggacgcccagagcaaggccgccctgaccgactggctgcgggctaaggccagcttcgtgatcgagggcctgaaggaggccgacaaggacgagttctgcagatgcgagctgaagctgcagaagtggtacggggacctgcggggaaagcccttcgccatcgaagccgagaacagcatcctggacatcagcggcttcagcaagcagtacaactgtgccttcatctggcagaaggacggcgtgaagaagctgaacctgtacctgatcatcaactacttcaagggcggcaagctgcggttcaagaagatcaaacctgaagccttcgaagccaacagattctacaccgtgatcaacaaaaagagcggcgagatcgtgcccatggaggtgaacttcaacttcgacgaccccaacctgatcatcctgcctctggcctttggcaagagacagggcagagaattcatctggaacgacctgctgtccctggaaaccggcagcctgaagctggccaacggaagagtgatcgagaagacactgtacaacagaagaacccggcaggatgagcctgccctgttcgtggccctgaccttcgagcggcgggaggtcctggactcctccaatatcaaaccaatgaacctgatcggcgtggcaagaggcgaaaacatccccgccgtgatcgccctgaccgaccccgagggctgcccactgagccggtttaaggatagcctgggaaacccaacccacatcctgagaatcggcgagagctataaggagaagcagcggaccatccaggccaagaaggaggtggagcagcggagagccggcggctacagccggaagtacgccagcaaagccaagaatctggcagacgatatggtgagaaacaccgctagagatctgctgtactacgccgtgacccaggatgccatgctgatcttcgccaacctgagccggggcttcggccggcagggcaagcggaccttcatggccgagagacagtacacacggatggaggactggctgaccgccaagctggcctacgagggcctgagcaagacctacctgtccaagacactggcccagtacacctccaagacatgcagcaactgtgggtttaccatcaccagcgccgactacgacagggtgctggagaagctgaagaagacagcaacaggctggatgaccacaattaacggcaaggagctgaaggtggagggccagattacctactacaacagatacaagagacagaacgtagtcaaggacctgtccgtcgagctggatagactgagcgaagaatctgtgaacaacgacatctcctcctggacaaagggcagaagcggagaagctctgagcctcctgaagaaaagattctcccatagacccgtgcaggagaagttcgtgtgcctgaactgcggcttcgagacacacgcagccgagcaagccgccctgaacatcgccagatcctggctgttcctgcggagccaggagtacaagaaataccagacaaacaagacaaccggcaacaccgataagagagccttcgtcgagacctggcagtccttttaccggaagaagcttaaggaggtgtggaaacctgccgtgcggtctggcggatctggcggaggctccaccagccccaagaaaaagagaaaagtctaagctgccttctgcggggcttgccttctggccatgcccttcttctctcccttgcacctgtacctcttggtctttgaataaagcctgagtaggaaggctagcaaaaaaaaaaaaaaaaaaaaaaaaaaaaaaaaaaaaaaaaaaaaaaaaaaaaaaaaaaaaaaaaaaaaaaaaaaaaaaaa

SEQ ID NO: 8939 - RNA, 8787 nt, synthetic construct
  source 1..8787: mol_type = other RNA
aggaaataagagagaaaagaagagtaagaagaaatataagagccaccatggcccctaagaagaagcgtaaagtgagccggatgaaccacgaccaggagttcgacccccctaaggtgtaccctcccgtccccgccgagaagagaaagcccatccgggtcctgagcctgttcgatggcatcgccaccggtctgctggtgctgaaggacctgggcatccaggtggataggtacattgcctccgaggtgtgcgaggactccatcaccgtgggaatggtgcgtcatcagggcaagatcatgtacgtgggcgacgtgcggagcgtgacacagaagcatatccaggagtggggccctttcgacctggtgatcggcggcagcccttgcaatgacctgagcatcgtgaacccagcccggaagggcctgtacgagggaaccggcagactgttcttcgagttttacagactgctgcacgacgcccggcctaaggaaggcgacgaccggcccttcttttggctgttcgagaatgtggtggccatgggagtcagcgacaagcgggatattagccggttcctggagagcaaccccgtgatgatcgatgccaaggaagtgagcgccgcccaccgggccagatacttctggggcaatctgcctggcatgaacagacccctggccagcaccgtgaacgacaagctggagctgcaggagtgcctggagcacggccggatcgccaagttcagcaaggtgagaaccatcaccacccgaagcaacagcatcaaacaaggcaaggaccagcactttcctgtgttcatgaacgagaaggaggacatcctgtggtgtaccgagatggagagagtgttcgggttcccagtccactacacagatgtcagcaacatgtctagactggccagacagagactgctgggaagaagctggtccgtccctgtgatcagacacctgttcgcccctctgaaggagtacttcgcctgcgtgagcagcggcaacagcaacgccaacagccggggccccagcttctctagcggcctggtgccactgtccctgagagggagccacatgggccccatggagatctacaaaaccgtgagcgcctggaagcggcagcctgtgcgcgtgctgagcctgtttcggaatatcgataaagtcctgaaaagcctgggattcctggagagcggctctggctccggcggtggcaccctgaagtacgtggaggatgtgacaaacgtggtcagacgggatgtggagaagtggggccccttcgatctggtgtacggcagcacccaacccctgggcagctcttgtgaccggtgccctggctggtacatgtttcagttccaccggatcctgcagtacgccctgccgagacaggagtcccagcggccattcttttggattttcatggacaacttgctgctgaccgaggatgaccaggaaactaccactcggttcctgcagaccgaagccgtgaccctgcaggacgtgagaggccgggactaccagaacgccatgcgggtgtggtccaacatccctggactgaaaagcaagcacgcacctctgacccctaaagaagaggagtacctgcaggcccaggtgcggagcagaagcaagctggacgcccctaaggtggatctgctggtgaagaattgcctcctgcccctgagagagtacttcaagtatttcagccagaatagtctgcccctgggaggcagcggcggcggcagcaaggcccccatcaccttcggcgacctggccatctacttcagccaggaggagtgggagtggctgagccccatccagaaggacctgtacgaggacgtgatgctggagaactacaggaacctggtgagcctgggcctgagcttcaggaggcccaacgtgatcaccctgctggagaagggcaaggccccctggatgatcgagcccgtgaggaggaggagggcccccgagctgaccgaggccagcggcggcccaagcagcggcgcccctcctcccagcggcggcaggcggcccaagcagcggcgcccctcctcccagcggcggcagcccagccggctccccaacctctaccgaggagggcacctctgagtccgccacccccgagagcggccctggcacctccaccgagcccagcgagggcagcgcacccggcagccctgccggcagccccacctccacagaggagggaaccagcaccgagcccagcgaaggcagcgccccaggcaccagcaccgagcctagtgagcaggagattaaacggatcaacaagatcagaagaagacttgtgaaagacagcaacaccaagaaggccggcaagacaggccccatgaaaaccctgctggttagagtgatgacacccgatctgagagagcggctggaaaacctgagaaagaagcctgaaaatatcccccagcccatcagcaatacatctagagccaacctgaataagctgctgaccgattacaccgaaatgaagaaggcgatcctgcatgtgtactgggaagagttccagaaggaccctgtgggcctgatgagccgggtggcccagcctgccagcaagaagatcgatcagaacaagctgaaacctgagatggacgagaagggcaacctgaccaccgccggctttgcctgctctcagtgtggccagcccctgttcgtgtacaagctggagcaggtgtctgagaagggcaaggcttacaccaactacttcggacggtgcaatgtggccgagcacgaaaagctgatcctgctggcccagctgaagcccgagaaggatagcgacgaagccgtgacatatagcctgggaaagtttgggcagagggccctggatttctacagcattcatgtgaccaaggagtccacccaccccgtgaagcccctggcccagatcgccggaaacagatacgcctccggacctgtgggaaaggccctgagcgacgcatgtatgggcacaatcgcctccttcctgtctaagtaccaggacatcatcatcgaacaccagaaggtggtgaagggcaaccagaagagactggagagcctgcgggagctggccggcaaggaaaacctggaataccctagcgtgaccctgccacctcagcctcacaccaaggagggcgttgatgcctacaacgaagtgatcgcccgggtgcgaatgtgggtgaacctgaacctgtggcagaagctgaagctaagcagagatgatgccaagcctctgctgagactgaagggattcccttcctttcctctggtcgagagacaggccaacgaagtggactggtgggacatggtgtgtaacgtgaagaagctgatcaacgagaaaaaggaggatggcaaggtgttttggcagaatctggctggctacaagagacaggaagccctgagaccatacctgagcagcgaggaagatcggaagaagggaaagaaattcgctcggtaccagctgggcgacctgctgctgcacctggaaaagaagcacggcgaggactggggaaaggtgtacgacgaggcctgggagcggattgacaagaaagtggaaggcctgagcaagcacatcaagctggaagaggaacggagaagcgaggacgcccagagcaaggccgccctgaccgactggctgcgggctaaggccagcttcgtgatcgagggcctgaaggaggccgacaaggacgagttctgcagatgcgagctgaagctgcagaagtggtacggggacctgcggggaaagcccttcgccatcgaagccgagaacagcatcctggacatcagcggcttcagcaagcagtacaactgtgccttcatctggcagaaggacggcgtgaagaagctgaacctgtacctgatcatcaactacttcaagggcggcaagctgcggttcaagaagatcaaacctgaagccttcgaagccaacagattctacaccgtgatcaacaaaaagagcggcgagatcgtgcccatggaggtgaacttcaacttcgacgaccccaacctgatcatcctgcctctggcctttggcaagagacagggcagagaattcatctggaacgacctgctgtccctggaaaccggcagcctgaagctggccaacggaagagtgatcgagaagacactgtacaacagaagaacccggcaggatgagcctgccctgttcgtggccctgaccttcgagcggcgggaggtcctggactcctccaatatcaaaccaatgaacctgatcggcgtggcaagaggcgaaaacatccccgccgtgatcgccctgaccgaccccgagggctgcccactgagccggtttaaggatagcctgggaaacccaacccacatcctgagaatcggcgagagctataaggagaagcagcggaccatccaggccaagaaggaggtggagcagcggagagccggcggctacagccggaagtacgccagcaaagccaagaatctggcagacgatatggtgagaaacaccgctagagatctgctgtactacgccgtgacccaggatgccatgctgatcttcgccaacctgagccggggcttcggccggcagggcaagcggaccttcatggccgagagacagtacacacggatggaggactggctgaccgccaagctggcctacgagggcctgagcaagacctacctgtccaagacactggcccagtacacctccaagacatgcagcaactgtgggtttaccatcaccagcgccgactacgacagggtgctggagaagctgaagaagacagcaacaggctggatgaccacaattaacggcaaggagctgaaggtggagggccagattacctactacaacagatacaagagacagaacgtagtcaaggacctgtccgtcgagctggatagactgagcgaagaatctgtgaacaacgacatctcctcctggacaaagggcagaagcggagaagctctgagcctcctgaagaaaagattctcccatagacccgtgcaggagaagttcgtgtgcctgaactgcggcttcgagacacacgcagccgagcaagccgccctgaacatcgccagatcctggctgttcctgcggagccaggagtacaagaaataccagacaaacaagacaaccggcaacaccgataagagagccttcgtcgagacctggcagtccttttaccggaagaagcttaaggaggtgtggaaacctgccgtgcggtctggcggatctggcggaggctccaccagccccaagaaaaagagaaaagtctaagctgccttctgcggggcttgccttctggccatgcccttcttctctcccttgcacctgtacctcttggtctttgaataaagcctgagtaggaaggctagcaaaaaaaaaaaaaaaaaaaaaaaaaaaaaaaaaaaaaaaaaaaaaaaaaaaaaaaaaaaaaaaaaaaaaaaaaaaaaaaagcccagccggctccccaacctctaccgaggagggcacctctgagtccgccacccccgagagcggccctggcacctccaccgagcccagcgagggcagcgcacccggcagccctgccggcagccccacctccacagaggagggaaccagcaccgagcccagcgaaggcagcgccccaggcaccagcaccgagcctagtgagcaggagattaaacggatcaacaagatcagaagaagacttgtgaaagacagcaacaccaagaaggccggcaagacaggccccatgaaaaccctgctggttagagtgatgacacccgatctgagagagcggctggaaaacctgagaaagaagcctgaaaatatcccccagcccatcagcaatacatctagagccaacctgaataagctgctgaccgattacaccgaaatgaagaaggcgatcctgcatgtgtactgggaagagttccagaaggaccctgtgggcctgatgagccgggtggcccagcctgccagcaagaagatcgatcagaacaagctgaaacctgagatggacgagaagggcaacctgaccaccgccggctttgcctgctctcagtgtggccagcccctgttcgtgtacaagctggagcaggtgtctgagaagggcaaggcttacaccaactacttcggacggtgcaatgtggccgagcacgaaaagctgatcctgctggcccagctgaagcccgagaaggatagcgacgaagccgtgacatatagcctgggaaagtttgggcagagggccctggatttctacagcattcatgtgaccaaggagtccacccaccccgtgaagcccctggcccagatcgccggaaacagatacgcctccggacctgtgggaaaggccctgagcgacgcatgtatgggcacaatcgcctccttcctgtctaagtaccaggacatcatcatcgaacaccagaaggtggtgaagggcaaccagaagagactggagagcctgcgggagctggccggcaaggaaaacctggaataccctagcgtgaccctgccacctcagcctcacaccaaggagggcgttgatgcctacaacgaagtgatcgcccgggtgcgaatgtgggtgaacctgaacctgtggcagaagctgaagctaagcagagatgatgccaagcctctgctgagactgaagggattcccttcctttcctctggtcgagagacaggccaacgaagtggactggtgggacatggtgtgtaacgtgaagaagctgatcaacgagaaaaaggaggatggcaaggtgttttggcagaatctggctggctacaagagacaggaagccctgagaccatacctgagcagcgaggaagatcggaagaagggaaagaaattcgctcggtaccagctgggcgacctgctgctgcacctggaaaagaagcacggcgaggactggggaaaggtgtacgacgaggcctgggagcggattgacaagaaagtggaaggcctgagcaagcacatcaagctggaagaggaacggagaagcgaggacgcccagagcaaggccgccctgaccgactggctgcgggctaaggccagcttcgtgatcgagggcctgaaggaggccgacaaggacgagttctgcagatgcgagctgaagctgcagaagtggtacggggacctgcggggaaagcccttcgccatcgaagccgagaacagcatcctggacatcagcggcttcagcaagcagtacaactgtgccttcatctggcagaaggacggcgtgaagaagctgaacctgtacctgatcatcaactacttcaagggcggcaagctgcggttcaagaagatcaaacctgaagccttcgaagccaacagattctacaccgtgatcaacaaaaagagcggcgagatcgtgcccatggaggtgaacttcaacttcgacgaccccaacctgatcatcctgcctctggcctttggcaagagacagggcagagaattcatctggaacgacctgctgtccctggaaaccggcagcctgaagctggccaacggaagagtgatcgagaagacactgtacaacagaagaacccggcaggatgagcctgccctgttcgtggccctgaccttcgagcggcgggaggtcctggactcctccaatatcaaaccaatgaacctgatcggcgtggcaagaggcgaaaacatccccgccgtgatcgccctgaccgaccccgagggctgcccactgagccggtttaaggatagcctgggaaacccaacccacatcctgagaatcggcgagagctataaggagaagcagcggaccatccaggccaagaaggaggtggagcagcggagagccggcggctacagccggaagtacgccagcaaagccaagaatctggcagacgatatggtgagaaacaccgctagagatctgctgtactacgccgtgacccaggatgccatgctgatcttcgccaacctgagccggggcttcggccggcagggcaagcggaccttcatggccgagagacagtacacacggatggaggactggctgaccgccaagctggcctacgagggcctgagcaagacctacctgtccaagacactggcccagtacacctccaagacatgcagcaactgtgggtttaccatcaccagcgccgactacgacagggtgctggagaagctgaagaagacagcaacaggctggatgaccacaattaacggcaaggagctgaaggtggagggccagattacctactacaacagatacaagagacagaacgtagtcaaggacctgtccgtcgagctggatagactgagcgaagaatctgtgaacaacgacatctcctcctggacaaagggcagaagcggagaagctctgagcctcctgaagaaaagattctcccatagacccgtgcaggagaagttcgtgtgcctgaactgcggcttcgagacacacgcagccgagcaagccgccctgaacatcgccagatcctggctgttcctgcggagccaggagtacaagaaataccagacaaacaagacaaccggcaacaccgataagagagccttcgtcgagacctggcagtccttttaccggaagaagcttaaggaggtgtggaaacctgccgtgcggtctggcggatctggcggaggctccaccagccccaagaaaaagagaaaagtctaagctgccttctgcggggcttgccttctggccatgcccttcttctctcccttgcacctgtacctcttggtctttgaataaagcctgagtaggaaggctagcaaaaaaaaaaaaaaaaaaaaaaaaaaaaaaaaaaaaaaaaaaaaaaaaaaaaaaaaaaaaaaaaaaaaaaaaaaaaaaaa

SEQ ID NO: 8940 - RNA, 8787 nt, synthetic construct
  source 1..8787: mol_type = other RNA
aggaaataagagagaaaagaagagtaagaagaaatataagagccaccatggcccctaagaagaagcgtaaagtgagccggatgaaccacgaccaggagttcgacccccctaaggtgtaccctcccgtccccgccgagaagagaaagcccatccgggtcctgagcctgttcgatggcatcgccaccggtctgctggtgctgaaggacctgggcatccaggtggataggtacattgcctccgaggtgtgcgaggactccatcaccgtgggaatggtgcgtcatcagggcaagatcatgtacgtgggcgacgtgcggagcgtgacacagaagcatatccaggagtggggccctttcgacctggtgatcggcggcagcccttgcaatgacctgagcatcgtgaacccagcccggaagggcctgtacgagggaaccggcagactgttcttcgagttttacagactgctgcacgacgcccggcctaaggaaggcgacgaccggcccttcttttggctgttcgagaatgtggtggccatgggagtcagcgacaagcgggatattagccggttcctggagagcaaccccgtgatgatcgatgccaaggaagtgagcgccgcccaccgggccagatacttctggggcaatctgcctggcatgaacagacccctggccagcaccgtgaacgacaagctggagctgcaggagtgcctggagcacggccggatcgccaagttcagcaaggtgagaaccatcaccacccgaagcaacagcatcaaacaaggcaaggaccagcactttcctgtgttcatgaacgagaaggaggacatcctgtggtgtaccgagatggagagagtgttcgggttcccagtccactacacagatgtcagcaacatgtctagactggccagacagagactgctgggaagaagctggtccgtccctgtgatcagacacctgttcgcccctctgaaggagtacttcgcctgcgtgagcagcggcaacagcaacgccaacagccggggccccagcttctctagcggcctggtgccactgtccctgagagggagccacatgggccccatggagatctacaaaaccgtgagcgcctggaagcggcagcctgtgcgcgtgctgagcctgtttcggaatatcgataaagtcctgaaaagcctgggattcctggagagcggctctggctccggcggtggcaccctgaagtacgtggaggatgtgacaaacgtggtcagacgggatgtggagaagtggggccccttcgatctggtgtacggcagcacccaacccctgggcagctcttgtgaccggtgccctggctggtacatgtttcagttccaccggatcctgcagtacgccctgccgagacaggagtcccagcggccattcttttggattttcatggacaacttgctgctgaccgaggatgaccaggaaactaccactcggttcctgcagaccgaagccgtgaccctgcaggacgtgagaggccgggactaccagaacgccatgcgggtgtggtccaacatccctggactgaaaagcaagcacgcacctctgacccctaaagaagaggagtacctgcaggcccaggtgcggagcagaagcaagctggacgcccctaaggtggatctgctggtgaagaattgcctcctgcccctgagagagtacttcaagtatttcagccagaatagtctgcccctgggaggcagcggcggcggcagcaaggcccccgtgaccttcggcgacctggccatctacttcagccaggaggagtgggagtggctgagccccatccagaaggacctgtacgaggacgtgatgctggagaactacaggaacctggtgagcctgggcctgagcttcaggaggcccaacgtgatcaccctgctggagaagggcaaggccccctggatggtggagcccgtgaggaggaggagggcccccgacagcggcagcaagtgcggcggcccaagcagcggcgcccctcctcccagcggcggcaggcggcccaagcagcggcgcccctcctcccagcggcggcagcccagccggctccccaacctctaccgaggagggcacctctgagtccgccacccccgagagcggccctggcacctccaccgagcccagcgagggcagcgcacccggcagccctgccggcagccccacctccacagaggagggaaccagcaccgagcccagcgaaggcagcgccccaggcaccagcaccgagcctagtgagcaggagattaaacggatcaacaagatcagaagaagacttgtgaaagacagcaacaccaagaaggccggcaagacaggccccatgaaaaccctgctggttagagtgatgacacccgatctgagagagcggctggaaaacctgagaaagaagcctgaaaatatcccccagcccatcagcaatacatctagagccaacctgaataagctgctgaccgattacaccgaaatgaagaaggcgatcctgcatgtgtactgggaagagttccagaaggaccctgtgggcctgatgagccgggtggcccagcctgccagcaagaagatcgatcagaacaagctgaaacctgagatggacgagaagggcaacctgaccaccgccggctttgcctgctctcagtgtggccagcccctgttcgtgtacaagctggagcaggtgtctgagaagggcaaggcttacaccaactacttcggacggtgcaatgtggccgagcacgaaaagctgatcctgctggcccagctgaagcccgagaaggatagcgacgaagccgtgacatatagcctgggaaagtttgggcagagggccctggatttctacagcattcatgtgaccaaggagtccacccaccccgtgaagcccctggcccagatcgccggaaacagatacgcctccggacctgtgggaaaggccctgagcgacgcatgtatgggcacaatcgcctccttcctgtctaagtaccaggacatcatcatcgaacaccagaaggtggtgaagggcaaccagaagagactggagagcctgcgggagctggccggcaaggaaaacctggaataccctagcgtgaccctgccacctcagcctcacaccaaggagggcgttgatgcctacaacgaagtgatcgcccgggtgcgaatgtgggtgaacctgaacctgtggcagaagctgaagctaagcagagatgatgccaagcctctgctgagactgaagggattcccttcctttcctctggtcgagagacaggccaacgaagtggactggtgggacatggtgtgtaacgtgaagaagctgatcaacgagaaaaaggaggatggcaaggtgttttggcagaatctggctggctacaagagacaggaagccctgagaccatacctgagcagcgaggaagatcggaagaagggaaagaaattcgctcggtaccagctgggcgacctgctgctgcacctggaaaagaagcacggcgaggactggggaaaggtgtacgacgaggcctgggagcggattgacaagaaagtggaaggcctgagcaagcacatcaagctggaagaggaacggagaagcgaggacgcccagagcaaggccgccctgaccgactggctgcgggctaaggccagcttcgtgatcgagggcctgaaggaggccgacaaggacgagttctgcagatgcgagctgaagctgcagaagtggtacggggacctgcggggaaagcccttcgccatcgaagccgagaacagcatcctggacatcagcggcttcagcaagcagtacaactgtgccttcatctggcagaaggacggcgtgaagaagctgaacctgtacctgatcatcaactacttcaagggcggcaagctgcggttcaagaagatcaaacctgaagccttcgaagccaacagattctacaccgtgatcaacaaaaagagcggcgagatcgtgcccatggaggtgaacttcaacttcgacgaccccaacctgatcatcctgcctctggcctttggcaagagacagggcagagaattcatctggaacgacctgctgtccctggaaaccggcagcctgaagctggccaacggaagagtgatcgagaagacactgtacaacagaagaacccggcaggatgagcctgccctgttcgtggccctgaccttcgagcggcgggaggtcctggactcctccaatatcaaaccaatgaacctgatcggcgtggcaagaggcgaaaacatccccgccgtgatcgccctgaccgaccccgagggctgcccactgagccggtttaaggatagcctgggaaacccaacccacatcctgagaatcggcgagagctataaggagaagcagcggaccatccaggccaagaaggaggtggagcagcggagagccggcggctacagccggaagtacgccagcaaagccaagaatctggcagacgatatggtgagaaacaccgctagagatctgctgtactacgccgtgacccaggatgccatgctgatcttcgccaacctgagccggggcttcggccggcagggcaagcggaccttcatggccgagagacagtacacacggatggaggactggctgaccgccaagctggcctacgagggcctgagcaagacctacctgtccaagacactggcccagtacacctccaagacatgcagcaactgtgggtttaccatcaccagcgccgactacgacagggtgctggagaagctgaagaagacagcaacaggctggatgaccacaattaacggcaaggagctgaaggtggagggccagattacctactacaacagatacaagagacagaacgtagtcaaggacctgtccgtcgagctggatagactgagcgaagaatctgtgaacaacgacatctcctcctggacaaagggcagaagcggagaagctctgagcctcctgaagaaaagattctcccatagacccgtgcaggagaagttcgtgtgcctgaactgcggcttcgagacacacgcagccgagcaagccgccctgaacatcgccagatcctggctgttcctgcggagccaggagtacaagaaataccagacaaacaagacaaccggcaacaccgataagagagccttcgtcgagacctggcagtccttttaccggaagaagcttaaggaggtgtggaaacctgccgtgcggtctggcggatctggcggaggctccaccagccccaagaaaaagagaaaagtctaagctgccttctgcggggcttgccttctggccatgcccttcttctctcccttgcacctgtacctcttggtctttgaataaagcctgagtaggaaggctagcaaaaaaaaaaaaaaaaaaaaaaaaaaaaaaaaaaaaaaaaaaaaaaaaaaaaaaaaaaaaaaaaaaaaaaaaaaaaaaaagcccagccggctccccaacctctaccgaggagggcacctctgagtccgccacccccgagagcggccctggcacctccaccgagcccagcgagggcagcgcacccggcagccctgccggcagccccacctccacagaggagggaaccagcaccgagcccagcgaaggcagcgccccaggcaccagcaccgagcctagtgagcaggagattaaacggatcaacaagatcagaagaagacttgtgaaagacagcaacaccaagaaggccggcaagacaggccccatgaaaaccctgctggttagagtgatgacacccgatctgagagagcggctggaaaacctgagaaagaagcctgaaaatatcccccagcccatcagcaatacatctagagccaacctgaataagctgctgaccgattacaccgaaatgaagaaggcgatcctgcatgtgtactgggaagagttccagaaggaccctgtgggcctgatgagccgggtggcccagcctgccagcaagaagatcgatcagaacaagctgaaacctgagatggacgagaagggcaacctgaccaccgccggctttgcctgctctcagtgtggccagcccctgttcgtgtacaagctggagcaggtgtctgagaagggcaaggcttacaccaactacttcggacggtgcaatgtggccgagcacgaaaagctgatcctgctggcccagctgaagcccgagaaggatagcgacgaagccgtgacatatagcctgggaaagtttgggcagagggccctggatttctacagcattcatgtgaccaaggagtccacccaccccgtgaagcccctggcccagatcgccggaaacagatacgcctccggacctgtgggaaaggccctgagcgacgcatgtatgggcacaatcgcctccttcctgtctaagtaccaggacatcatcatcgaacaccagaaggtggtgaagggcaaccagaagagactggagagcctgcgggagctggccggcaaggaaaacctggaataccctagcgtgaccctgccacctcagcctcacaccaaggagggcgttgatgcctacaacgaagtgatcgcccgggtgcgaatgtgggtgaacctgaacctgtggcagaagctgaagctaagcagagatgatgccaagcctctgctgagactgaagggattcccttcctttcctctggtcgagagacaggccaacgaagtggactggtgggacatggtgtgtaacgtgaagaagctgatcaacgagaaaaaggaggatggcaaggtgttttggcagaatctggctggctacaagagacaggaagccctgagaccatacctgagcagcgaggaagatcggaagaagggaaagaaattcgctcggtaccagctgggcgacctgctgctgcacctggaaaagaagcacggcgaggactggggaaaggtgtacgacgaggcctgggagcggattgacaagaaagtggaaggcctgagcaagcacatcaagctggaagaggaacggagaagcgaggacgcccagagcaaggccgccctgaccgactggctgcgggctaaggccagcttcgtgatcgagggcctgaaggaggccgacaaggacgagttctgcagatgcgagctgaagctgcagaagtggtacggggacctgcggggaaagcccttcgccatcgaagccgagaacagcatcctggacatcagcggcttcagcaagcagtacaactgtgccttcatctggcagaaggacggcgtgaagaagctgaacctgtacctgatcatcaactacttcaagggcggcaagctgcggttcaagaagatcaaacctgaagccttcgaagccaacagattctacaccgtgatcaacaaaaagagcggcgagatcgtgcccatggaggtgaacttcaacttcgacgaccccaacctgatcatcctgcctctggcctttggcaagagacagggcagagaattcatctggaacgacctgctgtccctggaaaccggcagcctgaagctggccaacggaagagtgatcgagaagacactgtacaacagaagaacccggcaggatgagcctgccctgttcgtggccctgaccttcgagcggcgggaggtcctggactcctccaatatcaaaccaatgaacctgatcggcgtggcaagaggcgaaaacatccccgccgtgatcgccctgaccgaccccgagggctgcccactgagccggtttaaggatagcctgggaaacccaacccacatcctgagaatcggcgagagctataaggagaagcagcggaccatccaggccaagaaggaggtggagcagcggagagccggcggctacagccggaagtacgccagcaaagccaagaatctggcagacgatatggtgagaaacaccgctagagatctgctgtactacgccgtgacccaggatgccatgctgatcttcgccaacctgagccggggcttcggccggcagggcaagcggaccttcatggccgagagacagtacacacggatggaggactggctgaccgccaagctggcctacgagggcctgagcaagacctacctgtccaagacactggcccagtacacctccaagacatgcagcaactgtgggtttaccatcaccagcgccgactacgacagggtgctggagaagctgaagaagacagcaacaggctggatgaccacaattaacggcaaggagctgaaggtggagggccagattacctactacaacagatacaagagacagaacgtagtcaaggacctgtccgtcgagctggatagactgagcgaagaatctgtgaacaacgacatctcctcctggacaaagggcagaagcggagaagctctgagcctcctgaagaaaagattctcccatagacccgtgcaggagaagttcgtgtgcctgaactgcggcttcgagacacacgcagccgagcaagccgccctgaacatcgccagatcctggctgttcctgcggagccaggagtacaagaaataccagacaaacaagacaaccggcaacaccgataagagagccttcgtcgagacctggcagtccttttaccggaagaagcttaaggaggtgtggaaacctgccgtgcggtctggcggatctggcggaggctccaccagccccaagaaaaagagaaaagtctaagctgccttctgcggggcttgccttctggccatgcccttcttctctcccttgcacctgtacctcttggtctttgaataaagcctgagtaggaaggctagcaaaaaaaaaaaaaaaaaaaaaaaaaaaaaaaaaaaaaaaaaaaaaaaaaaaaaaaaaaaaaaaaaaaaaaaaaaaaaaaa

SEQ ID NO: 8941 - RNA, 8787 nt, synthetic construct
  source 1..8787: mol_type = other RNA
aggaaataagagagaaaagaagagtaagaagaaatataagagccaccatggcccctaagaagaagcgtaaagtgagccggatgaaccacgaccaggagttcgacccccctaaggtgtaccctcccgtccccgccgagaagagaaagcccatccgggtcctgagcctgttcgatggcatcgccaccggtctgctggtgctgaaggacctgggcatccaggtggataggtacattgcctccgaggtgtgcgaggactccatcaccgtgggaatggtgcgtcatcagggcaagatcatgtacgtgggcgacgtgcggagcgtgacacagaagcatatccaggagtggggccctttcgacctggtgatcggcggcagcccttgcaatgacctgagcatcgtgaacccagcccggaagggcctgtacgagggaaccggcagactgttcttcgagttttacagactgctgcacgacgcccggcctaaggaaggcgacgaccggcccttcttttggctgttcgagaatgtggtggccatgggagtcagcgacaagcgggatattagccggttcctggagagcaaccccgtgatgatcgatgccaaggaagtgagcgccgcccaccgggccagatacttctggggcaatctgcctggcatgaacagacccctggccagcaccgtgaacgacaagctggagctgcaggagtgcctggagcacggccggatcgccaagttcagcaaggtgagaaccatcaccacccgaagcaacagcatcaaacaaggcaaggaccagcactttcctgtgttcatgaacgagaaggaggacatcctgtggtgtaccgagatggagagagtgttcgggttcccagtccactacacagatgtcagcaacatgtctagactggccagacagagactgctgggaagaagctggtccgtccctgtgatcagacacctgttcgcccctctgaaggagtacttcgcctgcgtgagcagcggcaacagcaacgccaacagccggggccccagcttctctagcggcctggtgccactgtccctgagagggagccacatgggccccatggagatctacaaaaccgtgagcgcctggaagcggcagcctgtgcgcgtgctgagcctgtttcggaatatcgataaagtcctgaaaagcctgggattcctggagagcggctctggctccggcggtggcaccctgaagtacgtggaggatgtgacaaacgtggtcagacgggatgtggagaagtggggccccttcgatctggtgtacggcagcacccaacccctgggcagctcttgtgaccggtgccctggctggtacatgtttcagttccaccggatcctgcagtacgccctgccgagacaggagtcccagcggccattcttttggattttcatggacaacttgctgctgaccgaggatgaccaggaaactaccactcggttcctgcagaccgaagccgtgaccctgcaggacgtgagaggccgggactaccagaacgccatgcgggtgtggtccaacatccctggactgaaaagcaagcacgcacctctgacccctaaagaagaggagtacctgcaggcccaggtgcggagcagaagcaagctggacgcccctaaggtggatctgctggtgaagaattgcctcctgcccctgagagagtacttcaagtatttcagccagaatagtctgcccctgggaggcagcggcggcggcatggtgagcttcgaggacgtggccgtgctgctgagccaggaggagtgggactgcctgatccccgcccagaggggcctgtacagggacgtgatgctggagacctacggcaacctggtgagcctgggcctgcaggccagcaagcccgacgtgatcagcaggctggagcagggcgacgagccctggaccacccacaccctgaggacccagggcagctggagctggaggcacaagagggagggctacggcggcccaagcagcggcgcccctcctcccagcggcggcaggcggcccaagcagcggcgcccctcctcccagcggcggcagcccagccggctccccaacctctaccgaggagggcacctctgagtccgccacccccgagagcggccctggcacctccaccgagcccagcgagggcagcgcacccggcagccctgccggcagccccacctccacagaggagggaaccagcaccgagcccagcgaaggcagcgccccaggcaccagcaccgagcctagtgagcaggagattaaacggatcaacaagatcagaagaagacttgtgaaagacagcaacaccaagaaggccggcaagacaggccccatgaaaaccctgctggttagagtgatgacacccgatctgagagagcggctggaaaacctgagaaagaagcctgaaaatatcccccagcccatcagcaatacatctagagccaacctgaataagctgctgaccgattacaccgaaatgaagaaggcgatcctgcatgtgtactgggaagagttccagaaggaccctgtgggcctgatgagccgggtggcccagcctgccagcaagaagatcgatcagaacaagctgaaacctgagatggacgagaagggcaacctgaccaccgccggctttgcctgctctcagtgtggccagcccctgttcgtgtacaagctggagcaggtgtctgagaagggcaaggcttacaccaactacttcggacggtgcaatgtggccgagcacgaaaagctgatcctgctggcccagctgaagcccgagaaggatagcgacgaagccgtgacatatagcctgggaaagtttgggcagagggccctggatttctacagcattcatgtgaccaaggagtccacccaccccgtgaagcccctggcccagatcgccggaaacagatacgcctccggacctgtgggaaaggccctgagcgacgcatgtatgggcacaatcgcctccttcctgtctaagtaccaggacatcatcatcgaacaccagaaggtggtgaagggcaaccagaagagactggagagcctgcgggagctggccggcaaggaaaacctggaataccctagcgtgaccctgccacctcagcctcacaccaaggagggcgttgatgcctacaacgaagtgatcgcccgggtgcgaatgtgggtgaacctgaacctgtggcagaagctgaagctaagcagagatgatgccaagcctctgctgagactgaagggattcccttcctttcctctggtcgagagacaggccaacgaagtggactggtgggacatggtgtgtaacgtgaagaagctgatcaacgagaaaaaggaggatggcaaggtgttttggcagaatctggctggctacaagagacaggaagccctgagaccatacctgagcagcgaggaagatcggaagaagggaaagaaattcgctcggtaccagctgggcgacctgctgctgcacctggaaaagaagcacggcgaggactggggaaaggtgtacgacgaggcctgggagcggattgacaagaaagtggaaggcctgagcaagcacatcaagctggaagaggaacggagaagcgaggacgcccagagcaaggccgccctgaccgactggctgcgggctaaggccagcttcgtgatcgagggcctgaaggaggccgacaaggacgagttctgcagatgcgagctgaagctgcagaagtggtacggggacctgcggggaaagcccttcgccatcgaagccgagaacagcatcctggacatcagcggcttcagcaagcagtacaactgtgccttcatctggcagaaggacggcgtgaagaagctgaacctgtacctgatcatcaactacttcaagggcggcaagctgcggttcaagaagatcaaacctgaagccttcgaagccaacagattctacaccgtgatcaacaaaaagagcggcgagatcgtgcccatggaggtgaacttcaacttcgacgaccccaacctgatcatcctgcctctggcctttggcaagagacagggcagagaattcatctggaacgacctgctgtccctggaaaccggcagcctgaagctggccaacggaagagtgatcgagaagacactgtacaacagaagaacccggcaggatgagcctgccctgttcgtggccctgaccttcgagcggcgggaggtcctggactcctccaatatcaaaccaatgaacctgatcggcgtggcaagaggcgaaaacatccccgccgtgatcgccctgaccgaccccgagggctgcccactgagccggtttaaggatagcctgggaaacccaacccacatcctgagaatcggcgagagctataaggagaagcagcggaccatccaggccaagaaggaggtggagcagcggagagccggcggctacagccggaagtacgccagcaaagccaagaatctggcagacgatatggtgagaaacaccgctagagatctgctgtactacgccgtgacccaggatgccatgctgatcttcgccaacctgagccggggcttcggccggcagggcaagcggaccttcatggccgagagacagtacacacggatggaggactggctgaccgccaagctggcctacgagggcctgagcaagacctacctgtccaagacactggcccagtacacctccaagacatgcagcaactgtgggtttaccatcaccagcgccgactacgacagggtgctggagaagctgaagaagacagcaacaggctggatgaccacaattaacggcaaggagctgaaggtggagggccagattacctactacaacagatacaagagacagaacgtagtcaaggacctgtccgtcgagctggatagactgagcgaagaatctgtgaacaacgacatctcctcctggacaaagggcagaagcggagaagctctgagcctcctgaagaaaagattctcccatagacccgtgcaggagaagttcgtgtgcctgaactgcggcttcgagacacacgcagccgagcaagccgccctgaacatcgccagatcctggctgttcctgcggagccaggagtacaagaaataccagacaaacaagacaaccggcaacaccgataagagagccttcgtcgagacctggcagtccttttaccggaagaagcttaaggaggtgtggaaacctgccgtgcggtctggcggatctggcggaggctccaccagccccaagaaaaagagaaaagtctaagctgccttctgcggggcttgccttctggccatgcccttcttctctcccttgcacctgtacctcttggtctttgaataaagcctgagtaggaaggctagcaaaaaaaaaaaaaaaaaaaaaaaaaaaaaaaaaaaaaaaaaaaaaaaaaaaaaaaaaaaaaaaaaaaaaaaaaaaaaaaagcccagccggctccccaacctctaccgaggagggcacctctgagtccgccacccccgagagcggccctggcacctccaccgagcccagcgagggcagcgcacccggcagccctgccggcagccccacctccacagaggagggaaccagcaccgagcccagcgaaggcagcgccccaggcaccagcaccgagcctagtgagcaggagattaaacggatcaacaagatcagaagaagacttgtgaaagacagcaacaccaagaaggccggcaagacaggccccatgaaaaccctgctggttagagtgatgacacccgatctgagagagcggctggaaaacctgagaaagaagcctgaaaatatcccccagcccatcagcaatacatctagagccaacctgaataagctgctgaccgattacaccgaaatgaagaaggcgatcctgcatgtgtactgggaagagttccagaaggaccctgtgggcctgatgagccgggtggcccagcctgccagcaagaagatcgatcagaacaagctgaaacctgagatggacgagaagggcaacctgaccaccgccggctttgcctgctctcagtgtggccagcccctgttcgtgtacaagctggagcaggtgtctgagaagggcaaggcttacaccaactacttcggacggtgcaatgtggccgagcacgaaaagctgatcctgctggcccagctgaagcccgagaaggatagcgacgaagccgtgacatatagcctgggaaagtttgggcagagggccctggatttctacagcattcatgtgaccaaggagtccacccaccccgtgaagcccctggcccagatcgccggaaacagatacgcctccggacctgtgggaaaggccctgagcgacgcatgtatgggcacaatcgcctccttcctgtctaagtaccaggacatcatcatcgaacaccagaaggtggtgaagggcaaccagaagagactggagagcctgcgggagctggccggcaaggaaaacctggaataccctagcgtgaccctgccacctcagcctcacaccaaggagggcgttgatgcctacaacgaagtgatcgcccgggtgcgaatgtgggtgaacctgaacctgtggcagaagctgaagctaagcagagatgatgccaagcctctgctgagactgaagggattcccttcctttcctctggtcgagagacaggccaacgaagtggactggtgggacatggtgtgtaacgtgaagaagctgatcaacgagaaaaaggaggatggcaaggtgttttggcagaatctggctggctacaagagacaggaagccctgagaccatacctgagcagcgaggaagatcggaagaagggaaagaaattcgctcggtaccagctgggcgacctgctgctgcacctggaaaagaagcacggcgaggactggggaaaggtgtacgacgaggcctgggagcggattgacaagaaagtggaaggcctgagcaagcacatcaagctggaagaggaacggagaagcgaggacgcccagagcaaggccgccctgaccgactggctgcgggctaaggccagcttcgtgatcgagggcctgaaggaggccgacaaggacgagttctgcagatgcgagctgaagctgcagaagtggtacggggacctgcggggaaagcccttcgccatcgaagccgagaacagcatcctggacatcagcggcttcagcaagcagtacaactgtgccttcatctggcagaaggacggcgtgaagaagctgaacctgtacctgatcatcaactacttcaagggcggcaagctgcggttcaagaagatcaaacctgaagccttcgaagccaacagattctacaccgtgatcaacaaaaagagcggcgagatcgtgcccatggaggtgaacttcaacttcgacgaccccaacctgatcatcctgcctctggcctttggcaagagacagggcagagaattcatctggaacgacctgctgtccctggaaaccggcagcctgaagctggccaacggaagagtgatcgagaagacactgtacaacagaagaacccggcaggatgagcctgccctgttcgtggccctgaccttcgagcggcgggaggtcctggactcctccaatatcaaaccaatgaacctgatcggcgtggcaagaggcgaaaacatccccgccgtgatcgccctgaccgaccccgagggctgcccactgagccggtttaaggatagcctgggaaacccaacccacatcctgagaatcggcgagagctataaggagaagcagcggaccatccaggccaagaaggaggtggagcagcggagagccggcggctacagccggaagtacgccagcaaagccaagaatctggcagacgatatggtgagaaacaccgctagagatctgctgtactacgccgtgacccaggatgccatgctgatcttcgccaacctgagccggggcttcggccggcagggcaagcggaccttcatggccgagagacagtacacacggatggaggactggctgaccgccaagctggcctacgagggcctgagcaagacctacctgtccaagacactggcccagtacacctccaagacatgcagcaactgtgggtttaccatcaccagcgccgactacgacagggtgctggagaagctgaagaagacagcaacaggctggatgaccacaattaacggcaaggagctgaaggtggagggccagattacctactacaacagatacaagagacagaacgtagtcaaggacctgtccgtcgagctggatagactgagcgaagaatctgtgaacaacgacatctcctcctggacaaagggcagaagcggagaagctctgagcctcctgaagaaaagattctcccatagacccgtgcaggagaagttcgtgtgcctgaactgcggcttcgagacacacgcagccgagcaagccgccctgaacatcgccagatcctggctgttcctgcggagccaggagtacaagaaataccagacaaacaagacaaccggcaacaccgataagagagccttcgtcgagacctggcagtccttttaccggaagaagcttaaggaggtgtggaaacctgccgtgcggtctggcggatctggcggaggctccaccagccccaagaaaaagagaaaagtctaagctgccttctgcggggcttgccttctggccatgcccttcttctctcccttgcacctgtacctcttggtctttgaataaagcctgagtaggaaggctagcaaaaaaaaaaaaaaaaaaaaaaaaaaaaaaaaaaaaaaaaaaaaaaaaaaaaaaaaaaaaaaaaaaaaaaaaaaaaaaaa

SEQ ID NO: 8942 - RNA, 8787 nt, synthetic construct
  source 1..8787: mol_type = other RNA
aggaaataagagagaaaagaagagtaagaagaaatataagagccaccatggcccctaagaagaagcgtaaagtgagccggatgaaccacgaccaggagttcgacccccctaaggtgtaccctcccgtccccgccgagaagagaaagcccatccgggtcctgagcctgttcgatggcatcgccaccggtctgctggtgctgaaggacctgggcatccaggtggataggtacattgcctccgaggtgtgcgaggactccatcaccgtgggaatggtgcgtcatcagggcaagatcatgtacgtgggcgacgtgcggagcgtgacacagaagcatatccaggagtggggccctttcgacctggtgatcggcggcagcccttgcaatgacctgagcatcgtgaacccagcccggaagggcctgtacgagggaaccggcagactgttcttcgagttttacagactgctgcacgacgcccggcctaaggaaggcgacgaccggcccttcttttggctgttcgagaatgtggtggccatgggagtcagcgacaagcgggatattagccggttcctggagagcaaccccgtgatgatcgatgccaaggaagtgagcgccgcccaccgggccagatacttctggggcaatctgcctggcatgaacagacccctggccagcaccgtgaacgacaagctggagctgcaggagtgcctggagcacggccggatcgccaagttcagcaaggtgagaaccatcaccacccgaagcaacagcatcaaacaaggcaaggaccagcactttcctgtgttcatgaacgagaaggaggacatcctgtggtgtaccgagatggagagagtgttcgggttcccagtccactacacagatgtcagcaacatgtctagactggccagacagagactgctgggaagaagctggtccgtccctgtgatcagacacctgttcgcccctctgaaggagtacttcgcctgcgtgagcagcggcaacagcaacgccaacagccggggccccagcttctctagcggcctggtgccactgtccctgagagggagccacatgggccccatggagatctacaaaaccgtgagcgcctggaagcggcagcctgtgcgcgtgctgagcctgtttcggaatatcgataaagtcctgaaaagcctgggattcctggagagcggctctggctccggcggtggcaccctgaagtacgtggaggatgtgacaaacgtggtcagacgggatgtggagaagtggggccccttcgatctggtgtacggcagcacccaacccctgggcagctcttgtgaccggtgccctggctggtacatgtttcagttccaccggatcctgcagtacgccctgccgagacaggagtcccagcggccattcttttggattttcatggacaacttgctgctgaccgaggatgaccaggaaactaccactcggttcctgcagaccgaagccgtgaccctgcaggacgtgagaggccgggactaccagaacgccatgcgggtgtggtccaacatccctggactgaaaagcaagcacgcacctctgacccctaaagaagaggagtacctgcaggcccaggtgcggagcagaagcaagctggacgcccctaaggtggatctgctggtgaagaattgcctcctgcccctgagagagtacttcaagtatttcagccagaatagtctgcccctgggaggcagcggcggcggcaagcccggcgccgtgagcttcgccgacgtggccgtgtacttcagccccgaggagtggggctgcctgaggcccgcccagagggccctgtacagggacgtgatgagggagacctacggccacctgggcgccctgggcctgcccggccccaagcccgccctgatcagctggatggagggcgagagcgaggcctggaaccccgccgcccaggaccccgaggagggcgagaacctgggcggcgccctgggcggcccaagcagcggcgcccctcctcccagcggcggcaggcggcccaagcagcggcgcccctcctcccagcggcggcagcccagccggctccccaacctctaccgaggagggcacctctgagtccgccacccccgagagcggccctggcacctccaccgagcccagcgagggcagcgcacccggcagccctgccggcagccccacctccacagaggagggaaccagcaccgagcccagcgaaggcagcgccccaggcaccagcaccgagcctagtgagcaggagattaaacggatcaacaagatcagaagaagacttgtgaaagacagcaacaccaagaaggccggcaagacaggccccatgaaaaccctgctggttagagtgatgacacccgatctgagagagcggctggaaaacctgagaaagaagcctgaaaatatcccccagcccatcagcaatacatctagagccaacctgaataagctgctgaccgattacaccgaaatgaagaaggcgatcctgcatgtgtactgggaagagttccagaaggaccctgtgggcctgatgagccgggtggcccagcctgccagcaagaagatcgatcagaacaagctgaaacctgagatggacgagaagggcaacctgaccaccgccggctttgcctgctctcagtgtggccagcccctgttcgtgtacaagctggagcaggtgtctgagaagggcaaggcttacaccaactacttcggacggtgcaatgtggccgagcacgaaaagctgatcctgctggcccagctgaagcccgagaaggatagcgacgaagccgtgacatatagcctgggaaagtttgggcagagggccctggatttctacagcattcatgtgaccaaggagtccacccaccccgtgaagcccctggcccagatcgccggaaacagatacgcctccggacctgtgggaaaggccctgagcgacgcatgtatgggcacaatcgcctccttcctgtctaagtaccaggacatcatcatcgaacaccagaaggtggtgaagggcaaccagaagagactggagagcctgcgggagctggccggcaaggaaaacctggaataccctagcgtgaccctgccacctcagcctcacaccaaggagggcgttgatgcctacaacgaagtgatcgcccgggtgcgaatgtgggtgaacctgaacctgtggcagaagctgaagctaagcagagatgatgccaagcctctgctgagactgaagggattcccttcctttcctctggtcgagagacaggccaacgaagtggactggtgggacatggtgtgtaacgtgaagaagctgatcaacgagaaaaaggaggatggcaaggtgttttggcagaatctggctggctacaagagacaggaagccctgagaccatacctgagcagcgaggaagatcggaagaagggaaagaaattcgctcggtaccagctgggcgacctgctgctgcacctggaaaagaagcacggcgaggactggggaaaggtgtacgacgaggcctgggagcggattgacaagaaagtggaaggcctgagcaagcacatcaagctggaagaggaacggagaagcgaggacgcccagagcaaggccgccctgaccgactggctgcgggctaaggccagcttcgtgatcgagggcctgaaggaggccgacaaggacgagttctgcagatgcgagctgaagctgcagaagtggtacggggacctgcggggaaagcccttcgccatcgaagccgagaacagcatcctggacatcagcggcttcagcaagcagtacaactgtgccttcatctggcagaaggacggcgtgaagaagctgaacctgtacctgatcatcaactacttcaagggcggcaagctgcggttcaagaagatcaaacctgaagccttcgaagccaacagattctacaccgtgatcaacaaaaagagcggcgagatcgtgcccatggaggtgaacttcaacttcgacgaccccaacctgatcatcctgcctctggcctttggcaagagacagggcagagaattcatctggaacgacctgctgtccctggaaaccggcagcctgaagctggccaacggaagagtgatcgagaagacactgtacaacagaagaacccggcaggatgagcctgccctgttcgtggccctgaccttcgagcggcgggaggtcctggactcctccaatatcaaaccaatgaacctgatcggcgtggcaagaggcgaaaacatccccgccgtgatcgccctgaccgaccccgagggctgcccactgagccggtttaaggatagcctgggaaacccaacccacatcctgagaatcggcgagagctataaggagaagcagcggaccatccaggccaagaaggaggtggagcagcggagagccggcggctacagccggaagtacgccagcaaagccaagaatctggcagacgatatggtgagaaacaccgctagagatctgctgtactacgccgtgacccaggatgccatgctgatcttcgccaacctgagccggggcttcggccggcagggcaagcggaccttcatggccgagagacagtacacacggatggaggactggctgaccgccaagctggcctacgagggcctgagcaagacctacctgtccaagacactggcccagtacacctccaagacatgcagcaactgtgggtttaccatcaccagcgccgactacgacagggtgctggagaagctgaagaagacagcaacaggctggatgaccacaattaacggcaaggagctgaaggtggagggccagattacctactacaacagatacaagagacagaacgtagtcaaggacctgtccgtcgagctggatagactgagcgaagaatctgtgaacaacgacatctcctcctggacaaagggcagaagcggagaagctctgagcctcctgaagaaaagattctcccatagacccgtgcaggagaagttcgtgtgcctgaactgcggcttcgagacacacgcagccgagcaagccgccctgaacatcgccagatcctggctgttcctgcggagccaggagtacaagaaataccagacaaacaagacaaccggcaacaccgataagagagccttcgtcgagacctggcagtccttttaccggaagaagcttaaggaggtgtggaaacctgccgtgcggtctggcggatctggcggaggctccaccagccccaagaaaaagagaaaagtctaagctgccttctgcggggcttgccttctggccatgcccttcttctctcccttgcacctgtacctcttggtctttgaataaagcctgagtaggaaggctagcaaaaaaaaaaaaaaaaaaaaaaaaaaaaaaaaaaaaaaaaaaaaaaaaaaaaaaaaaaaaaaaaaaaaaaaaaaaaaaaagcccagccggctccccaacctctaccgaggagggcacctctgagtccgccacccccgagagcggccctggcacctccaccgagcccagcgagggcagcgcacccggcagccctgccggcagccccacctccacagaggagggaaccagcaccgagcccagcgaaggcagcgccccaggcaccagcaccgagcctagtgagcaggagattaaacggatcaacaagatcagaagaagacttgtgaaagacagcaacaccaagaaggccggcaagacaggccccatgaaaaccctgctggttagagtgatgacacccgatctgagagagcggctggaaaacctgagaaagaagcctgaaaatatcccccagcccatcagcaatacatctagagccaacctgaataagctgctgaccgattacaccgaaatgaagaaggcgatcctgcatgtgtactgggaagagttccagaaggaccctgtgggcctgatgagccgggtggcccagcctgccagcaagaagatcgatcagaacaagctgaaacctgagatggacgagaagggcaacctgaccaccgccggctttgcctgctctcagtgtggccagcccctgttcgtgtacaagctggagcaggtgtctgagaagggcaaggcttacaccaactacttcggacggtgcaatgtggccgagcacgaaaagctgatcctgctggcccagctgaagcccgagaaggatagcgacgaagccgtgacatatagcctgggaaagtttgggcagagggccctggatttctacagcattcatgtgaccaaggagtccacccaccccgtgaagcccctggcccagatcgccggaaacagatacgcctccggacctgtgggaaaggccctgagcgacgcatgtatgggcacaatcgcctccttcctgtctaagtaccaggacatcatcatcgaacaccagaaggtggtgaagggcaaccagaagagactggagagcctgcgggagctggccggcaaggaaaacctggaataccctagcgtgaccctgccacctcagcctcacaccaaggagggcgttgatgcctacaacgaagtgatcgcccgggtgcgaatgtgggtgaacctgaacctgtggcagaagctgaagctaagcagagatgatgccaagcctctgctgagactgaagggattcccttcctttcctctggtcgagagacaggccaacgaagtggactggtgggacatggtgtgtaacgtgaagaagctgatcaacgagaaaaaggaggatggcaaggtgttttggcagaatctggctggctacaagagacaggaagccctgagaccatacctgagcagcgaggaagatcggaagaagggaaagaaattcgctcggtaccagctgggcgacctgctgctgcacctggaaaagaagcacggcgaggactggggaaaggtgtacgacgaggcctgggagcggattgacaagaaagtggaaggcctgagcaagcacatcaagctggaagaggaacggagaagcgaggacgcccagagcaaggccgccctgaccgactggctgcgggctaaggccagcttcgtgatcgagggcctgaaggaggccgacaaggacgagttctgcagatgcgagctgaagctgcagaagtggtacggggacctgcggggaaagcccttcgccatcgaagccgagaacagcatcctggacatcagcggcttcagcaagcagtacaactgtgccttcatctggcagaaggacggcgtgaagaagctgaacctgtacctgatcatcaactacttcaagggcggcaagctgcggttcaagaagatcaaacctgaagccttcgaagccaacagattctacaccgtgatcaacaaaaagagcggcgagatcgtgcccatggaggtgaacttcaacttcgacgaccccaacctgatcatcctgcctctggcctttggcaagagacagggcagagaattcatctggaacgacctgctgtccctggaaaccggcagcctgaagctggccaacggaagagtgatcgagaagacactgtacaacagaagaacccggcaggatgagcctgccctgttcgtggccctgaccttcgagcggcgggaggtcctggactcctccaatatcaaaccaatgaacctgatcggcgtggcaagaggcgaaaacatccccgccgtgatcgccctgaccgaccccgagggctgcccactgagccggtttaaggatagcctgggaaacccaacccacatcctgagaatcggcgagagctataaggagaagcagcggaccatccaggccaagaaggaggtggagcagcggagagccggcggctacagccggaagtacgccagcaaagccaagaatctggcagacgatatggtgagaaacaccgctagagatctgctgtactacgccgtgacccaggatgccatgctgatcttcgccaacctgagccggggcttcggccggcagggcaagcggaccttcatggccgagagacagtacacacggatggaggactggctgaccgccaagctggcctacgagggcctgagcaagacctacctgtccaagacactggcccagtacacctccaagacatgcagcaactgtgggtttaccatcaccagcgccgactacgacagggtgctggagaagctgaagaagacagcaacaggctggatgaccacaattaacggcaaggagctgaaggtggagggccagattacctactacaacagatacaagagacagaacgtagtcaaggacctgtccgtcgagctggatagactgagcgaagaatctgtgaacaacgacatctcctcctggacaaagggcagaagcggagaagctctgagcctcctgaagaaaagattctcccatagacccgtgcaggagaagttcgtgtgcctgaactgcggcttcgagacacacgcagccgagcaagccgccctgaacatcgccagatcctggctgttcctgcggagccaggagtacaagaaataccagacaaacaagacaaccggcaacaccgataagagagccttcgtcgagacctggcagtccttttaccggaagaagcttaaggaggtgtggaaacctgccgtgcggtctggcggatctggcggaggctccaccagccccaagaaaaagagaaaagtctaagctgccttctgcggggcttgccttctggccatgcccttcttctctcccttgcacctgtacctcttggtctttgaataaagcctgagtaggaaggctagcaaaaaaaaaaaaaaaaaaaaaaaaaaaaaaaaaaaaaaaaaaaaaaaaaaaaaaaaaaaaaaaaaaaaaaaaaaaaaaaa

SEQ ID NO: 8943 - RNA, 8787 nt, synthetic construct
  source 1..8787: mol_type = other RNA
aggaaataagagagaaaagaagagtaagaagaaatataagagccaccatggcccctaagaagaagcgtaaagtgagccggatgaaccacgaccaggagttcgacccccctaaggtgtaccctcccgtccccgccgagaagagaaagcccatccgggtcctgagcctgttcgatggcatcgccaccggtctgctggtgctgaaggacctgggcatccaggtggataggtacattgcctccgaggtgtgcgaggactccatcaccgtgggaatggtgcgtcatcagggcaagatcatgtacgtgggcgacgtgcggagcgtgacacagaagcatatccaggagtggggccctttcgacctggtgatcggcggcagcccttgcaatgacctgagcatcgtgaacccagcccggaagggcctgtacgagggaaccggcagactgttcttcgagttttacagactgctgcacgacgcccggcctaaggaaggcgacgaccggcccttcttttggctgttcgagaatgtggtggccatgggagtcagcgacaagcgggatattagccggttcctggagagcaaccccgtgatgatcgatgccaaggaagtgagcgccgcccaccgggccagatacttctggggcaatctgcctggcatgaacagacccctggccagcaccgtgaacgacaagctggagctgcaggagtgcctggagcacggccggatcgccaagttcagcaaggtgagaaccatcaccacccgaagcaacagcatcaaacaaggcaaggaccagcactttcctgtgttcatgaacgagaaggaggacatcctgtggtgtaccgagatggagagagtgttcgggttcccagtccactacacagatgtcagcaacatgtctagactggccagacagagactgctgggaagaagctggtccgtccctgtgatcagacacctgttcgcccctctgaaggagtacttcgcctgcgtgagcagcggcaacagcaacgccaacagccggggccccagcttctctagcggcctggtgccactgtccctgagagggagccacatgggccccatggagatctacaaaaccgtgagcgcctggaagcggcagcctgtgcgcgtgctgagcctgtttcggaatatcgataaagtcctgaaaagcctgggattcctggagagcggctctggctccggcggtggcaccctgaagtacgtggaggatgtgacaaacgtggtcagacgggatgtggagaagtggggccccttcgatctggtgtacggcagcacccaacccctgggcagctcttgtgaccggtgccctggctggtacatgtttcagttccaccggatcctgcagtacgccctgccgagacaggagtcccagcggccattcttttggattttcatggacaacttgctgctgaccgaggatgaccaggaaactaccactcggttcctgcagaccgaagccgtgaccctgcaggacgtgagaggccgggactaccagaacgccatgcgggtgtggtccaacatccctggactgaaaagcaagcacgcacctctgacccctaaagaagaggagtacctgcaggcccaggtgcggagcagaagcaagctggacgcccctaaggtggatctgctggtgaagaattgcctcctgcccctgagagagtacttcaagtatttcagccagaatagtctgcccctgggaggcagcggcggcggcttccagaggagcgtgctgttcagcgacgtgagcatcgacttcagccccgaggagtgggagtacctggacctggagcagaaggacctgtacagggacgtgatgctggagaactacagcaacctggtgagcctgggctgcttcatcagcaagcccgacgtgatcagcctgctggagcagggcaaggagccctggaaggtggtgaggaagggcaggaggcagtaccccgacctggagaccaagtacggcggcccaagcagcggcgcccctcctcccagcggcggcaggcggcccaagcagcggcgcccctcctcccagcggcggcagcccagccggctccccaacctctaccgaggagggcacctctgagtccgccacccccgagagcggccctggcacctccaccgagcccagcgagggcagcgcacccggcagccctgccggcagccccacctccacagaggagggaaccagcaccgagcccagcgaaggcagcgccccaggcaccagcaccgagcctagtgagcaggagattaaacggatcaacaagatcagaagaagacttgtgaaagacagcaacaccaagaaggccggcaagacaggccccatgaaaaccctgctggttagagtgatgacacccgatctgagagagcggctggaaaacctgagaaagaagcctgaaaatatcccccagcccatcagcaatacatctagagccaacctgaataagctgctgaccgattacaccgaaatgaagaaggcgatcctgcatgtgtactgggaagagttccagaaggaccctgtgggcctgatgagccgggtggcccagcctgccagcaagaagatcgatcagaacaagctgaaacctgagatggacgagaagggcaacctgaccaccgccggctttgcctgctctcagtgtggccagcccctgttcgtgtacaagctggagcaggtgtctgagaagggcaaggcttacaccaactacttcggacggtgcaatgtggccgagcacgaaaagctgatcctgctggcccagctgaagcccgagaaggatagcgacgaagccgtgacatatagcctgggaaagtttgggcagagggccctggatttctacagcattcatgtgaccaaggagtccacccaccccgtgaagcccctggcccagatcgccggaaacagatacgcctccggacctgtgggaaaggccctgagcgacgcatgtatgggcacaatcgcctccttcctgtctaagtaccaggacatcatcatcgaacaccagaaggtggtgaagggcaaccagaagagactggagagcctgcgggagctggccggcaaggaaaacctggaataccctagcgtgaccctgccacctcagcctcacaccaaggagggcgttgatgcctacaacgaagtgatcgcccgggtgcgaatgtgggtgaacctgaacctgtggcagaagctgaagctaagcagagatgatgccaagcctctgctgagactgaagggattcccttcctttcctctggtcgagagacaggccaacgaagtggactggtgggacatggtgtgtaacgtgaagaagctgatcaacgagaaaaaggaggatggcaaggtgttttggcagaatctggctggctacaagagacaggaagccctgagaccatacctgagcagcgaggaagatcggaagaagggaaagaaattcgctcggtaccagctgggcgacctgctgctgcacctggaaaagaagcacggcgaggactggggaaaggtgtacgacgaggcctgggagcggattgacaagaaagtggaaggcctgagcaagcacatcaagctggaagaggaacggagaagcgaggacgcccagagcaaggccgccctgaccgactggctgcgggctaaggccagcttcgtgatcgagggcctgaaggaggccgacaaggacgagttctgcagatgcgagctgaagctgcagaagtggtacggggacctgcggggaaagcccttcgccatcgaagccgagaacagcatcctggacatcagcggcttcagcaagcagtacaactgtgccttcatctggcagaaggacggcgtgaagaagctgaacctgtacctgatcatcaactacttcaagggcggcaagctgcggttcaagaagatcaaacctgaagccttcgaagccaacagattctacaccgtgatcaacaaaaagagcggcgagatcgtgcccatggaggtgaacttcaacttcgacgaccccaacctgatcatcctgcctctggcctttggcaagagacagggcagagaattcatctggaacgacctgctgtccctggaaaccggcagcctgaagctggccaacggaagagtgatcgagaagacactgtacaacagaagaacccggcaggatgagcctgccctgttcgtggccctgaccttcgagcggcgggaggtcctggactcctccaatatcaaaccaatgaacctgatcggcgtggcaagaggcgaaaacatccccgccgtgatcgccctgaccgaccccgagggctgcccactgagccggtttaaggatagcctgggaaacccaacccacatcctgagaatcggcgagagctataaggagaagcagcggaccatccaggccaagaaggaggtggagcagcggagagccggcggctacagccggaagtacgccagcaaagccaagaatctggcagacgatatggtgagaaacaccgctagagatctgctgtactacgccgtgacccaggatgccatgctgatcttcgccaacctgagccggggcttcggccggcagggcaagcggaccttcatggccgagagacagtacacacggatggaggactggctgaccgccaagctggcctacgagggcctgagcaagacctacctgtccaagacactggcccagtacacctccaagacatgcagcaactgtgggtttaccatcaccagcgccgactacgacagggtgctggagaagctgaagaagacagcaacaggctggatgaccacaattaacggcaaggagctgaaggtggagggccagattacctactacaacagatacaagagacagaacgtagtcaaggacctgtccgtcgagctggatagactgagcgaagaatctgtgaacaacgacatctcctcctggacaaagggcagaagcggagaagctctgagcctcctgaagaaaagattctcccatagacccgtgcaggagaagttcgtgtgcctgaactgcggcttcgagacacacgcagccgagcaagccgccctgaacatcgccagatcctggctgttcctgcggagccaggagtacaagaaataccagacaaacaagacaaccggcaacaccgataagagagccttcgtcgagacctggcagtccttttaccggaagaagcttaaggaggtgtggaaacctgccgtgcggtctggcggatctggcggaggctccaccagccccaagaaaaagagaaaagtctaagctgccttctgcggggcttgccttctggccatgcccttcttctctcccttgcacctgtacctcttggtctttgaataaagcctgagtaggaaggctagcaaaaaaaaaaaaaaaaaaaaaaaaaaaaaaaaaaaaaaaaaaaaaaaaaaaaaaaaaaaaaaaaaaaaaaaaaaaaaaaagcccagccggctccccaacctctaccgaggagggcacctctgagtccgccacccccgagagcggccctggcacctccaccgagcccagcgagggcagcgcacccggcagccctgccggcagccccacctccacagaggagggaaccagcaccgagcccagcgaaggcagcgccccaggcaccagcaccgagcctagtgagcaggagattaaacggatcaacaagatcagaagaagacttgtgaaagacagcaacaccaagaaggccggcaagacaggccccatgaaaaccctgctggttagagtgatgacacccgatctgagagagcggctggaaaacctgagaaagaagcctgaaaatatcccccagcccatcagcaatacatctagagccaacctgaataagctgctgaccgattacaccgaaatgaagaaggcgatcctgcatgtgtactgggaagagttccagaaggaccctgtgggcctgatgagccgggtggcccagcctgccagcaagaagatcgatcagaacaagctgaaacctgagatggacgagaagggcaacctgaccaccgccggctttgcctgctctcagtgtggccagcccctgttcgtgtacaagctggagcaggtgtctgagaagggcaaggcttacaccaactacttcggacggtgcaatgtggccgagcacgaaaagctgatcctgctggcccagctgaagcccgagaaggatagcgacgaagccgtgacatatagcctgggaaagtttgggcagagggccctggatttctacagcattcatgtgaccaaggagtccacccaccccgtgaagcccctggcccagatcgccggaaacagatacgcctccggacctgtgggaaaggccctgagcgacgcatgtatgggcacaatcgcctccttcctgtctaagtaccaggacatcatcatcgaacaccagaaggtggtgaagggcaaccagaagagactggagagcctgcgggagctggccggcaaggaaaacctggaataccctagcgtgaccctgccacctcagcctcacaccaaggagggcgttgatgcctacaacgaagtgatcgcccgggtgcgaatgtgggtgaacctgaacctgtggcagaagctgaagctaagcagagatgatgccaagcctctgctgagactgaagggattcccttcctttcctctggtcgagagacaggccaacgaagtggactggtgggacatggtgtgtaacgtgaagaagctgatcaacgagaaaaaggaggatggcaaggtgttttggcagaatctggctggctacaagagacaggaagccctgagaccatacctgagcagcgaggaagatcggaagaagggaaagaaattcgctcggtaccagctgggcgacctgctgctgcacctggaaaagaagcacggcgaggactggggaaaggtgtacgacgaggcctgggagcggattgacaagaaagtggaaggcctgagcaagcacatcaagctggaagaggaacggagaagcgaggacgcccagagcaaggccgccctgaccgactggctgcgggctaaggccagcttcgtgatcgagggcctgaaggaggccgacaaggacgagttctgcagatgcgagctgaagctgcagaagtggtacggggacctgcggggaaagcccttcgccatcgaagccgagaacagcatcctggacatcagcggcttcagcaagcagtacaactgtgccttcatctggcagaaggacggcgtgaagaagctgaacctgtacctgatcatcaactacttcaagggcggcaagctgcggttcaagaagatcaaacctgaagccttcgaagccaacagattctacaccgtgatcaacaaaaagagcggcgagatcgtgcccatggaggtgaacttcaacttcgacgaccccaacctgatcatcctgcctctggcctttggcaagagacagggcagagaattcatctggaacgacctgctgtccctggaaaccggcagcctgaagctggccaacggaagagtgatcgagaagacactgtacaacagaagaacccggcaggatgagcctgccctgttcgtggccctgaccttcgagcggcgggaggtcctggactcctccaatatcaaaccaatgaacctgatcggcgtggcaagaggcgaaaacatccccgccgtgatcgccctgaccgaccccgagggctgcccactgagccggtttaaggatagcctgggaaacccaacccacatcctgagaatcggcgagagctataaggagaagcagcggaccatccaggccaagaaggaggtggagcagcggagagccggcggctacagccggaagtacgccagcaaagccaagaatctggcagacgatatggtgagaaacaccgctagagatctgctgtactacgccgtgacccaggatgccatgctgatcttcgccaacctgagccggggcttcggccggcagggcaagcggaccttcatggccgagagacagtacacacggatggaggactggctgaccgccaagctggcctacgagggcctgagcaagacctacctgtccaagacactggcccagtacacctccaagacatgcagcaactgtgggtttaccatcaccagcgccgactacgacagggtgctggagaagctgaagaagacagcaacaggctggatgaccacaattaacggcaaggagctgaaggtggagggccagattacctactacaacagatacaagagacagaacgtagtcaaggacctgtccgtcgagctggatagactgagcgaagaatctgtgaacaacgacatctcctcctggacaaagggcagaagcggagaagctctgagcctcctgaagaaaagattctcccatagacccgtgcaggagaagttcgtgtgcctgaactgcggcttcgagacacacgcagccgagcaagccgccctgaacatcgccagatcctggctgttcctgcggagccaggagtacaagaaataccagacaaacaagacaaccggcaacaccgataagagagccttcgtcgagacctggcagtccttttaccggaagaagcttaaggaggtgtggaaacctgccgtgcggtctggcggatctggcggaggctccaccagccccaagaaaaagagaaaagtctaagctgccttctgcggggcttgccttctggccatgcccttcttctctcccttgcacctgtacctcttggtctttgaataaagcctgagtaggaaggctagcaaaaaaaaaaaaaaaaaaaaaaaaaaaaaaaaaaaaaaaaaaaaaaaaaaaaaaaaaaaaaaaaaaaaaaaaaaaaaaaa

SEQ ID NO: 8944 - RNA, 8787 nt, synthetic construct
  source 1..8787: mol_type = other RNA
aggaaataagagagaaaagaagagtaagaagaaatataagagccaccatggcccctaagaagaagcgtaaagtgagccggatgaaccacgaccaggagttcgacccccctaaggtgtaccctcccgtccccgccgagaagagaaagcccatccgggtcctgagcctgttcgatggcatcgccaccggtctgctggtgctgaaggacctgggcatccaggtggataggtacattgcctccgaggtgtgcgaggactccatcaccgtgggaatggtgcgtcatcagggcaagatcatgtacgtgggcgacgtgcggagcgtgacacagaagcatatccaggagtggggccctttcgacctggtgatcggcggcagcccttgcaatgacctgagcatcgtgaacccagcccggaagggcctgtacgagggaaccggcagactgttcttcgagttttacagactgctgcacgacgcccggcctaaggaaggcgacgaccggcccttcttttggctgttcgagaatgtggtggccatgggagtcagcgacaagcgggatattagccggttcctggagagcaaccccgtgatgatcgatgccaaggaagtgagcgccgcccaccgggccagatacttctggggcaatctgcctggcatgaacagacccctggccagcaccgtgaacgacaagctggagctgcaggagtgcctggagcacggccggatcgccaagttcagcaaggtgagaaccatcaccacccgaagcaacagcatcaaacaaggcaaggaccagcactttcctgtgttcatgaacgagaaggaggacatcctgtggtgtaccgagatggagagagtgttcgggttcccagtccactacacagatgtcagcaacatgtctagactggccagacagagactgctgggaagaagctggtccgtccctgtgatcagacacctgttcgcccctctgaaggagtacttcgcctgcgtgagcagcggcaacagcaacgccaacagccggggccccagcttctctagcggcctggtgccactgtccctgagagggagccacatgggccccatggagatctacaaaaccgtgagcgcctggaagcggcagcctgtgcgcgtgctgagcctgtttcggaatatcgataaagtcctgaaaagcctgggattcctggagagcggctctggctccggcggtggcaccctgaagtacgtggaggatgtgacaaacgtggtcagacgggatgtggagaagtggggccccttcgatctggtgtacggcagcacccaacccctgggcagctcttgtgaccggtgccctggctggtacatgtttcagttccaccggatcctgcagtacgccctgccgagacaggagtcccagcggccattcttttggattttcatggacaacttgctgctgaccgaggatgaccaggaaactaccactcggttcctgcagaccgaagccgtgaccctgcaggacgtgagaggccgggactaccagaacgccatgcgggtgtggtccaacatccctggactgaaaagcaagcacgcacctctgacccctaaagaagaggagtacctgcaggcccaggtgcggagcagaagcaagctggacgcccctaaggtggatctgctggtgaagaattgcctcctgcccctgagagagtacttcaagtatttcagccagaatagtctgcccctgggaggcagcggcggcggcatggccttcgaggacgtggccgtgtacttcagccaggaggagtggggcctgctggacaccgcccagagggccctgtacaggagggtgatgctggacaacttcgccctggtggccagcctgggcctgagcaccagcaggcccagggtggtgatccagctggagaggggcgaggagccctgggtgcccagcggcaccgacaccatcctgagcaggaacacctacaggaggaggaaccccggcagcggcggcccaagcagcggcgcccctcctcccagcggcggcaggcggcccaagcagcggcgcccctcctcccagcggcggcagcccagccggctccccaacctctaccgaggagggcacctctgagtccgccacccccgagagcggccctggcacctccaccgagcccagcgagggcagcgcacccggcagccctgccggcagccccacctccacagaggagggaaccagcaccgagcccagcgaaggcagcgccccaggcaccagcaccgagcctagtgagcaggagattaaacggatcaacaagatcagaagaagacttgtgaaagacagcaacaccaagaaggccggcaagacaggccccatgaaaaccctgctggttagagtgatgacacccgatctgagagagcggctggaaaacctgagaaagaagcctgaaaatatcccccagcccatcagcaatacatctagagccaacctgaataagctgctgaccgattacaccgaaatgaagaaggcgatcctgcatgtgtactgggaagagttccagaaggaccctgtgggcctgatgagccgggtggcccagcctgccagcaagaagatcgatcagaacaagctgaaacctgagatggacgagaagggcaacctgaccaccgccggctttgcctgctctcagtgtggccagcccctgttcgtgtacaagctggagcaggtgtctgagaagggcaaggcttacaccaactacttcggacggtgcaatgtggccgagcacgaaaagctgatcctgctggcccagctgaagcccgagaaggatagcgacgaagccgtgacatatagcctgggaaagtttgggcagagggccctggatttctacagcattcatgtgaccaaggagtccacccaccccgtgaagcccctggcccagatcgccggaaacagatacgcctccggacctgtgggaaaggccctgagcgacgcatgtatgggcacaatcgcctccttcctgtctaagtaccaggacatcatcatcgaacaccagaaggtggtgaagggcaaccagaagagactggagagcctgcgggagctggccggcaaggaaaacctggaataccctagcgtgaccctgccacctcagcctcacaccaaggagggcgttgatgcctacaacgaagtgatcgcccgggtgcgaatgtgggtgaacctgaacctgtggcagaagctgaagctaagcagagatgatgccaagcctctgctgagactgaagggattcccttcctttcctctggtcgagagacaggccaacgaagtggactggtgggacatggtgtgtaacgtgaagaagctgatcaacgagaaaaaggaggatggcaaggtgttttggcagaatctggctggctacaagagacaggaagccctgagaccatacctgagcagcgaggaagatcggaagaagggaaagaaattcgctcggtaccagctgggcgacctgctgctgcacctggaaaagaagcacggcgaggactggggaaaggtgtacgacgaggcctgggagcggattgacaagaaagtggaaggcctgagcaagcacatcaagctggaagaggaacggagaagcgaggacgcccagagcaaggccgccctgaccgactggctgcgggctaaggccagcttcgtgatcgagggcctgaaggaggccgacaaggacgagttctgcagatgcgagctgaagctgcagaagtggtacggggacctgcggggaaagcccttcgccatcgaagccgagaacagcatcctggacatcagcggcttcagcaagcagtacaactgtgccttcatctggcagaaggacggcgtgaagaagctgaacctgtacctgatcatcaactacttcaagggcggcaagctgcggttcaagaagatcaaacctgaagccttcgaagccaacagattctacaccgtgatcaacaaaaagagcggcgagatcgtgcccatggaggtgaacttcaacttcgacgaccccaacctgatcatcctgcctctggcctttggcaagagacagggcagagaattcatctggaacgacctgctgtccctggaaaccggcagcctgaagctggccaacggaagagtgatcgagaagacactgtacaacagaagaacccggcaggatgagcctgccctgttcgtggccctgaccttcgagcggcgggaggtcctggactcctccaatatcaaaccaatgaacctgatcggcgtggcaagaggcgaaaacatccccgccgtgatcgccctgaccgaccccgagggctgcccactgagccggtttaaggatagcctgggaaacccaacccacatcctgagaatcggcgagagctataaggagaagcagcggaccatccaggccaagaaggaggtggagcagcggagagccggcggctacagccggaagtacgccagcaaagccaagaatctggcagacgatatggtgagaaacaccgctagagatctgctgtactacgccgtgacccaggatgccatgctgatcttcgccaacctgagccggggcttcggccggcagggcaagcggaccttcatggccgagagacagtacacacggatggaggactggctgaccgccaagctggcctacgagggcctgagcaagacctacctgtccaagacactggcccagtacacctccaagacatgcagcaactgtgggtttaccatcaccagcgccgactacgacagggtgctggagaagctgaagaagacagcaacaggctggatgaccacaattaacggcaaggagctgaaggtggagggccagattacctactacaacagatacaagagacagaacgtagtcaaggacctgtccgtcgagctggatagactgagcgaagaatctgtgaacaacgacatctcctcctggacaaagggcagaagcggagaagctctgagcctcctgaagaaaagattctcccatagacccgtgcaggagaagttcgtgtgcctgaactgcggcttcgagacacacgcagccgagcaagccgccctgaacatcgccagatcctggctgttcctgcggagccaggagtacaagaaataccagacaaacaagacaaccggcaacaccgataagagagccttcgtcgagacctggcagtccttttaccggaagaagcttaaggaggtgtggaaacctgccgtgcggtctggcggatctggcggaggctccaccagccccaagaaaaagagaaaagtctaagctgccttctgcggggcttgccttctggccatgcccttcttctctcccttgcacctgtacctcttggtctttgaataaagcctgagtaggaaggctagcaaaaaaaaaaaaaaaaaaaaaaaaaaaaaaaaaaaaaaaaaaaaaaaaaaaaaaaaaaaaaaaaaaaaaaaaaaaaaaaagcccagccggctccccaacctctaccgaggagggcacctctgagtccgccacccccgagagcggccctggcacctccaccgagcccagcgagggcagcgcacccggcagccctgccggcagccccacctccacagaggagggaaccagcaccgagcccagcgaaggcagcgccccaggcaccagcaccgagcctagtgagcaggagattaaacggatcaacaagatcagaagaagacttgtgaaagacagcaacaccaagaaggccggcaagacaggccccatgaaaaccctgctggttagagtgatgacacccgatctgagagagcggctggaaaacctgagaaagaagcctgaaaatatcccccagcccatcagcaatacatctagagccaacctgaataagctgctgaccgattacaccgaaatgaagaaggcgatcctgcatgtgtactgggaagagttccagaaggaccctgtgggcctgatgagccgggtggcccagcctgccagcaagaagatcgatcagaacaagctgaaacctgagatggacgagaagggcaacctgaccaccgccggctttgcctgctctcagtgtggccagcccctgttcgtgtacaagctggagcaggtgtctgagaagggcaaggcttacaccaactacttcggacggtgcaatgtggccgagcacgaaaagctgatcctgctggcccagctgaagcccgagaaggatagcgacgaagccgtgacatatagcctgggaaagtttgggcagagggccctggatttctacagcattcatgtgaccaaggagtccacccaccccgtgaagcccctggcccagatcgccggaaacagatacgcctccggacctgtgggaaaggccctgagcgacgcatgtatgggcacaatcgcctccttcctgtctaagtaccaggacatcatcatcgaacaccagaaggtggtgaagggcaaccagaagagactggagagcctgcgggagctggccggcaaggaaaacctggaataccctagcgtgaccctgccacctcagcctcacaccaaggagggcgttgatgcctacaacgaagtgatcgcccgggtgcgaatgtgggtgaacctgaacctgtggcagaagctgaagctaagcagagatgatgccaagcctctgctgagactgaagggattcccttcctttcctctggtcgagagacaggccaacgaagtggactggtgggacatggtgtgtaacgtgaagaagctgatcaacgagaaaaaggaggatggcaaggtgttttggcagaatctggctggctacaagagacaggaagccctgagaccatacctgagcagcgaggaagatcggaagaagggaaagaaattcgctcggtaccagctgggcgacctgctgctgcacctggaaaagaagcacggcgaggactggggaaaggtgtacgacgaggcctgggagcggattgacaagaaagtggaaggcctgagcaagcacatcaagctggaagaggaacggagaagcgaggacgcccagagcaaggccgccctgaccgactggctgcgggctaaggccagcttcgtgatcgagggcctgaaggaggccgacaaggacgagttctgcagatgcgagctgaagctgcagaagtggtacggggacctgcggggaaagcccttcgccatcgaagccgagaacagcatcctggacatcagcggcttcagcaagcagtacaactgtgccttcatctggcagaaggacggcgtgaagaagctgaacctgtacctgatcatcaactacttcaagggcggcaagctgcggttcaagaagatcaaacctgaagccttcgaagccaacagattctacaccgtgatcaacaaaaagagcggcgagatcgtgcccatggaggtgaacttcaacttcgacgaccccaacctgatcatcctgcctctggcctttggcaagagacagggcagagaattcatctggaacgacctgctgtccctggaaaccggcagcctgaagctggccaacggaagagtgatcgagaagacactgtacaacagaagaacccggcaggatgagcctgccctgttcgtggccctgaccttcgagcggcgggaggtcctggactcctccaatatcaaaccaatgaacctgatcggcgtggcaagaggcgaaaacatccccgccgtgatcgccctgaccgaccccgagggctgcccactgagccggtttaaggatagcctgggaaacccaacccacatcctgagaatcggcgagagctataaggagaagcagcggaccatccaggccaagaaggaggtggagcagcggagagccggcggctacagccggaagtacgccagcaaagccaagaatctggcagacgatatggtgagaaacaccgctagagatctgctgtactacgccgtgacccaggatgccatgctgatcttcgccaacctgagccggggcttcggccggcagggcaagcggaccttcatggccgagagacagtacacacggatggaggactggctgaccgccaagctggcctacgagggcctgagcaagacctacctgtccaagacactggcccagtacacctccaagacatgcagcaactgtgggtttaccatcaccagcgccgactacgacagggtgctggagaagctgaagaagacagcaacaggctggatgaccacaattaacggcaaggagctgaaggtggagggccagattacctactacaacagatacaagagacagaacgtagtcaaggacctgtccgtcgagctggatagactgagcgaagaatctgtgaacaacgacatctcctcctggacaaagggcagaagcggagaagctctgagcctcctgaagaaaagattctcccatagacccgtgcaggagaagttcgtgtgcctgaactgcggcttcgagacacacgcagccgagcaagccgccctgaacatcgccagatcctggctgttcctgcggagccaggagtacaagaaataccagacaaacaagacaaccggcaacaccgataagagagccttcgtcgagacctggcagtccttttaccggaagaagcttaaggaggtgtggaaacctgccgtgcggtctggcggatctggcggaggctccaccagccccaagaaaaagagaaaagtctaagctgccttctgcggggcttgccttctggccatgcccttcttctctcccttgcacctgtacctcttggtctttgaataaagcctgagtaggaaggctagcaaaaaaaaaaaaaaaaaaaaaaaaaaaaaaaaaaaaaaaaaaaaaaaaaaaaaaaaaaaaaaaaaaaaaaaaaaaaaaaa

SEQ ID NO: 8945 - RNA, 8787 nt, synthetic construct
  source 1..8787: mol_type = other RNA
aggaaataagagagaaaagaagagtaagaagaaatataagagccaccatggcccctaagaagaagcgtaaagtgagccggatgaaccacgaccaggagttcgacccccctaaggtgtaccctcccgtccccgccgagaagagaaagcccatccgggtcctgagcctgttcgatggcatcgccaccggtctgctggtgctgaaggacctgggcatccaggtggataggtacattgcctccgaggtgtgcgaggactccatcaccgtgggaatggtgcgtcatcagggcaagatcatgtacgtgggcgacgtgcggagcgtgacacagaagcatatccaggagtggggccctttcgacctggtgatcggcggcagcccttgcaatgacctgagcatcgtgaacccagcccggaagggcctgtacgagggaaccggcagactgttcttcgagttttacagactgctgcacgacgcccggcctaaggaaggcgacgaccggcccttcttttggctgttcgagaatgtggtggccatgggagtcagcgacaagcgggatattagccggttcctggagagcaaccccgtgatgatcgatgccaaggaagtgagcgccgcccaccgggccagatacttctggggcaatctgcctggcatgaacagacccctggccagcaccgtgaacgacaagctggagctgcaggagtgcctggagcacggccggatcgccaagttcagcaaggtgagaaccatcaccacccgaagcaacagcatcaaacaaggcaaggaccagcactttcctgtgttcatgaacgagaaggaggacatcctgtggtgtaccgagatggagagagtgttcgggttcccagtccactacacagatgtcagcaacatgtctagactggccagacagagactgctgggaagaagctggtccgtccctgtgatcagacacctgttcgcccctctgaaggagtacttcgcctgcgtgagcagcggcaacagcaacgccaacagccggggccccagcttctctagcggcctggtgccactgtccctgagagggagccacatgggccccatggagatctacaaaaccgtgagcgcctggaagcggcagcctgtgcgcgtgctgagcctgtttcggaatatcgataaagtcctgaaaagcctgggattcctggagagcggctctggctccggcggtggcaccctgaagtacgtggaggatgtgacaaacgtggtcagacgggatgtggagaagtggggccccttcgatctggtgtacggcagcacccaacccctgggcagctcttgtgaccggtgccctggctggtacatgtttcagttccaccggatcctgcagtacgccctgccgagacaggagtcccagcggccattcttttggattttcatggacaacttgctgctgaccgaggatgaccaggaaactaccactcggttcctgcagaccgaagccgtgaccctgcaggacgtgagaggccgggactaccagaacgccatgcgggtgtggtccaacatccctggactgaaaagcaagcacgcacctctgacccctaaagaagaggagtacctgcaggcccaggtgcggagcagaagcaagctggacgcccctaaggtggatctgctggtgaagaattgcctcctgcccctgagagagtacttcaagtatttcagccagaatagtctgcccctgggaggcagcggcggcggcgtgcaggagcccgtgaccttcaaggacgtggccgtggacttcacccaggaggagtggggccagctggacctggtgcagaggaccctgtacagggacgtgatgctggagacctacggccacctgctgagcgtgggcaaccagatcgccaagcccgaggtgatcagcctgctggagcagggcgaggagccctggagcatggagcaggcctgcccccagaggacctgccccgagtggatgaggaacggcggcccaagcagcggcgcccctcctcccagcggcggcaggcggcccaagcagcggcgcccctcctcccagcggcggcagcccagccggctccccaacctctaccgaggagggcacctctgagtccgccacccccgagagcggccctggcacctccaccgagcccagcgagggcagcgcacccggcagccctgccggcagccccacctccacagaggagggaaccagcaccgagcccagcgaaggcagcgccccaggcaccagcaccgagcctagtgagcaggagattaaacggatcaacaagatcagaagaagacttgtgaaagacagcaacaccaagaaggccggcaagacaggccccatgaaaaccctgctggttagagtgatgacacccgatctgagagagcggctggaaaacctgagaaagaagcctgaaaatatcccccagcccatcagcaatacatctagagccaacctgaataagctgctgaccgattacaccgaaatgaagaaggcgatcctgcatgtgtactgggaagagttccagaaggaccctgtgggcctgatgagccgggtggcccagcctgccagcaagaagatcgatcagaacaagctgaaacctgagatggacgagaagggcaacctgaccaccgccggctttgcctgctctcagtgtggccagcccctgttcgtgtacaagctggagcaggtgtctgagaagggcaaggcttacaccaactacttcggacggtgcaatgtggccgagcacgaaaagctgatcctgctggcccagctgaagcccgagaaggatagcgacgaagccgtgacatatagcctgggaaagtttgggcagagggccctggatttctacagcattcatgtgaccaaggagtccacccaccccgtgaagcccctggcccagatcgccggaaacagatacgcctccggacctgtgggaaaggccctgagcgacgcatgtatgggcacaatcgcctccttcctgtctaagtaccaggacatcatcatcgaacaccagaaggtggtgaagggcaaccagaagagactggagagcctgcgggagctggccggcaaggaaaacctggaataccctagcgtgaccctgccacctcagcctcacaccaaggagggcgttgatgcctacaacgaagtgatcgcccgggtgcgaatgtgggtgaacctgaacctgtggcagaagctgaagctaagcagagatgatgccaagcctctgctgagactgaagggattcccttcctttcctctggtcgagagacaggccaacgaagtggactggtgggacatggtgtgtaacgtgaagaagctgatcaacgagaaaaaggaggatggcaaggtgttttggcagaatctggctggctacaagagacaggaagccctgagaccatacctgagcagcgaggaagatcggaagaagggaaagaaattcgctcggtaccagctgggcgacctgctgctgcacctggaaaagaagcacggcgaggactggggaaaggtgtacgacgaggcctgggagcggattgacaagaaagtggaaggcctgagcaagcacatcaagctggaagaggaacggagaagcgaggacgcccagagcaaggccgccctgaccgactggctgcgggctaaggccagcttcgtgatcgagggcctgaaggaggccgacaaggacgagttctgcagatgcgagctgaagctgcagaagtggtacggggacctgcggggaaagcccttcgccatcgaagccgagaacagcatcctggacatcagcggcttcagcaagcagtacaactgtgccttcatctggcagaaggacggcgtgaagaagctgaacctgtacctgatcatcaactacttcaagggcggcaagctgcggttcaagaagatcaaacctgaagccttcgaagccaacagattctacaccgtgatcaacaaaaagagcggcgagatcgtgcccatggaggtgaacttcaacttcgacgaccccaacctgatcatcctgcctctggcctttggcaagagacagggcagagaattcatctggaacgacctgctgtccctggaaaccggcagcctgaagctggccaacggaagagtgatcgagaagacactgtacaacagaagaacccggcaggatgagcctgccctgttcgtggccctgaccttcgagcggcgggaggtcctggactcctccaatatcaaaccaatgaacctgatcggcgtggcaagaggcgaaaacatccccgccgtgatcgccctgaccgaccccgagggctgcccactgagccggtttaaggatagcctgggaaacccaacccacatcctgagaatcggcgagagctataaggagaagcagcggaccatccaggccaagaaggaggtggagcagcggagagccggcggctacagccggaagtacgccagcaaagccaagaatctggcagacgatatggtgagaaacaccgctagagatctgctgtactacgccgtgacccaggatgccatgctgatcttcgccaacctgagccggggcttcggccggcagggcaagcggaccttcatggccgagagacagtacacacggatggaggactggctgaccgccaagctggcctacgagggcctgagcaagacctacctgtccaagacactggcccagtacacctccaagacatgcagcaactgtgggtttaccatcaccagcgccgactacgacagggtgctggagaagctgaagaagacagcaacaggctggatgaccacaattaacggcaaggagctgaaggtggagggccagattacctactacaacagatacaagagacagaacgtagtcaaggacctgtccgtcgagctggatagactgagcgaagaatctgtgaacaacgacatctcctcctggacaaagggcagaagcggagaagctctgagcctcctgaagaaaagattctcccatagacccgtgcaggagaagttcgtgtgcctgaactgcggcttcgagacacacgcagccgagcaagccgccctgaacatcgccagatcctggctgttcctgcggagccaggagtacaagaaataccagacaaacaagacaaccggcaacaccgataagagagccttcgtcgagacctggcagtccttttaccggaagaagcttaaggaggtgtggaaacctgccgtgcggtctggcggatctggcggaggctccaccagccccaagaaaaagagaaaagtctaagctgccttctgcggggcttgccttctggccatgcccttcttctctcccttgcacctgtacctcttggtctttgaataaagcctgagtaggaaggctagcaaaaaaaaaaaaaaaaaaaaaaaaaaaaaaaaaaaaaaaaaaaaaaaaaaaaaaaaaaaaaaaaaaaaaaaaaaaaaaaagcccagccggctccccaacctctaccgaggagggcacctctgagtccgccacccccgagagcggccctggcacctccaccgagcccagcgagggcagcgcacccggcagccctgccggcagccccacctccacagaggagggaaccagcaccgagcccagcgaaggcagcgccccaggcaccagcaccgagcctagtgagcaggagattaaacggatcaacaagatcagaagaagacttgtgaaagacagcaacaccaagaaggccggcaagacaggccccatgaaaaccctgctggttagagtgatgacacccgatctgagagagcggctggaaaacctgagaaagaagcctgaaaatatcccccagcccatcagcaatacatctagagccaacctgaataagctgctgaccgattacaccgaaatgaagaaggcgatcctgcatgtgtactgggaagagttccagaaggaccctgtgggcctgatgagccgggtggcccagcctgccagcaagaagatcgatcagaacaagctgaaacctgagatggacgagaagggcaacctgaccaccgccggctttgcctgctctcagtgtggccagcccctgttcgtgtacaagctggagcaggtgtctgagaagggcaaggcttacaccaactacttcggacggtgcaatgtggccgagcacgaaaagctgatcctgctggcccagctgaagcccgagaaggatagcgacgaagccgtgacatatagcctgggaaagtttgggcagagggccctggatttctacagcattcatgtgaccaaggagtccacccaccccgtgaagcccctggcccagatcgccggaaacagatacgcctccggacctgtgggaaaggccctgagcgacgcatgtatgggcacaatcgcctccttcctgtctaagtaccaggacatcatcatcgaacaccagaaggtggtgaagggcaaccagaagagactggagagcctgcgggagctggccggcaaggaaaacctggaataccctagcgtgaccctgccacctcagcctcacaccaaggagggcgttgatgcctacaacgaagtgatcgcccgggtgcgaatgtgggtgaacctgaacctgtggcagaagctgaagctaagcagagatgatgccaagcctctgctgagactgaagggattcccttcctttcctctggtcgagagacaggccaacgaagtggactggtgggacatggtgtgtaacgtgaagaagctgatcaacgagaaaaaggaggatggcaaggtgttttggcagaatctggctggctacaagagacaggaagccctgagaccatacctgagcagcgaggaagatcggaagaagggaaagaaattcgctcggtaccagctgggcgacctgctgctgcacctggaaaagaagcacggcgaggactggggaaaggtgtacgacgaggcctgggagcggattgacaagaaagtggaaggcctgagcaagcacatcaagctggaagaggaacggagaagcgaggacgcccagagcaaggccgccctgaccgactggctgcgggctaaggccagcttcgtgatcgagggcctgaaggaggccgacaaggacgagttctgcagatgcgagctgaagctgcagaagtggtacggggacctgcggggaaagcccttcgccatcgaagccgagaacagcatcctggacatcagcggcttcagcaagcagtacaactgtgccttcatctggcagaaggacggcgtgaagaagctgaacctgtacctgatcatcaactacttcaagggcggcaagctgcggttcaagaagatcaaacctgaagccttcgaagccaacagattctacaccgtgatcaacaaaaagagcggcgagatcgtgcccatggaggtgaacttcaacttcgacgaccccaacctgatcatcctgcctctggcctttggcaagagacagggcagagaattcatctggaacgacctgctgtccctggaaaccggcagcctgaagctggccaacggaagagtgatcgagaagacactgtacaacagaagaacccggcaggatgagcctgccctgttcgtggccctgaccttcgagcggcgggaggtcctggactcctccaatatcaaaccaatgaacctgatcggcgtggcaagaggcgaaaacatccccgccgtgatcgccctgaccgaccccgagggctgcccactgagccggtttaaggatagcctgggaaacccaacccacatcctgagaatcggcgagagctataaggagaagcagcggaccatccaggccaagaaggaggtggagcagcggagagccggcggctacagccggaagtacgccagcaaagccaagaatctggcagacgatatggtgagaaacaccgctagagatctgctgtactacgccgtgacccaggatgccatgctgatcttcgccaacctgagccggggcttcggccggcagggcaagcggaccttcatggccgagagacagtacacacggatggaggactggctgaccgccaagctggcctacgagggcctgagcaagacctacctgtccaagacactggcccagtacacctccaagacatgcagcaactgtgggtttaccatcaccagcgccgactacgacagggtgctggagaagctgaagaagacagcaacaggctggatgaccacaattaacggcaaggagctgaaggtggagggccagattacctactacaacagatacaagagacagaacgtagtcaaggacctgtccgtcgagctggatagactgagcgaagaatctgtgaacaacgacatctcctcctggacaaagggcagaagcggagaagctctgagcctcctgaagaaaagattctcccatagacccgtgcaggagaagttcgtgtgcctgaactgcggcttcgagacacacgcagccgagcaagccgccctgaacatcgccagatcctggctgttcctgcggagccaggagtacaagaaataccagacaaacaagacaaccggcaacaccgataagagagccttcgtcgagacctggcagtccttttaccggaagaagcttaaggaggtgtggaaacctgccgtgcggtctggcggatctggcggaggctccaccagccccaagaaaaagagaaaagtctaagctgccttctgcggggcttgccttctggccatgcccttcttctctcccttgcacctgtacctcttggtctttgaataaagcctgagtaggaaggctagcaaaaaaaaaaaaaaaaaaaaaaaaaaaaaaaaaaaaaaaaaaaaaaaaaaaaaaaaaaaaaaaaaaaaaaaaaaaaaaaa

SEQ ID NO: 8946 - RNA, 8787 nt, synthetic construct
  source 1..8787: mol_type = other RNA
aggaaataagagagaaaagaagagtaagaagaaatataagagccaccatggcccctaagaagaagcgtaaagtgagccggatgaaccacgaccaggagttcgacccccctaaggtgtaccctcccgtccccgccgagaagagaaagcccatccgggtcctgagcctgttcgatggcatcgccaccggtctgctggtgctgaaggacctgggcatccaggtggataggtacattgcctccgaggtgtgcgaggactccatcaccgtgggaatggtgcgtcatcagggcaagatcatgtacgtgggcgacgtgcggagcgtgacacagaagcatatccaggagtggggccctttcgacctggtgatcggcggcagcccttgcaatgacctgagcatcgtgaacccagcccggaagggcctgtacgagggaaccggcagactgttcttcgagttttacagactgctgcacgacgcccggcctaaggaaggcgacgaccggcccttcttttggctgttcgagaatgtggtggccatgggagtcagcgacaagcgggatattagccggttcctggagagcaaccccgtgatgatcgatgccaaggaagtgagcgccgcccaccgggccagatacttctggggcaatctgcctggcatgaacagacccctggccagcaccgtgaacgacaagctggagctgcaggagtgcctggagcacggccggatcgccaagttcagcaaggtgagaaccatcaccacccgaagcaacagcatcaaacaaggcaaggaccagcactttcctgtgttcatgaacgagaaggaggacatcctgtggtgtaccgagatggagagagtgttcgggttcccagtccactacacagatgtcagcaacatgtctagactggccagacagagactgctgggaagaagctggtccgtccctgtgatcagacacctgttcgcccctctgaaggagtacttcgcctgcgtgagcagcggcaacagcaacgccaacagccggggccccagcttctctagcggcctggtgccactgtccctgagagggagccacatgggccccatggagatctacaaaaccgtgagcgcctggaagcggcagcctgtgcgcgtgctgagcctgtttcggaatatcgataaagtcctgaaaagcctgggattcctggagagcggctctggctccggcggtggcaccctgaagtacgtggaggatgtgacaaacgtggtcagacgggatgtggagaagtggggccccttcgatctggtgtacggcagcacccaacccctgggcagctcttgtgaccggtgccctggctggtacatgtttcagttccaccggatcctgcagtacgccctgccgagacaggagtcccagcggccattcttttggattttcatggacaacttgctgctgaccgaggatgaccaggaaactaccactcggttcctgcagaccgaagccgtgaccctgcaggacgtgagaggccgggactaccagaacgccatgcgggtgtggtccaacatccctggactgaaaagcaagcacgcacctctgacccctaaagaagaggagtacctgcaggcccaggtgcggagcagaagcaagctggacgcccctaaggtggatctgctggtgaagaattgcctcctgcccctgagagagtacttcaagtatttcagccagaatagtctgcccctgggaggcagcggcggcggcatgagccagggcagcgtgaccttcagggacgtggccatcgacttcagccaggaggagtggaagtggctgcagcccgcccagagggacctgtacaggtgcgtgatgctggagaactacggccacctggtgagcctgggcctgagcatcagcaagcccgacgtggtgagcctgctggagcagggcaaggagccctggctgggcaagaggaacgtgaacagggacctgttcagcgtgagcgagagcggcggcccaagcagcggcgcccctcctcccagcggcggcaggcggcccaagcagcggcgcccctcctcccagcggcggcagcccagccggctccccaacctctaccgaggagggcacctctgagtccgccacccccgagagcggccctggcacctccaccgagcccagcgagggcagcgcacccggcagccctgccggcagccccacctccacagaggagggaaccagcaccgagcccagcgaaggcagcgccccaggcaccagcaccgagcctagtgagcaggagattaaacggatcaacaagatcagaagaagacttgtgaaagacagcaacaccaagaaggccggcaagacaggccccatgaaaaccctgctggttagagtgatgacacccgatctgagagagcggctggaaaacctgagaaagaagcctgaaaatatcccccagcccatcagcaatacatctagagccaacctgaataagctgctgaccgattacaccgaaatgaagaaggcgatcctgcatgtgtactgggaagagttccagaaggaccctgtgggcctgatgagccgggtggcccagcctgccagcaagaagatcgatcagaacaagctgaaacctgagatggacgagaagggcaacctgaccaccgccggctttgcctgctctcagtgtggccagcccctgttcgtgtacaagctggagcaggtgtctgagaagggcaaggcttacaccaactacttcggacggtgcaatgtggccgagcacgaaaagctgatcctgctggcccagctgaagcccgagaaggatagcgacgaagccgtgacatatagcctgggaaagtttgggcagagggccctggatttctacagcattcatgtgaccaaggagtccacccaccccgtgaagcccctggcccagatcgccggaaacagatacgcctccggacctgtgggaaaggccctgagcgacgcatgtatgggcacaatcgcctccttcctgtctaagtaccaggacatcatcatcgaacaccagaaggtggtgaagggcaaccagaagagactggagagcctgcgggagctggccggcaaggaaaacctggaataccctagcgtgaccctgccacctcagcctcacaccaaggagggcgttgatgcctacaacgaagtgatcgcccgggtgcgaatgtgggtgaacctgaacctgtggcagaagctgaagctaagcagagatgatgccaagcctctgctgagactgaagggattcccttcctttcctctggtcgagagacaggccaacgaagtggactggtgggacatggtgtgtaacgtgaagaagctgatcaacgagaaaaaggaggatggcaaggtgttttggcagaatctggctggctacaagagacaggaagccctgagaccatacctgagcagcgaggaagatcggaagaagggaaagaaattcgctcggtaccagctgggcgacctgctgctgcacctggaaaagaagcacggcgaggactggggaaaggtgtacgacgaggcctgggagcggattgacaagaaagtggaaggcctgagcaagcacatcaagctggaagaggaacggagaagcgaggacgcccagagcaaggccgccctgaccgactggctgcgggctaaggccagcttcgtgatcgagggcctgaaggaggccgacaaggacgagttctgcagatgcgagctgaagctgcagaagtggtacggggacctgcggggaaagcccttcgccatcgaagccgagaacagcatcctggacatcagcggcttcagcaagcagtacaactgtgccttcatctggcagaaggacggcgtgaagaagctgaacctgtacctgatcatcaactacttcaagggcggcaagctgcggttcaagaagatcaaacctgaagccttcgaagccaacagattctacaccgtgatcaacaaaaagagcggcgagatcgtgcccatggaggtgaacttcaacttcgacgaccccaacctgatcatcctgcctctggcctttggcaagagacagggcagagaattcatctggaacgacctgctgtccctggaaaccggcagcctgaagctggccaacggaagagtgatcgagaagacactgtacaacagaagaacccggcaggatgagcctgccctgttcgtggccctgaccttcgagcggcgggaggtcctggactcctccaatatcaaaccaatgaacctgatcggcgtggcaagaggcgaaaacatccccgccgtgatcgccctgaccgaccccgagggctgcccactgagccggtttaaggatagcctgggaaacccaacccacatcctgagaatcggcgagagctataaggagaagcagcggaccatccaggccaagaaggaggtggagcagcggagagccggcggctacagccggaagtacgccagcaaagccaagaatctggcagacgatatggtgagaaacaccgctagagatctgctgtactacgccgtgacccaggatgccatgctgatcttcgccaacctgagccggggcttcggccggcagggcaagcggaccttcatggccgagagacagtacacacggatggaggactggctgaccgccaagctggcctacgagggcctgagcaagacctacctgtccaagacactggcccagtacacctccaagacatgcagcaactgtgggtttaccatcaccagcgccgactacgacagggtgctggagaagctgaagaagacagcaacaggctggatgaccacaattaacggcaaggagctgaaggtggagggccagattacctactacaacagatacaagagacagaacgtagtcaaggacctgtccgtcgagctggatagactgagcgaagaatctgtgaacaacgacatctcctcctggacaaagggcagaagcggagaagctctgagcctcctgaagaaaagattctcccatagacccgtgcaggagaagttcgtgtgcctgaactgcggcttcgagacacacgcagccgagcaagccgccctgaacatcgccagatcctggctgttcctgcggagccaggagtacaagaaataccagacaaacaagacaaccggcaacaccgataagagagccttcgtcgagacctggcagtccttttaccggaagaagcttaaggaggtgtggaaacctgccgtgcggtctggcggatctggcggaggctccaccagccccaagaaaaagagaaaagtctaagctgccttctgcggggcttgccttctggccatgcccttcttctctcccttgcacctgtacctcttggtctttgaataaagcctgagtaggaaggctagcaaaaaaaaaaaaaaaaaaaaaaaaaaaaaaaaaaaaaaaaaaaaaaaaaaaaaaaaaaaaaaaaaaaaaaaaaaaaaaaagcccagccggctccccaacctctaccgaggagggcacctctgagtccgccacccccgagagcggccctggcacctccaccgagcccagcgagggcagcgcacccggcagccctgccggcagccccacctccacagaggagggaaccagcaccgagcccagcgaaggcagcgccccaggcaccagcaccgagcctagtgagcaggagattaaacggatcaacaagatcagaagaagacttgtgaaagacagcaacaccaagaaggccggcaagacaggccccatgaaaaccctgctggttagagtgatgacacccgatctgagagagcggctggaaaacctgagaaagaagcctgaaaatatcccccagcccatcagcaatacatctagagccaacctgaataagctgctgaccgattacaccgaaatgaagaaggcgatcctgcatgtgtactgggaagagttccagaaggaccctgtgggcctgatgagccgggtggcccagcctgccagcaagaagatcgatcagaacaagctgaaacctgagatggacgagaagggcaacctgaccaccgccggctttgcctgctctcagtgtggccagcccctgttcgtgtacaagctggagcaggtgtctgagaagggcaaggcttacaccaactacttcggacggtgcaatgtggccgagcacgaaaagctgatcctgctggcccagctgaagcccgagaaggatagcgacgaagccgtgacatatagcctgggaaagtttgggcagagggccctggatttctacagcattcatgtgaccaaggagtccacccaccccgtgaagcccctggcccagatcgccggaaacagatacgcctccggacctgtgggaaaggccctgagcgacgcatgtatgggcacaatcgcctccttcctgtctaagtaccaggacatcatcatcgaacaccagaaggtggtgaagggcaaccagaagagactggagagcctgcgggagctggccggcaaggaaaacctggaataccctagcgtgaccctgccacctcagcctcacaccaaggagggcgttgatgcctacaacgaagtgatcgcccgggtgcgaatgtgggtgaacctgaacctgtggcagaagctgaagctaagcagagatgatgccaagcctctgctgagactgaagggattcccttcctttcctctggtcgagagacaggccaacgaagtggactggtgggacatggtgtgtaacgtgaagaagctgatcaacgagaaaaaggaggatggcaaggtgttttggcagaatctggctggctacaagagacaggaagccctgagaccatacctgagcagcgaggaagatcggaagaagggaaagaaattcgctcggtaccagctgggcgacctgctgctgcacctggaaaagaagcacggcgaggactggggaaaggtgtacgacgaggcctgggagcggattgacaagaaagtggaaggcctgagcaagcacatcaagctggaagaggaacggagaagcgaggacgcccagagcaaggccgccctgaccgactggctgcgggctaaggccagcttcgtgatcgagggcctgaaggaggccgacaaggacgagttctgcagatgcgagctgaagctgcagaagtggtacggggacctgcggggaaagcccttcgccatcgaagccgagaacagcatcctggacatcagcggcttcagcaagcagtacaactgtgccttcatctggcagaaggacggcgtgaagaagctgaacctgtacctgatcatcaactacttcaagggcggcaagctgcggttcaagaagatcaaacctgaagccttcgaagccaacagattctacaccgtgatcaacaaaaagagcggcgagatcgtgcccatggaggtgaacttcaacttcgacgaccccaacctgatcatcctgcctctggcctttggcaagagacagggcagagaattcatctggaacgacctgctgtccctggaaaccggcagcctgaagctggccaacggaagagtgatcgagaagacactgtacaacagaagaacccggcaggatgagcctgccctgttcgtggccctgaccttcgagcggcgggaggtcctggactcctccaatatcaaaccaatgaacctgatcggcgtggcaagaggcgaaaacatccccgccgtgatcgccctgaccgaccccgagggctgcccactgagccggtttaaggatagcctgggaaacccaacccacatcctgagaatcggcgagagctataaggagaagcagcggaccatccaggccaagaaggaggtggagcagcggagagccggcggctacagccggaagtacgccagcaaagccaagaatctggcagacgatatggtgagaaacaccgctagagatctgctgtactacgccgtgacccaggatgccatgctgatcttcgccaacctgagccggggcttcggccggcagggcaagcggaccttcatggccgagagacagtacacacggatggaggactggctgaccgccaagctggcctacgagggcctgagcaagacctacctgtccaagacactggcccagtacacctccaagacatgcagcaactgtgggtttaccatcaccagcgccgactacgacagggtgctggagaagctgaagaagacagcaacaggctggatgaccacaattaacggcaaggagctgaaggtggagggccagattacctactacaacagatacaagagacagaacgtagtcaaggacctgtccgtcgagctggatagactgagcgaagaatctgtgaacaacgacatctcctcctggacaaagggcagaagcggagaagctctgagcctcctgaagaaaagattctcccatagacccgtgcaggagaagttcgtgtgcctgaactgcggcttcgagacacacgcagccgagcaagccgccctgaacatcgccagatcctggctgttcctgcggagccaggagtacaagaaataccagacaaacaagacaaccggcaacaccgataagagagccttcgtcgagacctggcagtccttttaccggaagaagcttaaggaggtgtggaaacctgccgtgcggtctggcggatctggcggaggctccaccagccccaagaaaaagagaaaagtctaagctgccttctgcggggcttgccttctggccatgcccttcttctctcccttgcacctgtacctcttggtctttgaataaagcctgagtaggaaggctagcaaaaaaaaaaaaaaaaaaaaaaaaaaaaaaaaaaaaaaaaaaaaaaaaaaaaaaaaaaaaaaaaaaaaaaaaaaaaaaaa

SEQ ID NO: 8947 - RNA, 8787 nt, synthetic construct
  source 1..8787: mol_type = other RNA
aggaaataagagagaaaagaagagtaagaagaaatataagagccaccatggcccctaagaagaagcgtaaagtgagccggatgaaccacgaccaggagttcgacccccctaaggtgtaccctcccgtccccgccgagaagagaaagcccatccgggtcctgagcctgttcgatggcatcgccaccggtctgctggtgctgaaggacctgggcatccaggtggataggtacattgcctccgaggtgtgcgaggactccatcaccgtgggaatggtgcgtcatcagggcaagatcatgtacgtgggcgacgtgcggagcgtgacacagaagcatatccaggagtggggccctttcgacctggtgatcggcggcagcccttgcaatgacctgagcatcgtgaacccagcccggaagggcctgtacgagggaaccggcagactgttcttcgagttttacagactgctgcacgacgcccggcctaaggaaggcgacgaccggcccttcttttggctgttcgagaatgtggtggccatgggagtcagcgacaagcgggatattagccggttcctggagagcaaccccgtgatgatcgatgccaaggaagtgagcgccgcccaccgggccagatacttctggggcaatctgcctggcatgaacagacccctggccagcaccgtgaacgacaagctggagctgcaggagtgcctggagcacggccggatcgccaagttcagcaaggtgagaaccatcaccacccgaagcaacagcatcaaacaaggcaaggaccagcactttcctgtgttcatgaacgagaaggaggacatcctgtggtgtaccgagatggagagagtgttcgggttcccagtccactacacagatgtcagcaacatgtctagactggccagacagagactgctgggaagaagctggtccgtccctgtgatcagacacctgttcgcccctctgaaggagtacttcgcctgcgtgagcagcggcaacagcaacgccaacagccggggccccagcttctctagcggcctggtgccactgtccctgagagggagccacatgggccccatggagatctacaaaaccgtgagcgcctggaagcggcagcctgtgcgcgtgctgagcctgtttcggaatatcgataaagtcctgaaaagcctgggattcctggagagcggctctggctccggcggtggcaccctgaagtacgtggaggatgtgacaaacgtggtcagacgggatgtggagaagtggggccccttcgatctggtgtacggcagcacccaacccctgggcagctcttgtgaccggtgccctggctggtacatgtttcagttccaccggatcctgcagtacgccctgccgagacaggagtcccagcggccattcttttggattttcatggacaacttgctgctgaccgaggatgaccaggaaactaccactcggttcctgcagaccgaagccgtgaccctgcaggacgtgagaggccgggactaccagaacgccatgcgggtgtggtccaacatccctggactgaaaagcaagcacgcacctctgacccctaaagaagaggagtacctgcaggcccaggtgcggagcagaagcaagctggacgcccctaaggtggatctgctggtgaagaattgcctcctgcccctgagagagtacttcaagtatttcagccagaatagtctgcccctgggaggcagcggcggcggctggcccgagagcgtgaccttcgaggacgtggccgtgtacttcacccagaaccagtgggccagcctggaccccgcccagagggccctgtacggcgaggtgatgctggagaactacgccaacgtggccagcctggtggccttccccttccccaagcccgccctgatcagccacctggagaggggcgaggccccctggggccccgacccctgggacaccgagatccccaggggcatcagccagggcggcggcccaagcagcggcgcccctcctcccagcggcggcaggcggcccaagcagcggcgcccctcctcccagcggcggcagcccagccggctccccaacctctaccgaggagggcacctctgagtccgccacccccgagagcggccctggcacctccaccgagcccagcgagggcagcgcacccggcagccctgccggcagccccacctccacagaggagggaaccagcaccgagcccagcgaaggcagcgccccaggcaccagcaccgagcctagtgagcaggagattaaacggatcaacaagatcagaagaagacttgtgaaagacagcaacaccaagaaggccggcaagacaggccccatgaaaaccctgctggttagagtgatgacacccgatctgagagagcggctggaaaacctgagaaagaagcctgaaaatatcccccagcccatcagcaatacatctagagccaacctgaataagctgctgaccgattacaccgaaatgaagaaggcgatcctgcatgtgtactgggaagagttccagaaggaccctgtgggcctgatgagccgggtggcccagcctgccagcaagaagatcgatcagaacaagctgaaacctgagatggacgagaagggcaacctgaccaccgccggctttgcctgctctcagtgtggccagcccctgttcgtgtacaagctggagcaggtgtctgagaagggcaaggcttacaccaactacttcggacggtgcaatgtggccgagcacgaaaagctgatcctgctggcccagctgaagcccgagaaggatagcgacgaagccgtgacatatagcctgggaaagtttgggcagagggccctggatttctacagcattcatgtgaccaaggagtccacccaccccgtgaagcccctggcccagatcgccggaaacagatacgcctccggacctgtgggaaaggccctgagcgacgcatgtatgggcacaatcgcctccttcctgtctaagtaccaggacatcatcatcgaacaccagaaggtggtgaagggcaaccagaagagactggagagcctgcgggagctggccggcaaggaaaacctggaataccctagcgtgaccctgccacctcagcctcacaccaaggagggcgttgatgcctacaacgaagtgatcgcccgggtgcgaatgtgggtgaacctgaacctgtggcagaagctgaagctaagcagagatgatgccaagcctctgctgagactgaagggattcccttcctttcctctggtcgagagacaggccaacgaagtggactggtgggacatggtgtgtaacgtgaagaagctgatcaacgagaaaaaggaggatggcaaggtgttttggcagaatctggctggctacaagagacaggaagccctgagaccatacctgagcagcgaggaagatcggaagaagggaaagaaattcgctcggtaccagctgggcgacctgctgctgcacctggaaaagaagcacggcgaggactggggaaaggtgtacgacgaggcctgggagcggattgacaagaaagtggaaggcctgagcaagcacatcaagctggaagaggaacggagaagcgaggacgcccagagcaaggccgccctgaccgactggctgcgggctaaggccagcttcgtgatcgagggcctgaaggaggccgacaaggacgagttctgcagatgcgagctgaagctgcagaagtggtacggggacctgcggggaaagcccttcgccatcgaagccgagaacagcatcctggacatcagcggcttcagcaagcagtacaactgtgccttcatctggcagaaggacggcgtgaagaagctgaacctgtacctgatcatcaactacttcaagggcggcaagctgcggttcaagaagatcaaacctgaagccttcgaagccaacagattctacaccgtgatcaacaaaaagagcggcgagatcgtgcccatggaggtgaacttcaacttcgacgaccccaacctgatcatcctgcctctggcctttggcaagagacagggcagagaattcatctggaacgacctgctgtccctggaaaccggcagcctgaagctggccaacggaagagtgatcgagaagacactgtacaacagaagaacccggcaggatgagcctgccctgttcgtggccctgaccttcgagcggcgggaggtcctggactcctccaatatcaaaccaatgaacctgatcggcgtggcaagaggcgaaaacatccccgccgtgatcgccctgaccgaccccgagggctgcccactgagccggtttaaggatagcctgggaaacccaacccacatcctgagaatcggcgagagctataaggagaagcagcggaccatccaggccaagaaggaggtggagcagcggagagccggcggctacagccggaagtacgccagcaaagccaagaatctggcagacgatatggtgagaaacaccgctagagatctgctgtactacgccgtgacccaggatgccatgctgatcttcgccaacctgagccggggcttcggccggcagggcaagcggaccttcatggccgagagacagtacacacggatggaggactggctgaccgccaagctggcctacgagggcctgagcaagacctacctgtccaagacactggcccagtacacctccaagacatgcagcaactgtgggtttaccatcaccagcgccgactacgacagggtgctggagaagctgaagaagacagcaacaggctggatgaccacaattaacggcaaggagctgaaggtggagggccagattacctactacaacagatacaagagacagaacgtagtcaaggacctgtccgtcgagctggatagactgagcgaagaatctgtgaacaacgacatctcctcctggacaaagggcagaagcggagaagctctgagcctcctgaagaaaagattctcccatagacccgtgcaggagaagttcgtgtgcctgaactgcggcttcgagacacacgcagccgagcaagccgccctgaacatcgccagatcctggctgttcctgcggagccaggagtacaagaaataccagacaaacaagacaaccggcaacaccgataagagagccttcgtcgagacctggcagtccttttaccggaagaagcttaaggaggtgtggaaacctgccgtgcggtctggcggatctggcggaggctccaccagccccaagaaaaagagaaaagtctaagctgccttctgcggggcttgccttctggccatgcccttcttctctcccttgcacctgtacctcttggtctttgaataaagcctgagtaggaaggctagcaaaaaaaaaaaaaaaaaaaaaaaaaaaaaaaaaaaaaaaaaaaaaaaaaaaaaaaaaaaaaaaaaaaaaaaaaaaaaaaagcccagccggctccccaacctctaccgaggagggcacctctgagtccgccacccccgagagcggccctggcacctccaccgagcccagcgagggcagcgcacccggcagccctgccggcagccccacctccacagaggagggaaccagcaccgagcccagcgaaggcagcgccccaggcaccagcaccgagcctagtgagcaggagattaaacggatcaacaagatcagaagaagacttgtgaaagacagcaacaccaagaaggccggcaagacaggccccatgaaaaccctgctggttagagtgatgacacccgatctgagagagcggctggaaaacctgagaaagaagcctgaaaatatcccccagcccatcagcaatacatctagagccaacctgaataagctgctgaccgattacaccgaaatgaagaaggcgatcctgcatgtgtactgggaagagttccagaaggaccctgtgggcctgatgagccgggtggcccagcctgccagcaagaagatcgatcagaacaagctgaaacctgagatggacgagaagggcaacctgaccaccgccggctttgcctgctctcagtgtggccagcccctgttcgtgtacaagctggagcaggtgtctgagaagggcaaggcttacaccaactacttcggacggtgcaatgtggccgagcacgaaaagctgatcctgctggcccagctgaagcccgagaaggatagcgacgaagccgtgacatatagcctgggaaagtttgggcagagggccctggatttctacagcattcatgtgaccaaggagtccacccaccccgtgaagcccctggcccagatcgccggaaacagatacgcctccggacctgtgggaaaggccctgagcgacgcatgtatgggcacaatcgcctccttcctgtctaagtaccaggacatcatcatcgaacaccagaaggtggtgaagggcaaccagaagagactggagagcctgcgggagctggccggcaaggaaaacctggaataccctagcgtgaccctgccacctcagcctcacaccaaggagggcgttgatgcctacaacgaagtgatcgcccgggtgcgaatgtgggtgaacctgaacctgtggcagaagctgaagctaagcagagatgatgccaagcctctgctgagactgaagggattcccttcctttcctctggtcgagagacaggccaacgaagtggactggtgggacatggtgtgtaacgtgaagaagctgatcaacgagaaaaaggaggatggcaaggtgttttggcagaatctggctggctacaagagacaggaagccctgagaccatacctgagcagcgaggaagatcggaagaagggaaagaaattcgctcggtaccagctgggcgacctgctgctgcacctggaaaagaagcacggcgaggactggggaaaggtgtacgacgaggcctgggagcggattgacaagaaagtggaaggcctgagcaagcacatcaagctggaagaggaacggagaagcgaggacgcccagagcaaggccgccctgaccgactggctgcgggctaaggccagcttcgtgatcgagggcctgaaggaggccgacaaggacgagttctgcagatgcgagctgaagctgcagaagtggtacggggacctgcggggaaagcccttcgccatcgaagccgagaacagcatcctggacatcagcggcttcagcaagcagtacaactgtgccttcatctggcagaaggacggcgtgaagaagctgaacctgtacctgatcatcaactacttcaagggcggcaagctgcggttcaagaagatcaaacctgaagccttcgaagccaacagattctacaccgtgatcaacaaaaagagcggcgagatcgtgcccatggaggtgaacttcaacttcgacgaccccaacctgatcatcctgcctctggcctttggcaagagacagggcagagaattcatctggaacgacctgctgtccctggaaaccggcagcctgaagctggccaacggaagagtgatcgagaagacactgtacaacagaagaacccggcaggatgagcctgccctgttcgtggccctgaccttcgagcggcgggaggtcctggactcctccaatatcaaaccaatgaacctgatcggcgtggcaagaggcgaaaacatccccgccgtgatcgccctgaccgaccccgagggctgcccactgagccggtttaaggatagcctgggaaacccaacccacatcctgagaatcggcgagagctataaggagaagcagcggaccatccaggccaagaaggaggtggagcagcggagagccggcggctacagccggaagtacgccagcaaagccaagaatctggcagacgatatggtgagaaacaccgctagagatctgctgtactacgccgtgacccaggatgccatgctgatcttcgccaacctgagccggggcttcggccggcagggcaagcggaccttcatggccgagagacagtacacacggatggaggactggctgaccgccaagctggcctacgagggcctgagcaagacctacctgtccaagacactggcccagtacacctccaagacatgcagcaactgtgggtttaccatcaccagcgccgactacgacagggtgctggagaagctgaagaagacagcaacaggctggatgaccacaattaacggcaaggagctgaaggtggagggccagattacctactacaacagatacaagagacagaacgtagtcaaggacctgtccgtcgagctggatagactgagcgaagaatctgtgaacaacgacatctcctcctggacaaagggcagaagcggagaagctctgagcctcctgaagaaaagattctcccatagacccgtgcaggagaagttcgtgtgcctgaactgcggcttcgagacacacgcagccgagcaagccgccctgaacatcgccagatcctggctgttcctgcggagccaggagtacaagaaataccagacaaacaagacaaccggcaacaccgataagagagccttcgtcgagacctggcagtccttttaccggaagaagcttaaggaggtgtggaaacctgccgtgcggtctggcggatctggcggaggctccaccagccccaagaaaaagagaaaagtctaagctgccttctgcggggcttgccttctggccatgcccttcttctctcccttgcacctgtacctcttggtctttgaataaagcctgagtaggaaggctagcaaaaaaaaaaaaaaaaaaaaaaaaaaaaaaaaaaaaaaaaaaaaaaaaaaaaaaaaaaaaaaaaaaaaaaaaaaaaaaaa

SEQ ID NO: 8948 - RNA, 8787 nt, synthetic construct
  source 1..8787: mol_type = other RNA
aggaaataagagagaaaagaagagtaagaagaaatataagagccaccatggcccctaagaagaagcgtaaagtgagccggatgaaccacgaccaggagttcgacccccctaaggtgtaccctcccgtccccgccgagaagagaaagcccatccgggtcctgagcctgttcgatggcatcgccaccggtctgctggtgctgaaggacctgggcatccaggtggataggtacattgcctccgaggtgtgcgaggactccatcaccgtgggaatggtgcgtcatcagggcaagatcatgtacgtgggcgacgtgcggagcgtgacacagaagcatatccaggagtggggccctttcgacctggtgatcggcggcagcccttgcaatgacctgagcatcgtgaacccagcccggaagggcctgtacgagggaaccggcagactgttcttcgagttttacagactgctgcacgacgcccggcctaaggaaggcgacgaccggcccttcttttggctgttcgagaatgtggtggccatgggagtcagcgacaagcgggatattagccggttcctggagagcaaccccgtgatgatcgatgccaaggaagtgagcgccgcccaccgggccagatacttctggggcaatctgcctggcatgaacagacccctggccagcaccgtgaacgacaagctggagctgcaggagtgcctggagcacggccggatcgccaagttcagcaaggtgagaaccatcaccacccgaagcaacagcatcaaacaaggcaaggaccagcactttcctgtgttcatgaacgagaaggaggacatcctgtggtgtaccgagatggagagagtgttcgggttcccagtccactacacagatgtcagcaacatgtctagactggccagacagagactgctgggaagaagctggtccgtccctgtgatcagacacctgttcgcccctctgaaggagtacttcgcctgcgtgagcagcggcaacagcaacgccaacagccggggccccagcttctctagcggcctggtgccactgtccctgagagggagccacatgggccccatggagatctacaaaaccgtgagcgcctggaagcggcagcctgtgcgcgtgctgagcctgtttcggaatatcgataaagtcctgaaaagcctgggattcctggagagcggctctggctccggcggtggcaccctgaagtacgtggaggatgtgacaaacgtggtcagacgggatgtggagaagtggggccccttcgatctggtgtacggcagcacccaacccctgggcagctcttgtgaccggtgccctggctggtacatgtttcagttccaccggatcctgcagtacgccctgccgagacaggagtcccagcggccattcttttggattttcatggacaacttgctgctgaccgaggatgaccaggaaactaccactcggttcctgcagaccgaagccgtgaccctgcaggacgtgagaggccgggactaccagaacgccatgcgggtgtggtccaacatccctggactgaaaagcaagcacgcacctctgacccctaaagaagaggagtacctgcaggcccaggtgcggagcagaagcaagctggacgcccctaaggtggatctgctggtgaagaattgcctcctgcccctgagagagtacttcaagtatttcagccagaatagtctgcccctgggaggcagcggcggcggcgcccacagcatggtgatgttcagggacgtgaccgtggacttcagccaggaggagtgggagtgcctgagcagctacgagagggacctgtacagggacgtgatgctggagaactacagccacctggtgagcctgggctgcagcatcagcaagcccgacgtgatcaccctgctggagcagggcaaggagccctggatgatcgtgagggccgagaagaggaggtggagcagggacctggagagcaggggcggcccaagcagcggcgcccctcctcccagcggcggcaggcggcccaagcagcggcgcccctcctcccagcggcggcagcccagccggctccccaacctctaccgaggagggcacctctgagtccgccacccccgagagcggccctggcacctccaccgagcccagcgagggcagcgcacccggcagccctgccggcagccccacctccacagaggagggaaccagcaccgagcccagcgaaggcagcgccccaggcaccagcaccgagcctagtgagcaggagattaaacggatcaacaagatcagaagaagacttgtgaaagacagcaacaccaagaaggccggcaagacaggccccatgaaaaccctgctggttagagtgatgacacccgatctgagagagcggctggaaaacctgagaaagaagcctgaaaatatcccccagcccatcagcaatacatctagagccaacctgaataagctgctgaccgattacaccgaaatgaagaaggcgatcctgcatgtgtactgggaagagttccagaaggaccctgtgggcctgatgagccgggtggcccagcctgccagcaagaagatcgatcagaacaagctgaaacctgagatggacgagaagggcaacctgaccaccgccggctttgcctgctctcagtgtggccagcccctgttcgtgtacaagctggagcaggtgtctgagaagggcaaggcttacaccaactacttcggacggtgcaatgtggccgagcacgaaaagctgatcctgctggcccagctgaagcccgagaaggatagcgacgaagccgtgacatatagcctgggaaagtttgggcagagggccctggatttctacagcattcatgtgaccaaggagtccacccaccccgtgaagcccctggcccagatcgccggaaacagatacgcctccggacctgtgggaaaggccctgagcgacgcatgtatgggcacaatcgcctccttcctgtctaagtaccaggacatcatcatcgaacaccagaaggtggtgaagggcaaccagaagagactggagagcctgcgggagctggccggcaaggaaaacctggaataccctagcgtgaccctgccacctcagcctcacaccaaggagggcgttgatgcctacaacgaagtgatcgcccgggtgcgaatgtgggtgaacctgaacctgtggcagaagctgaagctaagcagagatgatgccaagcctctgctgagactgaagggattcccttcctttcctctggtcgagagacaggccaacgaagtggactggtgggacatggtgtgtaacgtgaagaagctgatcaacgagaaaaaggaggatggcaaggtgttttggcagaatctggctggctacaagagacaggaagccctgagaccatacctgagcagcgaggaagatcggaagaagggaaagaaattcgctcggtaccagctgggcgacctgctgctgcacctggaaaagaagcacggcgaggactggggaaaggtgtacgacgaggcctgggagcggattgacaagaaagtggaaggcctgagcaagcacatcaagctggaagaggaacggagaagcgaggacgcccagagcaaggccgccctgaccgactggctgcgggctaaggccagcttcgtgatcgagggcctgaaggaggccgacaaggacgagttctgcagatgcgagctgaagctgcagaagtggtacggggacctgcggggaaagcccttcgccatcgaagccgagaacagcatcctggacatcagcggcttcagcaagcagtacaactgtgccttcatctggcagaaggacggcgtgaagaagctgaacctgtacctgatcatcaactacttcaagggcggcaagctgcggttcaagaagatcaaacctgaagccttcgaagccaacagattctacaccgtgatcaacaaaaagagcggcgagatcgtgcccatggaggtgaacttcaacttcgacgaccccaacctgatcatcctgcctctggcctttggcaagagacagggcagagaattcatctggaacgacctgctgtccctggaaaccggcagcctgaagctggccaacggaagagtgatcgagaagacactgtacaacagaagaacccggcaggatgagcctgccctgttcgtggccctgaccttcgagcggcgggaggtcctggactcctccaatatcaaaccaatgaacctgatcggcgtggcaagaggcgaaaacatccccgccgtgatcgccctgaccgaccccgagggctgcccactgagccggtttaaggatagcctgggaaacccaacccacatcctgagaatcggcgagagctataaggagaagcagcggaccatccaggccaagaaggaggtggagcagcggagagccggcggctacagccggaagtacgccagcaaagccaagaatctggcagacgatatggtgagaaacaccgctagagatctgctgtactacgccgtgacccaggatgccatgctgatcttcgccaacctgagccggggcttcggccggcagggcaagcggaccttcatggccgagagacagtacacacggatggaggactggctgaccgccaagctggcctacgagggcctgagcaagacctacctgtccaagacactggcccagtacacctccaagacatgcagcaactgtgggtttaccatcaccagcgccgactacgacagggtgctggagaagctgaagaagacagcaacaggctggatgaccacaattaacggcaaggagctgaaggtggagggccagattacctactacaacagatacaagagacagaacgtagtcaaggacctgtccgtcgagctggatagactgagcgaagaatctgtgaacaacgacatctcctcctggacaaagggcagaagcggagaagctctgagcctcctgaagaaaagattctcccatagacccgtgcaggagaagttcgtgtgcctgaactgcggcttcgagacacacgcagccgagcaagccgccctgaacatcgccagatcctggctgttcctgcggagccaggagtacaagaaataccagacaaacaagacaaccggcaacaccgataagagagccttcgtcgagacctggcagtccttttaccggaagaagcttaaggaggtgtggaaacctgccgtgcggtctggcggatctggcggaggctccaccagccccaagaaaaagagaaaagtctaagctgccttctgcggggcttgccttctggccatgcccttcttctctcccttgcacctgtacctcttggtctttgaataaagcctgagtaggaaggctagcaaaaaaaaaaaaaaaaaaaaaaaaaaaaaaaaaaaaaaaaaaaaaaaaaaaaaaaaaaaaaaaaaaaaaaaaaaaaaaaagcccagccggctccccaacctctaccgaggagggcacctctgagtccgccacccccgagagcggccctggcacctccaccgagcccagcgagggcagcgcacccggcagccctgccggcagccccacctccacagaggagggaaccagcaccgagcccagcgaaggcagcgccccaggcaccagcaccgagcctagtgagcaggagattaaacggatcaacaagatcagaagaagacttgtgaaagacagcaacaccaagaaggccggcaagacaggccccatgaaaaccctgctggttagagtgatgacacccgatctgagagagcggctggaaaacctgagaaagaagcctgaaaatatcccccagcccatcagcaatacatctagagccaacctgaataagctgctgaccgattacaccgaaatgaagaaggcgatcctgcatgtgtactgggaagagttccagaaggaccctgtgggcctgatgagccgggtggcccagcctgccagcaagaagatcgatcagaacaagctgaaacctgagatggacgagaagggcaacctgaccaccgccggctttgcctgctctcagtgtggccagcccctgttcgtgtacaagctggagcaggtgtctgagaagggcaaggcttacaccaactacttcggacggtgcaatgtggccgagcacgaaaagctgatcctgctggcccagctgaagcccgagaaggatagcgacgaagccgtgacatatagcctgggaaagtttgggcagagggccctggatttctacagcattcatgtgaccaaggagtccacccaccccgtgaagcccctggcccagatcgccggaaacagatacgcctccggacctgtgggaaaggccctgagcgacgcatgtatgggcacaatcgcctccttcctgtctaagtaccaggacatcatcatcgaacaccagaaggtggtgaagggcaaccagaagagactggagagcctgcgggagctggccggcaaggaaaacctggaataccctagcgtgaccctgccacctcagcctcacaccaaggagggcgttgatgcctacaacgaagtgatcgcccgggtgcgaatgtgggtgaacctgaacctgtggcagaagctgaagctaagcagagatgatgccaagcctctgctgagactgaagggattcccttcctttcctctggtcgagagacaggccaacgaagtggactggtgggacatggtgtgtaacgtgaagaagctgatcaacgagaaaaaggaggatggcaaggtgttttggcagaatctggctggctacaagagacaggaagccctgagaccatacctgagcagcgaggaagatcggaagaagggaaagaaattcgctcggtaccagctgggcgacctgctgctgcacctggaaaagaagcacggcgaggactggggaaaggtgtacgacgaggcctgggagcggattgacaagaaagtggaaggcctgagcaagcacatcaagctggaagaggaacggagaagcgaggacgcccagagcaaggccgccctgaccgactggctgcgggctaaggccagcttcgtgatcgagggcctgaaggaggccgacaaggacgagttctgcagatgcgagctgaagctgcagaagtggtacggggacctgcggggaaagcccttcgccatcgaagccgagaacagcatcctggacatcagcggcttcagcaagcagtacaactgtgccttcatctggcagaaggacggcgtgaagaagctgaacctgtacctgatcatcaactacttcaagggcggcaagctgcggttcaagaagatcaaacctgaagccttcgaagccaacagattctacaccgtgatcaacaaaaagagcggcgagatcgtgcccatggaggtgaacttcaacttcgacgaccccaacctgatcatcctgcctctggcctttggcaagagacagggcagagaattcatctggaacgacctgctgtccctggaaaccggcagcctgaagctggccaacggaagagtgatcgagaagacactgtacaacagaagaacccggcaggatgagcctgccctgttcgtggccctgaccttcgagcggcgggaggtcctggactcctccaatatcaaaccaatgaacctgatcggcgtggcaagaggcgaaaacatccccgccgtgatcgccctgaccgaccccgagggctgcccactgagccggtttaaggatagcctgggaaacccaacccacatcctgagaatcggcgagagctataaggagaagcagcggaccatccaggccaagaaggaggtggagcagcggagagccggcggctacagccggaagtacgccagcaaagccaagaatctggcagacgatatggtgagaaacaccgctagagatctgctgtactacgccgtgacccaggatgccatgctgatcttcgccaacctgagccggggcttcggccggcagggcaagcggaccttcatggccgagagacagtacacacggatggaggactggctgaccgccaagctggcctacgagggcctgagcaagacctacctgtccaagacactggcccagtacacctccaagacatgcagcaactgtgggtttaccatcaccagcgccgactacgacagggtgctggagaagctgaagaagacagcaacaggctggatgaccacaattaacggcaaggagctgaaggtggagggccagattacctactacaacagatacaagagacagaacgtagtcaaggacctgtccgtcgagctggatagactgagcgaagaatctgtgaacaacgacatctcctcctggacaaagggcagaagcggagaagctctgagcctcctgaagaaaagattctcccatagacccgtgcaggagaagttcgtgtgcctgaactgcggcttcgagacacacgcagccgagcaagccgccctgaacatcgccagatcctggctgttcctgcggagccaggagtacaagaaataccagacaaacaagacaaccggcaacaccgataagagagccttcgtcgagacctggcagtccttttaccggaagaagcttaaggaggtgtggaaacctgccgtgcggtctggcggatctggcggaggctccaccagccccaagaaaaagagaaaagtctaagctgccttctgcggggcttgccttctggccatgcccttcttctctcccttgcacctgtacctcttggtctttgaataaagcctgagtaggaaggctagcaaaaaaaaaaaaaaaaaaaaaaaaaaaaaaaaaaaaaaaaaaaaaaaaaaaaaaaaaaaaaaaaaaaaaaaaaaaaaaaa

SEQ ID NO: 8949 - RNA, 8787 nt, synthetic construct
  source 1..8787: mol_type = other RNA
aggaaataagagagaaaagaagagtaagaagaaatataagagccaccatggcccctaagaagaagcgtaaagtgagccggatgaaccacgaccaggagttcgacccccctaaggtgtaccctcccgtccccgccgagaagagaaagcccatccgggtcctgagcctgttcgatggcatcgccaccggtctgctggtgctgaaggacctgggcatccaggtggataggtacattgcctccgaggtgtgcgaggactccatcaccgtgggaatggtgcgtcatcagggcaagatcatgtacgtgggcgacgtgcggagcgtgacacagaagcatatccaggagtggggccctttcgacctggtgatcggcggcagcccttgcaatgacctgagcatcgtgaacccagcccggaagggcctgtacgagggaaccggcagactgttcttcgagttttacagactgctgcacgacgcccggcctaaggaaggcgacgaccggcccttcttttggctgttcgagaatgtggtggccatgggagtcagcgacaagcgggatattagccggttcctggagagcaaccccgtgatgatcgatgccaaggaagtgagcgccgcccaccgggccagatacttctggggcaatctgcctggcatgaacagacccctggccagcaccgtgaacgacaagctggagctgcaggagtgcctggagcacggccggatcgccaagttcagcaaggtgagaaccatcaccacccgaagcaacagcatcaaacaaggcaaggaccagcactttcctgtgttcatgaacgagaaggaggacatcctgtggtgtaccgagatggagagagtgttcgggttcccagtccactacacagatgtcagcaacatgtctagactggccagacagagactgctgggaagaagctggtccgtccctgtgatcagacacctgttcgcccctctgaaggagtacttcgcctgcgtgagcagcggcaacagcaacgccaacagccggggccccagcttctctagcggcctggtgccactgtccctgagagggagccacatgggccccatggagatctacaaaaccgtgagcgcctggaagcggcagcctgtgcgcgtgctgagcctgtttcggaatatcgataaagtcctgaaaagcctgggattcctggagagcggctctggctccggcggtggcaccctgaagtacgtggaggatgtgacaaacgtggtcagacgggatgtggagaagtggggccccttcgatctggtgtacggcagcacccaacccctgggcagctcttgtgaccggtgccctggctggtacatgtttcagttccaccggatcctgcagtacgccctgccgagacaggagtcccagcggccattcttttggattttcatggacaacttgctgctgaccgaggatgaccaggaaactaccactcggttcctgcagaccgaagccgtgaccctgcaggacgtgagaggccgggactaccagaacgccatgcgggtgtggtccaacatccctggactgaaaagcaagcacgcacctctgacccctaaagaagaggagtacctgcaggcccaggtgcggagcagaagcaagctggacgcccctaaggtggatctgctggtgaagaattgcctcctgcccctgagagagtacttcaagtatttcagccagaatagtctgcccctgggaggcagcggcggcggcagcaaggcccccgtgaccttcggcgacctggccatctacttcagccaggaggagtgggagtggctgagccccaaccagaaggacctgtacgaggacgtgatgctggagaactaccacaacctggtgagcgtgggcctggcctgcaggaggcccaacatcatcgccctgctggagaagggcaaggccccctggatggtggagcccagcaggaagaggaggggccccgagctgggcagcaaggacggcggcccaagcagcggcgcccctcctcccagcggcggcaggcggcccaagcagcggcgcccctcctcccagcggcggcagcccagccggctccccaacctctaccgaggagggcacctctgagtccgccacccccgagagcggccctggcacctccaccgagcccagcgagggcagcgcacccggcagccctgccggcagccccacctccacagaggagggaaccagcaccgagcccagcgaaggcagcgccccaggcaccagcaccgagcctagtgagcaggagattaaacggatcaacaagatcagaagaagacttgtgaaagacagcaacaccaagaaggccggcaagacaggccccatgaaaaccctgctggttagagtgatgacacccgatctgagagagcggctggaaaacctgagaaagaagcctgaaaatatcccccagcccatcagcaatacatctagagccaacctgaataagctgctgaccgattacaccgaaatgaagaaggcgatcctgcatgtgtactgggaagagttccagaaggaccctgtgggcctgatgagccgggtggcccagcctgccagcaagaagatcgatcagaacaagctgaaacctgagatggacgagaagggcaacctgaccaccgccggctttgcctgctctcagtgtggccagcccctgttcgtgtacaagctggagcaggtgtctgagaagggcaaggcttacaccaactacttcggacggtgcaatgtggccgagcacgaaaagctgatcctgctggcccagctgaagcccgagaaggatagcgacgaagccgtgacatatagcctgggaaagtttgggcagagggccctggatttctacagcattcatgtgaccaaggagtccacccaccccgtgaagcccctggcccagatcgccggaaacagatacgcctccggacctgtgggaaaggccctgagcgacgcatgtatgggcacaatcgcctccttcctgtctaagtaccaggacatcatcatcgaacaccagaaggtggtgaagggcaaccagaagagactggagagcctgcgggagctggccggcaaggaaaacctggaataccctagcgtgaccctgccacctcagcctcacaccaaggagggcgttgatgcctacaacgaagtgatcgcccgggtgcgaatgtgggtgaacctgaacctgtggcagaagctgaagctaagcagagatgatgccaagcctctgctgagactgaagggattcccttcctttcctctggtcgagagacaggccaacgaagtggactggtgggacatggtgtgtaacgtgaagaagctgatcaacgagaaaaaggaggatggcaaggtgttttggcagaatctggctggctacaagagacaggaagccctgagaccatacctgagcagcgaggaagatcggaagaagggaaagaaattcgctcggtaccagctgggcgacctgctgctgcacctggaaaagaagcacggcgaggactggggaaaggtgtacgacgaggcctgggagcggattgacaagaaagtggaaggcctgagcaagcacatcaagctggaagaggaacggagaagcgaggacgcccagagcaaggccgccctgaccgactggctgcgggctaaggccagcttcgtgatcgagggcctgaaggaggccgacaaggacgagttctgcagatgcgagctgaagctgcagaagtggtacggggacctgcggggaaagcccttcgccatcgaagccgagaacagcatcctggacatcagcggcttcagcaagcagtacaactgtgccttcatctggcagaaggacggcgtgaagaagctgaacctgtacctgatcatcaactacttcaagggcggcaagctgcggttcaagaagatcaaacctgaagccttcgaagccaacagattctacaccgtgatcaacaaaaagagcggcgagatcgtgcccatggaggtgaacttcaacttcgacgaccccaacctgatcatcctgcctctggcctttggcaagagacagggcagagaattcatctggaacgacctgctgtccctggaaaccggcagcctgaagctggccaacggaagagtgatcgagaagacactgtacaacagaagaacccggcaggatgagcctgccctgttcgtggccctgaccttcgagcggcgggaggtcctggactcctccaatatcaaaccaatgaacctgatcggcgtggcaagaggcgaaaacatccccgccgtgatcgccctgaccgaccccgagggctgcccactgagccggtttaaggatagcctgggaaacccaacccacatcctgagaatcggcgagagctataaggagaagcagcggaccatccaggccaagaaggaggtggagcagcggagagccggcggctacagccggaagtacgccagcaaagccaagaatctggcagacgatatggtgagaaacaccgctagagatctgctgtactacgccgtgacccaggatgccatgctgatcttcgccaacctgagccggggcttcggccggcagggcaagcggaccttcatggccgagagacagtacacacggatggaggactggctgaccgccaagctggcctacgagggcctgagcaagacctacctgtccaagacactggcccagtacacctccaagacatgcagcaactgtgggtttaccatcaccagcgccgactacgacagggtgctggagaagctgaagaagacagcaacaggctggatgaccacaattaacggcaaggagctgaaggtggagggccagattacctactacaacagatacaagagacagaacgtagtcaaggacctgtccgtcgagctggatagactgagcgaagaatctgtgaacaacgacatctcctcctggacaaagggcagaagcggagaagctctgagcctcctgaagaaaagattctcccatagacccgtgcaggagaagttcgtgtgcctgaactgcggcttcgagacacacgcagccgagcaagccgccctgaacatcgccagatcctggctgttcctgcggagccaggagtacaagaaataccagacaaacaagacaaccggcaacaccgataagagagccttcgtcgagacctggcagtccttttaccggaagaagcttaaggaggtgtggaaacctgccgtgcggtctggcggatctggcggaggctccaccagccccaagaaaaagagaaaagtctaagctgccttctgcggggcttgccttctggccatgcccttcttctctcccttgcacctgtacctcttggtctttgaataaagcctgagtaggaaggctagcaaaaaaaaaaaaaaaaaaaaaaaaaaaaaaaaaaaaaaaaaaaaaaaaaaaaaaaaaaaaaaaaaaaaaaaaaaaaaaaagcccagccggctccccaacctctaccgaggagggcacctctgagtccgccacccccgagagcggccctggcacctccaccgagcccagcgagggcagcgcacccggcagccctgccggcagccccacctccacagaggagggaaccagcaccgagcccagcgaaggcagcgccccaggcaccagcaccgagcctagtgagcaggagattaaacggatcaacaagatcagaagaagacttgtgaaagacagcaacaccaagaaggccggcaagacaggccccatgaaaaccctgctggttagagtgatgacacccgatctgagagagcggctggaaaacctgagaaagaagcctgaaaatatcccccagcccatcagcaatacatctagagccaacctgaataagctgctgaccgattacaccgaaatgaagaaggcgatcctgcatgtgtactgggaagagttccagaaggaccctgtgggcctgatgagccgggtggcccagcctgccagcaagaagatcgatcagaacaagctgaaacctgagatggacgagaagggcaacctgaccaccgccggctttgcctgctctcagtgtggccagcccctgttcgtgtacaagctggagcaggtgtctgagaagggcaaggcttacaccaactacttcggacggtgcaatgtggccgagcacgaaaagctgatcctgctggcccagctgaagcccgagaaggatagcgacgaagccgtgacatatagcctgggaaagtttgggcagagggccctggatttctacagcattcatgtgaccaaggagtccacccaccccgtgaagcccctggcccagatcgccggaaacagatacgcctccggacctgtgggaaaggccctgagcgacgcatgtatgggcacaatcgcctccttcctgtctaagtaccaggacatcatcatcgaacaccagaaggtggtgaagggcaaccagaagagactggagagcctgcgggagctggccggcaaggaaaacctggaataccctagcgtgaccctgccacctcagcctcacaccaaggagggcgttgatgcctacaacgaagtgatcgcccgggtgcgaatgtgggtgaacctgaacctgtggcagaagctgaagctaagcagagatgatgccaagcctctgctgagactgaagggattcccttcctttcctctggtcgagagacaggccaacgaagtggactggtgggacatggtgtgtaacgtgaagaagctgatcaacgagaaaaaggaggatggcaaggtgttttggcagaatctggctggctacaagagacaggaagccctgagaccatacctgagcagcgaggaagatcggaagaagggaaagaaattcgctcggtaccagctgggcgacctgctgctgcacctggaaaagaagcacggcgaggactggggaaaggtgtacgacgaggcctgggagcggattgacaagaaagtggaaggcctgagcaagcacatcaagctggaagaggaacggagaagcgaggacgcccagagcaaggccgccctgaccgactggctgcgggctaaggccagcttcgtgatcgagggcctgaaggaggccgacaaggacgagttctgcagatgcgagctgaagctgcagaagtggtacggggacctgcggggaaagcccttcgccatcgaagccgagaacagcatcctggacatcagcggcttcagcaagcagtacaactgtgccttcatctggcagaaggacggcgtgaagaagctgaacctgtacctgatcatcaactacttcaagggcggcaagctgcggttcaagaagatcaaacctgaagccttcgaagccaacagattctacaccgtgatcaacaaaaagagcggcgagatcgtgcccatggaggtgaacttcaacttcgacgaccccaacctgatcatcctgcctctggcctttggcaagagacagggcagagaattcatctggaacgacctgctgtccctggaaaccggcagcctgaagctggccaacggaagagtgatcgagaagacactgtacaacagaagaacccggcaggatgagcctgccctgttcgtggccctgaccttcgagcggcgggaggtcctggactcctccaatatcaaaccaatgaacctgatcggcgtggcaagaggcgaaaacatccccgccgtgatcgccctgaccgaccccgagggctgcccactgagccggtttaaggatagcctgggaaacccaacccacatcctgagaatcggcgagagctataaggagaagcagcggaccatccaggccaagaaggaggtggagcagcggagagccggcggctacagccggaagtacgccagcaaagccaagaatctggcagacgatatggtgagaaacaccgctagagatctgctgtactacgccgtgacccaggatgccatgctgatcttcgccaacctgagccggggcttcggccggcagggcaagcggaccttcatggccgagagacagtacacacggatggaggactggctgaccgccaagctggcctacgagggcctgagcaagacctacctgtccaagacactggcccagtacacctccaagacatgcagcaactgtgggtttaccatcaccagcgccgactacgacagggtgctggagaagctgaagaagacagcaacaggctggatgaccacaattaacggcaaggagctgaaggtggagggccagattacctactacaacagatacaagagacagaacgtagtcaaggacctgtccgtcgagctggatagactgagcgaagaatctgtgaacaacgacatctcctcctggacaaagggcagaagcggagaagctctgagcctcctgaagaaaagattctcccatagacccgtgcaggagaagttcgtgtgcctgaactgcggcttcgagacacacgcagccgagcaagccgccctgaacatcgccagatcctggctgttcctgcggagccaggagtacaagaaataccagacaaacaagacaaccggcaacaccgataagagagccttcgtcgagacctggcagtccttttaccggaagaagcttaaggaggtgtggaaacctgccgtgcggtctggcggatctggcggaggctccaccagccccaagaaaaagagaaaagtctaagctgccttctgcggggcttgccttctggccatgcccttcttctctcccttgcacctgtacctcttggtctttgaataaagcctgagtaggaaggctagcaaaaaaaaaaaaaaaaaaaaaaaaaaaaaaaaaaaaaaaaaaaaaaaaaaaaaaaaaaaaaaaaaaaaaaaaaaaaaaaa

SEQ ID NO: 8950 - RNA, 8787 nt, synthetic construct
  source 1..8787: mol_type = other RNA
aggaaataagagagaaaagaagagtaagaagaaatataagagccaccatggcccctaagaagaagcgtaaagtgagccggatgaaccacgaccaggagttcgacccccctaaggtgtaccctcccgtccccgccgagaagagaaagcccatccgggtcctgagcctgttcgatggcatcgccaccggtctgctggtgctgaaggacctgggcatccaggtggataggtacattgcctccgaggtgtgcgaggactccatcaccgtgggaatggtgcgtcatcagggcaagatcatgtacgtgggcgacgtgcggagcgtgacacagaagcatatccaggagtggggccctttcgacctggtgatcggcggcagcccttgcaatgacctgagcatcgtgaacccagcccggaagggcctgtacgagggaaccggcagactgttcttcgagttttacagactgctgcacgacgcccggcctaaggaaggcgacgaccggcccttcttttggctgttcgagaatgtggtggccatgggagtcagcgacaagcgggatattagccggttcctggagagcaaccccgtgatgatcgatgccaaggaagtgagcgccgcccaccgggccagatacttctggggcaatctgcctggcatgaacagacccctggccagcaccgtgaacgacaagctggagctgcaggagtgcctggagcacggccggatcgccaagttcagcaaggtgagaaccatcaccacccgaagcaacagcatcaaacaaggcaaggaccagcactttcctgtgttcatgaacgagaaggaggacatcctgtggtgtaccgagatggagagagtgttcgggttcccagtccactacacagatgtcagcaacatgtctagactggccagacagagactgctgggaagaagctggtccgtccctgtgatcagacacctgttcgcccctctgaaggagtacttcgcctgcgtgagcagcggcaacagcaacgccaacagccggggccccagcttctctagcggcctggtgccactgtccctgagagggagccacatgggccccatggagatctacaaaaccgtgagcgcctggaagcggcagcctgtgcgcgtgctgagcctgtttcggaatatcgataaagtcctgaaaagcctgggattcctggagagcggctctggctccggcggtggcaccctgaagtacgtggaggatgtgacaaacgtggtcagacgggatgtggagaagtggggccccttcgatctggtgtacggcagcacccaacccctgggcagctcttgtgaccggtgccctggctggtacatgtttcagttccaccggatcctgcagtacgccctgccgagacaggagtcccagcggccattcttttggattttcatggacaacttgctgctgaccgaggatgaccaggaaactaccactcggttcctgcagaccgaagccgtgaccctgcaggacgtgagaggccgggactaccagaacgccatgcgggtgtggtccaacatccctggactgaaaagcaagcacgcacctctgacccctaaagaagaggagtacctgcaggcccaggtgcggagcagaagcaagctggacgcccctaaggtggatctgctggtgaagaattgcctcctgcccctgagagagtacttcaagtatttcagccagaatagtctgcccctgggaggcagcggcggcggcatggtgagcttcgaggacgtggccgtgctgctgagccaggaggagtgggactgcctgatccccgcccagaggggcctgtacagggacgtgatgctggagacctacggcaacctggtgagcctgggcctgcaggccagcaagcccgacgtgatcagcaggctggagcagggcgacgagccctggaccccccacatcctgaggacccagaggagctggagctggaggcacaagagggagtgctacggcggcccaagcagcggcgcccctcctcccagcggcggcaggcggcccaagcagcggcgcccctcctcccagcggcggcagcccagccggctccccaacctctaccgaggagggcacctctgagtccgccacccccgagagcggccctggcacctccaccgagcccagcgagggcagcgcacccggcagccctgccggcagccccacctccacagaggagggaaccagcaccgagcccagcgaaggcagcgccccaggcaccagcaccgagcctagtgagcaggagattaaacggatcaacaagatcagaagaagacttgtgaaagacagcaacaccaagaaggccggcaagacaggccccatgaaaaccctgctggttagagtgatgacacccgatctgagagagcggctggaaaacctgagaaagaagcctgaaaatatcccccagcccatcagcaatacatctagagccaacctgaataagctgctgaccgattacaccgaaatgaagaaggcgatcctgcatgtgtactgggaagagttccagaaggaccctgtgggcctgatgagccgggtggcccagcctgccagcaagaagatcgatcagaacaagctgaaacctgagatggacgagaagggcaacctgaccaccgccggctttgcctgctctcagtgtggccagcccctgttcgtgtacaagctggagcaggtgtctgagaagggcaaggcttacaccaactacttcggacggtgcaatgtggccgagcacgaaaagctgatcctgctggcccagctgaagcccgagaaggatagcgacgaagccgtgacatatagcctgggaaagtttgggcagagggccctggatttctacagcattcatgtgaccaaggagtccacccaccccgtgaagcccctggcccagatcgccggaaacagatacgcctccggacctgtgggaaaggccctgagcgacgcatgtatgggcacaatcgcctccttcctgtctaagtaccaggacatcatcatcgaacaccagaaggtggtgaagggcaaccagaagagactggagagcctgcgggagctggccggcaaggaaaacctggaataccctagcgtgaccctgccacctcagcctcacaccaaggagggcgttgatgcctacaacgaagtgatcgcccgggtgcgaatgtgggtgaacctgaacctgtggcagaagctgaagctaagcagagatgatgccaagcctctgctgagactgaagggattcccttcctttcctctggtcgagagacaggccaacgaagtggactggtgggacatggtgtgtaacgtgaagaagctgatcaacgagaaaaaggaggatggcaaggtgttttggcagaatctggctggctacaagagacaggaagccctgagaccatacctgagcagcgaggaagatcggaagaagggaaagaaattcgctcggtaccagctgggcgacctgctgctgcacctggaaaagaagcacggcgaggactggggaaaggtgtacgacgaggcctgggagcggattgacaagaaagtggaaggcctgagcaagcacatcaagctggaagaggaacggagaagcgaggacgcccagagcaaggccgccctgaccgactggctgcgggctaaggccagcttcgtgatcgagggcctgaaggaggccgacaaggacgagttctgcagatgcgagctgaagctgcagaagtggtacggggacctgcggggaaagcccttcgccatcgaagccgagaacagcatcctggacatcagcggcttcagcaagcagtacaactgtgccttcatctggcagaaggacggcgtgaagaagctgaacctgtacctgatcatcaactacttcaagggcggcaagctgcggttcaagaagatcaaacctgaagccttcgaagccaacagattctacaccgtgatcaacaaaaagagcggcgagatcgtgcccatggaggtgaacttcaacttcgacgaccccaacctgatcatcctgcctctggcctttggcaagagacagggcagagaattcatctggaacgacctgctgtccctggaaaccggcagcctgaagctggccaacggaagagtgatcgagaagacactgtacaacagaagaacccggcaggatgagcctgccctgttcgtggccctgaccttcgagcggcgggaggtcctggactcctccaatatcaaaccaatgaacctgatcggcgtggcaagaggcgaaaacatccccgccgtgatcgccctgaccgaccccgagggctgcccactgagccggtttaaggatagcctgggaaacccaacccacatcctgagaatcggcgagagctataaggagaagcagcggaccatccaggccaagaaggaggtggagcagcggagagccggcggctacagccggaagtacgccagcaaagccaagaatctggcagacgatatggtgagaaacaccgctagagatctgctgtactacgccgtgacccaggatgccatgctgatcttcgccaacctgagccggggcttcggccggcagggcaagcggaccttcatggccgagagacagtacacacggatggaggactggctgaccgccaagctggcctacgagggcctgagcaagacctacctgtccaagacactggcccagtacacctccaagacatgcagcaactgtgggtttaccatcaccagcgccgactacgacagggtgctggagaagctgaagaagacagcaacaggctggatgaccacaattaacggcaaggagctgaaggtggagggccagattacctactacaacagatacaagagacagaacgtagtcaaggacctgtccgtcgagctggatagactgagcgaagaatctgtgaacaacgacatctcctcctggacaaagggcagaagcggagaagctctgagcctcctgaagaaaagattctcccatagacccgtgcaggagaagttcgtgtgcctgaactgcggcttcgagacacacgcagccgagcaagccgccctgaacatcgccagatcctggctgttcctgcggagccaggagtacaagaaataccagacaaacaagacaaccggcaacaccgataagagagccttcgtcgagacctggcagtccttttaccggaagaagcttaaggaggtgtggaaacctgccgtgcggtctggcggatctggcggaggctccaccagccccaagaaaaagagaaaagtctaagctgccttctgcggggcttgccttctggccatgcccttcttctctcccttgcacctgtacctcttggtctttgaataaagcctgagtaggaaggctagcaaaaaaaaaaaaaaaaaaaaaaaaaaaaaaaaaaaaaaaaaaaaaaaaaaaaaaaaaaaaaaaaaaaaaaaaaaaaaaaagcccagccggctccccaacctctaccgaggagggcacctctgagtccgccacccccgagagcggccctggcacctccaccgagcccagcgagggcagcgcacccggcagccctgccggcagccccacctccacagaggagggaaccagcaccgagcccagcgaaggcagcgccccaggcaccagcaccgagcctagtgagcaggagattaaacggatcaacaagatcagaagaagacttgtgaaagacagcaacaccaagaaggccggcaagacaggccccatgaaaaccctgctggttagagtgatgacacccgatctgagagagcggctggaaaacctgagaaagaagcctgaaaatatcccccagcccatcagcaatacatctagagccaacctgaataagctgctgaccgattacaccgaaatgaagaaggcgatcctgcatgtgtactgggaagagttccagaaggaccctgtgggcctgatgagccgggtggcccagcctgccagcaagaagatcgatcagaacaagctgaaacctgagatggacgagaagggcaacctgaccaccgccggctttgcctgctctcagtgtggccagcccctgttcgtgtacaagctggagcaggtgtctgagaagggcaaggcttacaccaactacttcggacggtgcaatgtggccgagcacgaaaagctgatcctgctggcccagctgaagcccgagaaggatagcgacgaagccgtgacatatagcctgggaaagtttgggcagagggccctggatttctacagcattcatgtgaccaaggagtccacccaccccgtgaagcccctggcccagatcgccggaaacagatacgcctccggacctgtgggaaaggccctgagcgacgcatgtatgggcacaatcgcctccttcctgtctaagtaccaggacatcatcatcgaacaccagaaggtggtgaagggcaaccagaagagactggagagcctgcgggagctggccggcaaggaaaacctggaataccctagcgtgaccctgccacctcagcctcacaccaaggagggcgttgatgcctacaacgaagtgatcgcccgggtgcgaatgtgggtgaacctgaacctgtggcagaagctgaagctaagcagagatgatgccaagcctctgctgagactgaagggattcccttcctttcctctggtcgagagacaggccaacgaagtggactggtgggacatggtgtgtaacgtgaagaagctgatcaacgagaaaaaggaggatggcaaggtgttttggcagaatctggctggctacaagagacaggaagccctgagaccatacctgagcagcgaggaagatcggaagaagggaaagaaattcgctcggtaccagctgggcgacctgctgctgcacctggaaaagaagcacggcgaggactggggaaaggtgtacgacgaggcctgggagcggattgacaagaaagtggaaggcctgagcaagcacatcaagctggaagaggaacggagaagcgaggacgcccagagcaaggccgccctgaccgactggctgcgggctaaggccagcttcgtgatcgagggcctgaaggaggccgacaaggacgagttctgcagatgcgagctgaagctgcagaagtggtacggggacctgcggggaaagcccttcgccatcgaagccgagaacagcatcctggacatcagcggcttcagcaagcagtacaactgtgccttcatctggcagaaggacggcgtgaagaagctgaacctgtacctgatcatcaactacttcaagggcggcaagctgcggttcaagaagatcaaacctgaagccttcgaagccaacagattctacaccgtgatcaacaaaaagagcggcgagatcgtgcccatggaggtgaacttcaacttcgacgaccccaacctgatcatcctgcctctggcctttggcaagagacagggcagagaattcatctggaacgacctgctgtccctggaaaccggcagcctgaagctggccaacggaagagtgatcgagaagacactgtacaacagaagaacccggcaggatgagcctgccctgttcgtggccctgaccttcgagcggcgggaggtcctggactcctccaatatcaaaccaatgaacctgatcggcgtggcaagaggcgaaaacatccccgccgtgatcgccctgaccgaccccgagggctgcccactgagccggtttaaggatagcctgggaaacccaacccacatcctgagaatcggcgagagctataaggagaagcagcggaccatccaggccaagaaggaggtggagcagcggagagccggcggctacagccggaagtacgccagcaaagccaagaatctggcagacgatatggtgagaaacaccgctagagatctgctgtactacgccgtgacccaggatgccatgctgatcttcgccaacctgagccggggcttcggccggcagggcaagcggaccttcatggccgagagacagtacacacggatggaggactggctgaccgccaagctggcctacgagggcctgagcaagacctacctgtccaagacactggcccagtacacctccaagacatgcagcaactgtgggtttaccatcaccagcgccgactacgacagggtgctggagaagctgaagaagacagcaacaggctggatgaccacaattaacggcaaggagctgaaggtggagggccagattacctactacaacagatacaagagacagaacgtagtcaaggacctgtccgtcgagctggatagactgagcgaagaatctgtgaacaacgacatctcctcctggacaaagggcagaagcggagaagctctgagcctcctgaagaaaagattctcccatagacccgtgcaggagaagttcgtgtgcctgaactgcggcttcgagacacacgcagccgagcaagccgccctgaacatcgccagatcctggctgttcctgcggagccaggagtacaagaaataccagacaaacaagacaaccggcaacaccgataagagagccttcgtcgagacctggcagtccttttaccggaagaagcttaaggaggtgtggaaacctgccgtgcggtctggcggatctggcggaggctccaccagccccaagaaaaagagaaaagtctaagctgccttctgcggggcttgccttctggccatgcccttcttctctcccttgcacctgtacctcttggtctttgaataaagcctgagtaggaaggctagcaaaaaaaaaaaaaaaaaaaaaaaaaaaaaaaaaaaaaaaaaaaaaaaaaaaaaaaaaaaaaaaaaaaaaaaaaaaaaaaa

SEQ ID NO: 8951 - RNA, 8787 nt, synthetic construct
  source 1..8787: mol_type = other RNA
aggaaataagagagaaaagaagagtaagaagaaatataagagccaccatggcccctaagaagaagcgtaaagtgagccggatgaaccacgaccaggagttcgacccccctaaggtgtaccctcccgtccccgccgagaagagaaagcccatccgggtcctgagcctgttcgatggcatcgccaccggtctgctggtgctgaaggacctgggcatccaggtggataggtacattgcctccgaggtgtgcgaggactccatcaccgtgggaatggtgcgtcatcagggcaagatcatgtacgtgggcgacgtgcggagcgtgacacagaagcatatccaggagtggggccctttcgacctggtgatcggcggcagcccttgcaatgacctgagcatcgtgaacccagcccggaagggcctgtacgagggaaccggcagactgttcttcgagttttacagactgctgcacgacgcccggcctaaggaaggcgacgaccggcccttcttttggctgttcgagaatgtggtggccatgggagtcagcgacaagcgggatattagccggttcctggagagcaaccccgtgatgatcgatgccaaggaagtgagcgccgcccaccgggccagatacttctggggcaatctgcctggcatgaacagacccctggccagcaccgtgaacgacaagctggagctgcaggagtgcctggagcacggccggatcgccaagttcagcaaggtgagaaccatcaccacccgaagcaacagcatcaaacaaggcaaggaccagcactttcctgtgttcatgaacgagaaggaggacatcctgtggtgtaccgagatggagagagtgttcgggttcccagtccactacacagatgtcagcaacatgtctagactggccagacagagactgctgggaagaagctggtccgtccctgtgatcagacacctgttcgcccctctgaaggagtacttcgcctgcgtgagcagcggcaacagcaacgccaacagccggggccccagcttctctagcggcctggtgccactgtccctgagagggagccacatgggccccatggagatctacaaaaccgtgagcgcctggaagcggcagcctgtgcgcgtgctgagcctgtttcggaatatcgataaagtcctgaaaagcctgggattcctggagagcggctctggctccggcggtggcaccctgaagtacgtggaggatgtgacaaacgtggtcagacgggatgtggagaagtggggccccttcgatctggtgtacggcagcacccaacccctgggcagctcttgtgaccggtgccctggctggtacatgtttcagttccaccggatcctgcagtacgccctgccgagacaggagtcccagcggccattcttttggattttcatggacaacttgctgctgaccgaggatgaccaggaaactaccactcggttcctgcagaccgaagccgtgaccctgcaggacgtgagaggccgggactaccagaacgccatgcgggtgtggtccaacatccctggactgaaaagcaagcacgcacctctgacccctaaagaagaggagtacctgcaggcccaggtgcggagcagaagcaagctggacgcccctaaggtggatctgctggtgaagaattgcctcctgcccctgagagagtacttcaagtatttcagccagaatagtctgcccctgggaggcagcggcggcggcccccagaagagcgtgaccttcgaggacgtggccgtgtacttcacccagaccgagtgggacggcctgagccccgcccagagggccctgtacagggacgtgatgctggagaactacggcaacgtggccagcctgggcttcagcctgctgaagcccgccgtgatcagccagctggagggcgccggcgagctggagggccccagccccctggccgccggcaccgagatcggcccccagggcctgtggggcggcccaagcagcggcgcccctcctcccagcggcggcaggcggcccaagcagcggcgcccctcctcccagcggcggcagcccagccggctccccaacctctaccgaggagggcacctctgagtccgccacccccgagagcggccctggcacctccaccgagcccagcgagggcagcgcacccggcagccctgccggcagccccacctccacagaggagggaaccagcaccgagcccagcgaaggcagcgccccaggcaccagcaccgagcctagtgagcaggagattaaacggatcaacaagatcagaagaagacttgtgaaagacagcaacaccaagaaggccggcaagacaggccccatgaaaaccctgctggttagagtgatgacacccgatctgagagagcggctggaaaacctgagaaagaagcctgaaaatatcccccagcccatcagcaatacatctagagccaacctgaataagctgctgaccgattacaccgaaatgaagaaggcgatcctgcatgtgtactgggaagagttccagaaggaccctgtgggcctgatgagccgggtggcccagcctgccagcaagaagatcgatcagaacaagctgaaacctgagatggacgagaagggcaacctgaccaccgccggctttgcctgctctcagtgtggccagcccctgttcgtgtacaagctggagcaggtgtctgagaagggcaaggcttacaccaactacttcggacggtgcaatgtggccgagcacgaaaagctgatcctgctggcccagctgaagcccgagaaggatagcgacgaagccgtgacatatagcctgggaaagtttgggcagagggccctggatttctacagcattcatgtgaccaaggagtccacccaccccgtgaagcccctggcccagatcgccggaaacagatacgcctccggacctgtgggaaaggccctgagcgacgcatgtatgggcacaatcgcctccttcctgtctaagtaccaggacatcatcatcgaacaccagaaggtggtgaagggcaaccagaagagactggagagcctgcgggagctggccggcaaggaaaacctggaataccctagcgtgaccctgccacctcagcctcacaccaaggagggcgttgatgcctacaacgaagtgatcgcccgggtgcgaatgtgggtgaacctgaacctgtggcagaagctgaagctaagcagagatgatgccaagcctctgctgagactgaagggattcccttcctttcctctggtcgagagacaggccaacgaagtggactggtgggacatggtgtgtaacgtgaagaagctgatcaacgagaaaaaggaggatggcaaggtgttttggcagaatctggctggctacaagagacaggaagccctgagaccatacctgagcagcgaggaagatcggaagaagggaaagaaattcgctcggtaccagctgggcgacctgctgctgcacctggaaaagaagcacggcgaggactggggaaaggtgtacgacgaggcctgggagcggattgacaagaaagtggaaggcctgagcaagcacatcaagctggaagaggaacggagaagcgaggacgcccagagcaaggccgccctgaccgactggctgcgggctaaggccagcttcgtgatcgagggcctgaaggaggccgacaaggacgagttctgcagatgcgagctgaagctgcagaagtggtacggggacctgcggggaaagcccttcgccatcgaagccgagaacagcatcctggacatcagcggcttcagcaagcagtacaactgtgccttcatctggcagaaggacggcgtgaagaagctgaacctgtacctgatcatcaactacttcaagggcggcaagctgcggttcaagaagatcaaacctgaagccttcgaagccaacagattctacaccgtgatcaacaaaaagagcggcgagatcgtgcccatggaggtgaacttcaacttcgacgaccccaacctgatcatcctgcctctggcctttggcaagagacagggcagagaattcatctggaacgacctgctgtccctggaaaccggcagcctgaagctggccaacggaagagtgatcgagaagacactgtacaacagaagaacccggcaggatgagcctgccctgttcgtggccctgaccttcgagcggcgggaggtcctggactcctccaatatcaaaccaatgaacctgatcggcgtggcaagaggcgaaaacatccccgccgtgatcgccctgaccgaccccgagggctgcccactgagccggtttaaggatagcctgggaaacccaacccacatcctgagaatcggcgagagctataaggagaagcagcggaccatccaggccaagaaggaggtggagcagcggagagccggcggctacagccggaagtacgccagcaaagccaagaatctggcagacgatatggtgagaaacaccgctagagatctgctgtactacgccgtgacccaggatgccatgctgatcttcgccaacctgagccggggcttcggccggcagggcaagcggaccttcatggccgagagacagtacacacggatggaggactggctgaccgccaagctggcctacgagggcctgagcaagacctacctgtccaagacactggcccagtacacctccaagacatgcagcaactgtgggtttaccatcaccagcgccgactacgacagggtgctggagaagctgaagaagacagcaacaggctggatgaccacaattaacggcaaggagctgaaggtggagggccagattacctactacaacagatacaagagacagaacgtagtcaaggacctgtccgtcgagctggatagactgagcgaagaatctgtgaacaacgacatctcctcctggacaaagggcagaagcggagaagctctgagcctcctgaagaaaagattctcccatagacccgtgcaggagaagttcgtgtgcctgaactgcggcttcgagacacacgcagccgagcaagccgccctgaacatcgccagatcctggctgttcctgcggagccaggagtacaagaaataccagacaaacaagacaaccggcaacaccgataagagagccttcgtcgagacctggcagtccttttaccggaagaagcttaaggaggtgtggaaacctgccgtgcggtctggcggatctggcggaggctccaccagccccaagaaaaagagaaaagtctaagctgccttctgcggggcttgccttctggccatgcccttcttctctcccttgcacctgtacctcttggtctttgaataaagcctgagtaggaaggctagcaaaaaaaaaaaaaaaaaaaaaaaaaaaaaaaaaaaaaaaaaaaaaaaaaaaaaaaaaaaaaaaaaaaaaaaaaaaaaaaagcccagccggctccccaacctctaccgaggagggcacctctgagtccgccacccccgagagcggccctggcacctccaccgagcccagcgagggcagcgcacccggcagccctgccggcagccccacctccacagaggagggaaccagcaccgagcccagcgaaggcagcgccccaggcaccagcaccgagcctagtgagcaggagattaaacggatcaacaagatcagaagaagacttgtgaaagacagcaacaccaagaaggccggcaagacaggccccatgaaaaccctgctggttagagtgatgacacccgatctgagagagcggctggaaaacctgagaaagaagcctgaaaatatcccccagcccatcagcaatacatctagagccaacctgaataagctgctgaccgattacaccgaaatgaagaaggcgatcctgcatgtgtactgggaagagttccagaaggaccctgtgggcctgatgagccgggtggcccagcctgccagcaagaagatcgatcagaacaagctgaaacctgagatggacgagaagggcaacctgaccaccgccggctttgcctgctctcagtgtggccagcccctgttcgtgtacaagctggagcaggtgtctgagaagggcaaggcttacaccaactacttcggacggtgcaatgtggccgagcacgaaaagctgatcctgctggcccagctgaagcccgagaaggatagcgacgaagccgtgacatatagcctgggaaagtttgggcagagggccctggatttctacagcattcatgtgaccaaggagtccacccaccccgtgaagcccctggcccagatcgccggaaacagatacgcctccggacctgtgggaaaggccctgagcgacgcatgtatgggcacaatcgcctccttcctgtctaagtaccaggacatcatcatcgaacaccagaaggtggtgaagggcaaccagaagagactggagagcctgcgggagctggccggcaaggaaaacctggaataccctagcgtgaccctgccacctcagcctcacaccaaggagggcgttgatgcctacaacgaagtgatcgcccgggtgcgaatgtgggtgaacctgaacctgtggcagaagctgaagctaagcagagatgatgccaagcctctgctgagactgaagggattcccttcctttcctctggtcgagagacaggccaacgaagtggactggtgggacatggtgtgtaacgtgaagaagctgatcaacgagaaaaaggaggatggcaaggtgttttggcagaatctggctggctacaagagacaggaagccctgagaccatacctgagcagcgaggaagatcggaagaagggaaagaaattcgctcggtaccagctgggcgacctgctgctgcacctggaaaagaagcacggcgaggactggggaaaggtgtacgacgaggcctgggagcggattgacaagaaagtggaaggcctgagcaagcacatcaagctggaagaggaacggagaagcgaggacgcccagagcaaggccgccctgaccgactggctgcgggctaaggccagcttcgtgatcgagggcctgaaggaggccgacaaggacgagttctgcagatgcgagctgaagctgcagaagtggtacggggacctgcggggaaagcccttcgccatcgaagccgagaacagcatcctggacatcagcggcttcagcaagcagtacaactgtgccttcatctggcagaaggacggcgtgaagaagctgaacctgtacctgatcatcaactacttcaagggcggcaagctgcggttcaagaagatcaaacctgaagccttcgaagccaacagattctacaccgtgatcaacaaaaagagcggcgagatcgtgcccatggaggtgaacttcaacttcgacgaccccaacctgatcatcctgcctctggcctttggcaagagacagggcagagaattcatctggaacgacctgctgtccctggaaaccggcagcctgaagctggccaacggaagagtgatcgagaagacactgtacaacagaagaacccggcaggatgagcctgccctgttcgtggccctgaccttcgagcggcgggaggtcctggactcctccaatatcaaaccaatgaacctgatcggcgtggcaagaggcgaaaacatccccgccgtgatcgccctgaccgaccccgagggctgcccactgagccggtttaaggatagcctgggaaacccaacccacatcctgagaatcggcgagagctataaggagaagcagcggaccatccaggccaagaaggaggtggagcagcggagagccggcggctacagccggaagtacgccagcaaagccaagaatctggcagacgatatggtgagaaacaccgctagagatctgctgtactacgccgtgacccaggatgccatgctgatcttcgccaacctgagccggggcttcggccggcagggcaagcggaccttcatggccgagagacagtacacacggatggaggactggctgaccgccaagctggcctacgagggcctgagcaagacctacctgtccaagacactggcccagtacacctccaagacatgcagcaactgtgggtttaccatcaccagcgccgactacgacagggtgctggagaagctgaagaagacagcaacaggctggatgaccacaattaacggcaaggagctgaaggtggagggccagattacctactacaacagatacaagagacagaacgtagtcaaggacctgtccgtcgagctggatagactgagcgaagaatctgtgaacaacgacatctcctcctggacaaagggcagaagcggagaagctctgagcctcctgaagaaaagattctcccatagacccgtgcaggagaagttcgtgtgcctgaactgcggcttcgagacacacgcagccgagcaagccgccctgaacatcgccagatcctggctgttcctgcggagccaggagtacaagaaataccagacaaacaagacaaccggcaacaccgataagagagccttcgtcgagacctggcagtccttttaccggaagaagcttaaggaggtgtggaaacctgccgtgcggtctggcggatctggcggaggctccaccagccccaagaaaaagagaaaagtctaagctgccttctgcggggcttgccttctggccatgcccttcttctctcccttgcacctgtacctcttggtctttgaataaagcctgagtaggaaggctagcaaaaaaaaaaaaaaaaaaaaaaaaaaaaaaaaaaaaaaaaaaaaaaaaaaaaaaaaaaaaaaaaaaaaaaaaaaaaaaaa

SEQ ID NO: 8952 - RNA, 8787 nt, synthetic construct
  source 1..8787: mol_type = other RNA
aggaaataagagagaaaagaagagtaagaagaaatataagagccaccatggcccctaagaagaagcgtaaagtgagccggatgaaccacgaccaggagttcgacccccctaaggtgtaccctcccgtccccgccgagaagagaaagcccatccgggtcctgagcctgttcgatggcatcgccaccggtctgctggtgctgaaggacctgggcatccaggtggataggtacattgcctccgaggtgtgcgaggactccatcaccgtgggaatggtgcgtcatcagggcaagatcatgtacgtgggcgacgtgcggagcgtgacacagaagcatatccaggagtggggccctttcgacctggtgatcggcggcagcccttgcaatgacctgagcatcgtgaacccagcccggaagggcctgtacgagggaaccggcagactgttcttcgagttttacagactgctgcacgacgcccggcctaaggaaggcgacgaccggcccttcttttggctgttcgagaatgtggtggccatgggagtcagcgacaagcgggatattagccggttcctggagagcaaccccgtgatgatcgatgccaaggaagtgagcgccgcccaccgggccagatacttctggggcaatctgcctggcatgaacagacccctggccagcaccgtgaacgacaagctggagctgcaggagtgcctggagcacggccggatcgccaagttcagcaaggtgagaaccatcaccacccgaagcaacagcatcaaacaaggcaaggaccagcactttcctgtgttcatgaacgagaaggaggacatcctgtggtgtaccgagatggagagagtgttcgggttcccagtccactacacagatgtcagcaacatgtctagactggccagacagagactgctgggaagaagctggtccgtccctgtgatcagacacctgttcgcccctctgaaggagtacttcgcctgcgtgagcagcggcaacagcaacgccaacagccggggccccagcttctctagcggcctggtgccactgtccctgagagggagccacatgggccccatggagatctacaaaaccgtgagcgcctggaagcggcagcctgtgcgcgtgctgagcctgtttcggaatatcgataaagtcctgaaaagcctgggattcctggagagcggctctggctccggcggtggcaccctgaagtacgtggaggatgtgacaaacgtggtcagacgggatgtggagaagtggggccccttcgatctggtgtacggcagcacccaacccctgggcagctcttgtgaccggtgccctggctggtacatgtttcagttccaccggatcctgcagtacgccctgccgagacaggagtcccagcggccattcttttggattttcatggacaacttgctgctgaccgaggatgaccaggaaactaccactcggttcctgcagaccgaagccgtgaccctgcaggacgtgagaggccgggactaccagaacgccatgcgggtgtggtccaacatccctggactgaaaagcaagcacgcacctctgacccctaaagaagaggagtacctgcaggcccaggtgcggagcagaagcaagctggacgcccctaaggtggatctgctggtgaagaattgcctcctgcccctgagagagtacttcaagtatttcagccagaatagtctgcccctgggaggcagcggcggcggcggcctgctgagcttcgaggacgtggccctgtacttcaccagggaggagtgggacaccctggactgggcccagaaggccctgtacagggacgtgatgctggacaactacaggcacatcgtgagcctgggcttccccttccccaagcccgaggtgatctgccagctggagcagtgggaggagccctggaccctggacctgcccagggccggcaccaggaaggccagcggcagcgcctgccccgacggcggcccaagcagcggcgcccctcctcccagcggcggcaggcggcccaagcagcggcgcccctcctcccagcggcggcagcccagccggctccccaacctctaccgaggagggcacctctgagtccgccacccccgagagcggccctggcacctccaccgagcccagcgagggcagcgcacccggcagccctgccggcagccccacctccacagaggagggaaccagcaccgagcccagcgaaggcagcgccccaggcaccagcaccgagcctagtgagcaggagattaaacggatcaacaagatcagaagaagacttgtgaaagacagcaacaccaagaaggccggcaagacaggccccatgaaaaccctgctggttagagtgatgacacccgatctgagagagcggctggaaaacctgagaaagaagcctgaaaatatcccccagcccatcagcaatacatctagagccaacctgaataagctgctgaccgattacaccgaaatgaagaaggcgatcctgcatgtgtactgggaagagttccagaaggaccctgtgggcctgatgagccgggtggcccagcctgccagcaagaagatcgatcagaacaagctgaaacctgagatggacgagaagggcaacctgaccaccgccggctttgcctgctctcagtgtggccagcccctgttcgtgtacaagctggagcaggtgtctgagaagggcaaggcttacaccaactacttcggacggtgcaatgtggccgagcacgaaaagctgatcctgctggcccagctgaagcccgagaaggatagcgacgaagccgtgacatatagcctgggaaagtttgggcagagggccctggatttctacagcattcatgtgaccaaggagtccacccaccccgtgaagcccctggcccagatcgccggaaacagatacgcctccggacctgtgggaaaggccctgagcgacgcatgtatgggcacaatcgcctccttcctgtctaagtaccaggacatcatcatcgaacaccagaaggtggtgaagggcaaccagaagagactggagagcctgcgggagctggccggcaaggaaaacctggaataccctagcgtgaccctgccacctcagcctcacaccaaggagggcgttgatgcctacaacgaagtgatcgcccgggtgcgaatgtgggtgaacctgaacctgtggcagaagctgaagctaagcagagatgatgccaagcctctgctgagactgaagggattcccttcctttcctctggtcgagagacaggccaacgaagtggactggtgggacatggtgtgtaacgtgaagaagctgatcaacgagaaaaaggaggatggcaaggtgttttggcagaatctggctggctacaagagacaggaagccctgagaccatacctgagcagcgaggaagatcggaagaagggaaagaaattcgctcggtaccagctgggcgacctgctgctgcacctggaaaagaagcacggcgaggactggggaaaggtgtacgacgaggcctgggagcggattgacaagaaagtggaaggcctgagcaagcacatcaagctggaagaggaacggagaagcgaggacgcccagagcaaggccgccctgaccgactggctgcgggctaaggccagcttcgtgatcgagggcctgaaggaggccgacaaggacgagttctgcagatgcgagctgaagctgcagaagtggtacggggacctgcggggaaagcccttcgccatcgaagccgagaacagcatcctggacatcagcggcttcagcaagcagtacaactgtgccttcatctggcagaaggacggcgtgaagaagctgaacctgtacctgatcatcaactacttcaagggcggcaagctgcggttcaagaagatcaaacctgaagccttcgaagccaacagattctacaccgtgatcaacaaaaagagcggcgagatcgtgcccatggaggtgaacttcaacttcgacgaccccaacctgatcatcctgcctctggcctttggcaagagacagggcagagaattcatctggaacgacctgctgtccctggaaaccggcagcctgaagctggccaacggaagagtgatcgagaagacactgtacaacagaagaacccggcaggatgagcctgccctgttcgtggccctgaccttcgagcggcgggaggtcctggactcctccaatatcaaaccaatgaacctgatcggcgtggcaagaggcgaaaacatccccgccgtgatcgccctgaccgaccccgagggctgcccactgagccggtttaaggatagcctgggaaacccaacccacatcctgagaatcggcgagagctataaggagaagcagcggaccatccaggccaagaaggaggtggagcagcggagagccggcggctacagccggaagtacgccagcaaagccaagaatctggcagacgatatggtgagaaacaccgctagagatctgctgtactacgccgtgacccaggatgccatgctgatcttcgccaacctgagccggggcttcggccggcagggcaagcggaccttcatggccgagagacagtacacacggatggaggactggctgaccgccaagctggcctacgagggcctgagcaagacctacctgtccaagacactggcccagtacacctccaagacatgcagcaactgtgggtttaccatcaccagcgccgactacgacagggtgctggagaagctgaagaagacagcaacaggctggatgaccacaattaacggcaaggagctgaaggtggagggccagattacctactacaacagatacaagagacagaacgtagtcaaggacctgtccgtcgagctggatagactgagcgaagaatctgtgaacaacgacatctcctcctggacaaagggcagaagcggagaagctctgagcctcctgaagaaaagattctcccatagacccgtgcaggagaagttcgtgtgcctgaactgcggcttcgagacacacgcagccgagcaagccgccctgaacatcgccagatcctggctgttcctgcggagccaggagtacaagaaataccagacaaacaagacaaccggcaacaccgataagagagccttcgtcgagacctggcagtccttttaccggaagaagcttaaggaggtgtggaaacctgccgtgcggtctggcggatctggcggaggctccaccagccccaagaaaaagagaaaagtctaagctgccttctgcggggcttgccttctggccatgcccttcttctctcccttgcacctgtacctcttggtctttgaataaagcctgagtaggaaggctagcaaaaaaaaaaaaaaaaaaaaaaaaaaaaaaaaaaaaaaaaaaaaaaaaaaaaaaaaaaaaaaaaaaaaaaaaaaaaaaaagcccagccggctccccaacctctaccgaggagggcacctctgagtccgccacccccgagagcggccctggcacctccaccgagcccagcgagggcagcgcacccggcagccctgccggcagccccacctccacagaggagggaaccagcaccgagcccagcgaaggcagcgccccaggcaccagcaccgagcctagtgagcaggagattaaacggatcaacaagatcagaagaagacttgtgaaagacagcaacaccaagaaggccggcaagacaggccccatgaaaaccctgctggttagagtgatgacacccgatctgagagagcggctggaaaacctgagaaagaagcctgaaaatatcccccagcccatcagcaatacatctagagccaacctgaataagctgctgaccgattacaccgaaatgaagaaggcgatcctgcatgtgtactgggaagagttccagaaggaccctgtgggcctgatgagccgggtggcccagcctgccagcaagaagatcgatcagaacaagctgaaacctgagatggacgagaagggcaacctgaccaccgccggctttgcctgctctcagtgtggccagcccctgttcgtgtacaagctggagcaggtgtctgagaagggcaaggcttacaccaactacttcggacggtgcaatgtggccgagcacgaaaagctgatcctgctggcccagctgaagcccgagaaggatagcgacgaagccgtgacatatagcctgggaaagtttgggcagagggccctggatttctacagcattcatgtgaccaaggagtccacccaccccgtgaagcccctggcccagatcgccggaaacagatacgcctccggacctgtgggaaaggccctgagcgacgcatgtatgggcacaatcgcctccttcctgtctaagtaccaggacatcatcatcgaacaccagaaggtggtgaagggcaaccagaagagactggagagcctgcgggagctggccggcaaggaaaacctggaataccctagcgtgaccctgccacctcagcctcacaccaaggagggcgttgatgcctacaacgaagtgatcgcccgggtgcgaatgtgggtgaacctgaacctgtggcagaagctgaagctaagcagagatgatgccaagcctctgctgagactgaagggattcccttcctttcctctggtcgagagacaggccaacgaagtggactggtgggacatggtgtgtaacgtgaagaagctgatcaacgagaaaaaggaggatggcaaggtgttttggcagaatctggctggctacaagagacaggaagccctgagaccatacctgagcagcgaggaagatcggaagaagggaaagaaattcgctcggtaccagctgggcgacctgctgctgcacctggaaaagaagcacggcgaggactggggaaaggtgtacgacgaggcctgggagcggattgacaagaaagtggaaggcctgagcaagcacatcaagctggaagaggaacggagaagcgaggacgcccagagcaaggccgccctgaccgactggctgcgggctaaggccagcttcgtgatcgagggcctgaaggaggccgacaaggacgagttctgcagatgcgagctgaagctgcagaagtggtacggggacctgcggggaaagcccttcgccatcgaagccgagaacagcatcctggacatcagcggcttcagcaagcagtacaactgtgccttcatctggcagaaggacggcgtgaagaagctgaacctgtacctgatcatcaactacttcaagggcggcaagctgcggttcaagaagatcaaacctgaagccttcgaagccaacagattctacaccgtgatcaacaaaaagagcggcgagatcgtgcccatggaggtgaacttcaacttcgacgaccccaacctgatcatcctgcctctggcctttggcaagagacagggcagagaattcatctggaacgacctgctgtccctggaaaccggcagcctgaagctggccaacggaagagtgatcgagaagacactgtacaacagaagaacccggcaggatgagcctgccctgttcgtggccctgaccttcgagcggcgggaggtcctggactcctccaatatcaaaccaatgaacctgatcggcgtggcaagaggcgaaaacatccccgccgtgatcgccctgaccgaccccgagggctgcccactgagccggtttaaggatagcctgggaaacccaacccacatcctgagaatcggcgagagctataaggagaagcagcggaccatccaggccaagaaggaggtggagcagcggagagccggcggctacagccggaagtacgccagcaaagccaagaatctggcagacgatatggtgagaaacaccgctagagatctgctgtactacgccgtgacccaggatgccatgctgatcttcgccaacctgagccggggcttcggccggcagggcaagcggaccttcatggccgagagacagtacacacggatggaggactggctgaccgccaagctggcctacgagggcctgagcaagacctacctgtccaagacactggcccagtacacctccaagacatgcagcaactgtgggtttaccatcaccagcgccgactacgacagggtgctggagaagctgaagaagacagcaacaggctggatgaccacaattaacggcaaggagctgaaggtggagggccagattacctactacaacagatacaagagacagaacgtagtcaaggacctgtccgtcgagctggatagactgagcgaagaatctgtgaacaacgacatctcctcctggacaaagggcagaagcggagaagctctgagcctcctgaagaaaagattctcccatagacccgtgcaggagaagttcgtgtgcctgaactgcggcttcgagacacacgcagccgagcaagccgccctgaacatcgccagatcctggctgttcctgcggagccaggagtacaagaaataccagacaaacaagacaaccggcaacaccgataagagagccttcgtcgagacctggcagtccttttaccggaagaagcttaaggaggtgtggaaacctgccgtgcggtctggcggatctggcggaggctccaccagccccaagaaaaagagaaaagtctaagctgccttctgcggggcttgccttctggccatgcccttcttctctcccttgcacctgtacctcttggtctttgaataaagcctgagtaggaaggctagcaaaaaaaaaaaaaaaaaaaaaaaaaaaaaaaaaaaaaaaaaaaaaaaaaaaaaaaaaaaaaaaaaaaaaaaaaaaaaaaa

SEQ ID NO: 8953 - RNA, 8787 nt, synthetic construct
  source 1..8787: mol_type = other RNA
aggaaataagagagaaaagaagagtaagaagaaatataagagccaccatggcccctaagaagaagcgtaaagtgagccggatgaaccacgaccaggagttcgacccccctaaggtgtaccctcccgtccccgccgagaagagaaagcccatccgggtcctgagcctgttcgatggcatcgccaccggtctgctggtgctgaaggacctgggcatccaggtggataggtacattgcctccgaggtgtgcgaggactccatcaccgtgggaatggtgcgtcatcagggcaagatcatgtacgtgggcgacgtgcggagcgtgacacagaagcatatccaggagtggggccctttcgacctggtgatcggcggcagcccttgcaatgacctgagcatcgtgaacccagcccggaagggcctgtacgagggaaccggcagactgttcttcgagttttacagactgctgcacgacgcccggcctaaggaaggcgacgaccggcccttcttttggctgttcgagaatgtggtggccatgggagtcagcgacaagcgggatattagccggttcctggagagcaaccccgtgatgatcgatgccaaggaagtgagcgccgcccaccgggccagatacttctggggcaatctgcctggcatgaacagacccctggccagcaccgtgaacgacaagctggagctgcaggagtgcctggagcacggccggatcgccaagttcagcaaggtgagaaccatcaccacccgaagcaacagcatcaaacaaggcaaggaccagcactttcctgtgttcatgaacgagaaggaggacatcctgtggtgtaccgagatggagagagtgttcgggttcccagtccactacacagatgtcagcaacatgtctagactggccagacagagactgctgggaagaagctggtccgtccctgtgatcagacacctgttcgcccctctgaaggagtacttcgcctgcgtgagcagcggcaacagcaacgccaacagccggggccccagcttctctagcggcctggtgccactgtccctgagagggagccacatgggccccatggagatctacaaaaccgtgagcgcctggaagcggcagcctgtgcgcgtgctgagcctgtttcggaatatcgataaagtcctgaaaagcctgggattcctggagagcggctctggctccggcggtggcaccctgaagtacgtggaggatgtgacaaacgtggtcagacgggatgtggagaagtggggccccttcgatctggtgtacggcagcacccaacccctgggcagctcttgtgaccggtgccctggctggtacatgtttcagttccaccggatcctgcagtacgccctgccgagacaggagtcccagcggccattcttttggattttcatggacaacttgctgctgaccgaggatgaccaggaaactaccactcggttcctgcagaccgaagccgtgaccctgcaggacgtgagaggccgggactaccagaacgccatgcgggtgtggtccaacatccctggactgaaaagcaagcacgcacctctgacccctaaagaagaggagtacctgcaggcccaggtgcggagcagaagcaagctggacgcccctaaggtggatctgctggtgaagaattgcctcctgcccctgagagagtacttcaagtatttcagccagaatagtctgcccctgggaggcagcggcggcggcaagcccggcgccgtgagcttcgccgacgtggccgtgtacttcagccccgaggagtggggctgcctgaggcccgcccagagggccctgtacagggacgtgatgagggagacctacggccacctgggcgccctgggcttccccggccccaagcccgccctgatcagctggatggagcaggagagcgaggcctggagcagcgccgcccaggaccccgagaagggcgagagcctgggcggcgccaggggcggcccaagcagcggcgcccctcctcccagcggcggcaggcggcccaagcagcggcgcccctcctcccagcggcggcagcccagccggctccccaacctctaccgaggagggcacctctgagtccgccacccccgagagcggccctggcacctccaccgagcccagcgagggcagcgcacccggcagccctgccggcagccccacctccacagaggagggaaccagcaccgagcccagcgaaggcagcgccccaggcaccagcaccgagcctagtgagcaggagattaaacggatcaacaagatcagaagaagacttgtgaaagacagcaacaccaagaaggccggcaagacaggccccatgaaaaccctgctggttagagtgatgacacccgatctgagagagcggctggaaaacctgagaaagaagcctgaaaatatcccccagcccatcagcaatacatctagagccaacctgaataagctgctgaccgattacaccgaaatgaagaaggcgatcctgcatgtgtactgggaagagttccagaaggaccctgtgggcctgatgagccgggtggcccagcctgccagcaagaagatcgatcagaacaagctgaaacctgagatggacgagaagggcaacctgaccaccgccggctttgcctgctctcagtgtggccagcccctgttcgtgtacaagctggagcaggtgtctgagaagggcaaggcttacaccaactacttcggacggtgcaatgtggccgagcacgaaaagctgatcctgctggcccagctgaagcccgagaaggatagcgacgaagccgtgacatatagcctgggaaagtttgggcagagggccctggatttctacagcattcatgtgaccaaggagtccacccaccccgtgaagcccctggcccagatcgccggaaacagatacgcctccggacctgtgggaaaggccctgagcgacgcatgtatgggcacaatcgcctccttcctgtctaagtaccaggacatcatcatcgaacaccagaaggtggtgaagggcaaccagaagagactggagagcctgcgggagctggccggcaaggaaaacctggaataccctagcgtgaccctgccacctcagcctcacaccaaggagggcgttgatgcctacaacgaagtgatcgcccgggtgcgaatgtgggtgaacctgaacctgtggcagaagctgaagctaagcagagatgatgccaagcctctgctgagactgaagggattcccttcctttcctctggtcgagagacaggccaacgaagtggactggtgggacatggtgtgtaacgtgaagaagctgatcaacgagaaaaaggaggatggcaaggtgttttggcagaatctggctggctacaagagacaggaagccctgagaccatacctgagcagcgaggaagatcggaagaagggaaagaaattcgctcggtaccagctgggcgacctgctgctgcacctggaaaagaagcacggcgaggactggggaaaggtgtacgacgaggcctgggagcggattgacaagaaagtggaaggcctgagcaagcacatcaagctggaagaggaacggagaagcgaggacgcccagagcaaggccgccctgaccgactggctgcgggctaaggccagcttcgtgatcgagggcctgaaggaggccgacaaggacgagttctgcagatgcgagctgaagctgcagaagtggtacggggacctgcggggaaagcccttcgccatcgaagccgagaacagcatcctggacatcagcggcttcagcaagcagtacaactgtgccttcatctggcagaaggacggcgtgaagaagctgaacctgtacctgatcatcaactacttcaagggcggcaagctgcggttcaagaagatcaaacctgaagccttcgaagccaacagattctacaccgtgatcaacaaaaagagcggcgagatcgtgcccatggaggtgaacttcaacttcgacgaccccaacctgatcatcctgcctctggcctttggcaagagacagggcagagaattcatctggaacgacctgctgtccctggaaaccggcagcctgaagctggccaacggaagagtgatcgagaagacactgtacaacagaagaacccggcaggatgagcctgccctgttcgtggccctgaccttcgagcggcgggaggtcctggactcctccaatatcaaaccaatgaacctgatcggcgtggcaagaggcgaaaacatccccgccgtgatcgccctgaccgaccccgagggctgcccactgagccggtttaaggatagcctgggaaacccaacccacatcctgagaatcggcgagagctataaggagaagcagcggaccatccaggccaagaaggaggtggagcagcggagagccggcggctacagccggaagtacgccagcaaagccaagaatctggcagacgatatggtgagaaacaccgctagagatctgctgtactacgccgtgacccaggatgccatgctgatcttcgccaacctgagccggggcttcggccggcagggcaagcggaccttcatggccgagagacagtacacacggatggaggactggctgaccgccaagctggcctacgagggcctgagcaagacctacctgtccaagacactggcccagtacacctccaagacatgcagcaactgtgggtttaccatcaccagcgccgactacgacagggtgctggagaagctgaagaagacagcaacaggctggatgaccacaattaacggcaaggagctgaaggtggagggccagattacctactacaacagatacaagagacagaacgtagtcaaggacctgtccgtcgagctggatagactgagcgaagaatctgtgaacaacgacatctcctcctggacaaagggcagaagcggagaagctctgagcctcctgaagaaaagattctcccatagacccgtgcaggagaagttcgtgtgcctgaactgcggcttcgagacacacgcagccgagcaagccgccctgaacatcgccagatcctggctgttcctgcggagccaggagtacaagaaataccagacaaacaagacaaccggcaacaccgataagagagccttcgtcgagacctggcagtccttttaccggaagaagcttaaggaggtgtggaaacctgccgtgcggtctggcggatctggcggaggctccaccagccccaagaaaaagagaaaagtctaagctgccttctgcggggcttgccttctggccatgcccttcttctctcccttgcacctgtacctcttggtctttgaataaagcctgagtaggaaggctagcaaaaaaaaaaaaaaaaaaaaaaaaaaaaaaaaaaaaaaaaaaaaaaaaaaaaaaaaaaaaaaaaaaaaaaaaaaaaaaaagcccagccggctccccaacctctaccgaggagggcacctctgagtccgccacccccgagagcggccctggcacctccaccgagcccagcgagggcagcgcacccggcagccctgccggcagccccacctccacagaggagggaaccagcaccgagcccagcgaaggcagcgccccaggcaccagcaccgagcctagtgagcaggagattaaacggatcaacaagatcagaagaagacttgtgaaagacagcaacaccaagaaggccggcaagacaggccccatgaaaaccctgctggttagagtgatgacacccgatctgagagagcggctggaaaacctgagaaagaagcctgaaaatatcccccagcccatcagcaatacatctagagccaacctgaataagctgctgaccgattacaccgaaatgaagaaggcgatcctgcatgtgtactgggaagagttccagaaggaccctgtgggcctgatgagccgggtggcccagcctgccagcaagaagatcgatcagaacaagctgaaacctgagatggacgagaagggcaacctgaccaccgccggctttgcctgctctcagtgtggccagcccctgttcgtgtacaagctggagcaggtgtctgagaagggcaaggcttacaccaactacttcggacggtgcaatgtggccgagcacgaaaagctgatcctgctggcccagctgaagcccgagaaggatagcgacgaagccgtgacatatagcctgggaaagtttgggcagagggccctggatttctacagcattcatgtgaccaaggagtccacccaccccgtgaagcccctggcccagatcgccggaaacagatacgcctccggacctgtgggaaaggccctgagcgacgcatgtatgggcacaatcgcctccttcctgtctaagtaccaggacatcatcatcgaacaccagaaggtggtgaagggcaaccagaagagactggagagcctgcgggagctggccggcaaggaaaacctggaataccctagcgtgaccctgccacctcagcctcacaccaaggagggcgttgatgcctacaacgaagtgatcgcccgggtgcgaatgtgggtgaacctgaacctgtggcagaagctgaagctaagcagagatgatgccaagcctctgctgagactgaagggattcccttcctttcctctggtcgagagacaggccaacgaagtggactggtgggacatggtgtgtaacgtgaagaagctgatcaacgagaaaaaggaggatggcaaggtgttttggcagaatctggctggctacaagagacaggaagccctgagaccatacctgagcagcgaggaagatcggaagaagggaaagaaattcgctcggtaccagctgggcgacctgctgctgcacctggaaaagaagcacggcgaggactggggaaaggtgtacgacgaggcctgggagcggattgacaagaaagtggaaggcctgagcaagcacatcaagctggaagaggaacggagaagcgaggacgcccagagcaaggccgccctgaccgactggctgcgggctaaggccagcttcgtgatcgagggcctgaaggaggccgacaaggacgagttctgcagatgcgagctgaagctgcagaagtggtacggggacctgcggggaaagcccttcgccatcgaagccgagaacagcatcctggacatcagcggcttcagcaagcagtacaactgtgccttcatctggcagaaggacggcgtgaagaagctgaacctgtacctgatcatcaactacttcaagggcggcaagctgcggttcaagaagatcaaacctgaagccttcgaagccaacagattctacaccgtgatcaacaaaaagagcggcgagatcgtgcccatggaggtgaacttcaacttcgacgaccccaacctgatcatcctgcctctggcctttggcaagagacagggcagagaattcatctggaacgacctgctgtccctggaaaccggcagcctgaagctggccaacggaagagtgatcgagaagacactgtacaacagaagaacccggcaggatgagcctgccctgttcgtggccctgaccttcgagcggcgggaggtcctggactcctccaatatcaaaccaatgaacctgatcggcgtggcaagaggcgaaaacatccccgccgtgatcgccctgaccgaccccgagggctgcccactgagccggtttaaggatagcctgggaaacccaacccacatcctgagaatcggcgagagctataaggagaagcagcggaccatccaggccaagaaggaggtggagcagcggagagccggcggctacagccggaagtacgccagcaaagccaagaatctggcagacgatatggtgagaaacaccgctagagatctgctgtactacgccgtgacccaggatgccatgctgatcttcgccaacctgagccggggcttcggccggcagggcaagcggaccttcatggccgagagacagtacacacggatggaggactggctgaccgccaagctggcctacgagggcctgagcaagacctacctgtccaagacactggcccagtacacctccaagacatgcagcaactgtgggtttaccatcaccagcgccgactacgacagggtgctggagaagctgaagaagacagcaacaggctggatgaccacaattaacggcaaggagctgaaggtggagggccagattacctactacaacagatacaagagacagaacgtagtcaaggacctgtccgtcgagctggatagactgagcgaagaatctgtgaacaacgacatctcctcctggacaaagggcagaagcggagaagctctgagcctcctgaagaaaagattctcccatagacccgtgcaggagaagttcgtgtgcctgaactgcggcttcgagacacacgcagccgagcaagccgccctgaacatcgccagatcctggctgttcctgcggagccaggagtacaagaaataccagacaaacaagacaaccggcaacaccgataagagagccttcgtcgagacctggcagtccttttaccggaagaagcttaaggaggtgtggaaacctgccgtgcggtctggcggatctggcggaggctccaccagccccaagaaaaagagaaaagtctaagctgccttctgcggggcttgccttctggccatgcccttcttctctcccttgcacctgtacctcttggtctttgaataaagcctgagtaggaaggctagcaaaaaaaaaaaaaaaaaaaaaaaaaaaaaaaaaaaaaaaaaaaaaaaaaaaaaaaaaaaaaaaaaaaaaaaaaaaaaaaa

SEQ ID NO: 8954 - RNA, 8787 nt, synthetic construct
  source 1..8787: mol_type = other RNA
aggaaataagagagaaaagaagagtaagaagaaatataagagccaccatggcccctaagaagaagcgtaaagtgagccggatgaaccacgaccaggagttcgacccccctaaggtgtaccctcccgtccccgccgagaagagaaagcccatccgggtcctgagcctgttcgatggcatcgccaccggtctgctggtgctgaaggacctgggcatccaggtggataggtacattgcctccgaggtgtgcgaggactccatcaccgtgggaatggtgcgtcatcagggcaagatcatgtacgtgggcgacgtgcggagcgtgacacagaagcatatccaggagtggggccctttcgacctggtgatcggcggcagcccttgcaatgacctgagcatcgtgaacccagcccggaagggcctgtacgagggaaccggcagactgttcttcgagttttacagactgctgcacgacgcccggcctaaggaaggcgacgaccggcccttcttttggctgttcgagaatgtggtggccatgggagtcagcgacaagcgggatattagccggttcctggagagcaaccccgtgatgatcgatgccaaggaagtgagcgccgcccaccgggccagatacttctggggcaatctgcctggcatgaacagacccctggccagcaccgtgaacgacaagctggagctgcaggagtgcctggagcacggccggatcgccaagttcagcaaggtgagaaccatcaccacccgaagcaacagcatcaaacaaggcaaggaccagcactttcctgtgttcatgaacgagaaggaggacatcctgtggtgtaccgagatggagagagtgttcgggttcccagtccactacacagatgtcagcaacatgtctagactggccagacagagactgctgggaagaagctggtccgtccctgtgatcagacacctgttcgcccctctgaaggagtacttcgcctgcgtgagcagcggcaacagcaacgccaacagccggggccccagcttctctagcggcctggtgccactgtccctgagagggagccacatgggccccatggagatctacaaaaccgtgagcgcctggaagcggcagcctgtgcgcgtgctgagcctgtttcggaatatcgataaagtcctgaaaagcctgggattcctggagagcggctctggctccggcggtggcaccctgaagtacgtggaggatgtgacaaacgtggtcagacgggatgtggagaagtggggccccttcgatctggtgtacggcagcacccaacccctgggcagctcttgtgaccggtgccctggctggtacatgtttcagttccaccggatcctgcagtacgccctgccgagacaggagtcccagcggccattcttttggattttcatggacaacttgctgctgaccgaggatgaccaggaaactaccactcggttcctgcagaccgaagccgtgaccctgcaggacgtgagaggccgggactaccagaacgccatgcgggtgtggtccaacatccctggactgaaaagcaagcacgcacctctgacccctaaagaagaggagtacctgcaggcccaggtgcggagcagaagcaagctggacgcccctaaggtggatctgctggtgaagaattgcctcctgcccctgagagagtacttcaagtatttcagccagaatagtctgcccctgggaggcagcggcggcggcaagcccggcgccgtgagcttcgccgacgtggccgtgtacttcagccccgaggagtggggctgcctgaggcccgcccagagggccctgtacagggacgtgatgagggagacctacggccacctgggcgccctgggcttccccggccccaagcccgccctgatcagctggatggagcaggagagcgaggagagcgaggcctggagccccgccgccaaggaccccgaggagggcgagagcctgggcggcggcccaagcagcggcgcccctcctcccagcggcggcaggcggcccaagcagcggcgcccctcctcccagcggcggcagcccagccggctccccaacctctaccgaggagggcacctctgagtccgccacccccgagagcggccctggcacctccaccgagcccagcgagggcagcgcacccggcagccctgccggcagccccacctccacagaggagggaaccagcaccgagcccagcgaaggcagcgccccaggcaccagcaccgagcctagtgagcaggagattaaacggatcaacaagatcagaagaagacttgtgaaagacagcaacaccaagaaggccggcaagacaggccccatgaaaaccctgctggttagagtgatgacacccgatctgagagagcggctggaaaacctgagaaagaagcctgaaaatatcccccagcccatcagcaatacatctagagccaacctgaataagctgctgaccgattacaccgaaatgaagaaggcgatcctgcatgtgtactgggaagagttccagaaggaccctgtgggcctgatgagccgggtggcccagcctgccagcaagaagatcgatcagaacaagctgaaacctgagatggacgagaagggcaacctgaccaccgccggctttgcctgctctcagtgtggccagcccctgttcgtgtacaagctggagcaggtgtctgagaagggcaaggcttacaccaactacttcggacggtgcaatgtggccgagcacgaaaagctgatcctgctggcccagctgaagcccgagaaggatagcgacgaagccgtgacatatagcctgggaaagtttgggcagagggccctggatttctacagcattcatgtgaccaaggagtccacccaccccgtgaagcccctggcccagatcgccggaaacagatacgcctccggacctgtgggaaaggccctgagcgacgcatgtatgggcacaatcgcctccttcctgtctaagtaccaggacatcatcatcgaacaccagaaggtggtgaagggcaaccagaagagactggagagcctgcgggagctggccggcaaggaaaacctggaataccctagcgtgaccctgccacctcagcctcacaccaaggagggcgttgatgcctacaacgaagtgatcgcccgggtgcgaatgtgggtgaacctgaacctgtggcagaagctgaagctaagcagagatgatgccaagcctctgctgagactgaagggattcccttcctttcctctggtcgagagacaggccaacgaagtggactggtgggacatggtgtgtaacgtgaagaagctgatcaacgagaaaaaggaggatggcaaggtgttttggcagaatctggctggctacaagagacaggaagccctgagaccatacctgagcagcgaggaagatcggaagaagggaaagaaattcgctcggtaccagctgggcgacctgctgctgcacctggaaaagaagcacggcgaggactggggaaaggtgtacgacgaggcctgggagcggattgacaagaaagtggaaggcctgagcaagcacatcaagctggaagaggaacggagaagcgaggacgcccagagcaaggccgccctgaccgactggctgcgggctaaggccagcttcgtgatcgagggcctgaaggaggccgacaaggacgagttctgcagatgcgagctgaagctgcagaagtggtacggggacctgcggggaaagcccttcgccatcgaagccgagaacagcatcctggacatcagcggcttcagcaagcagtacaactgtgccttcatctggcagaaggacggcgtgaagaagctgaacctgtacctgatcatcaactacttcaagggcggcaagctgcggttcaagaagatcaaacctgaagccttcgaagccaacagattctacaccgtgatcaacaaaaagagcggcgagatcgtgcccatggaggtgaacttcaacttcgacgaccccaacctgatcatcctgcctctggcctttggcaagagacagggcagagaattcatctggaacgacctgctgtccctggaaaccggcagcctgaagctggccaacggaagagtgatcgagaagacactgtacaacagaagaacccggcaggatgagcctgccctgttcgtggccctgaccttcgagcggcgggaggtcctggactcctccaatatcaaaccaatgaacctgatcggcgtggcaagaggcgaaaacatccccgccgtgatcgccctgaccgaccccgagggctgcccactgagccggtttaaggatagcctgggaaacccaacccacatcctgagaatcggcgagagctataaggagaagcagcggaccatccaggccaagaaggaggtggagcagcggagagccggcggctacagccggaagtacgccagcaaagccaagaatctggcagacgatatggtgagaaacaccgctagagatctgctgtactacgccgtgacccaggatgccatgctgatcttcgccaacctgagccggggcttcggccggcagggcaagcggaccttcatggccgagagacagtacacacggatggaggactggctgaccgccaagctggcctacgagggcctgagcaagacctacctgtccaagacactggcccagtacacctccaagacatgcagcaactgtgggtttaccatcaccagcgccgactacgacagggtgctggagaagctgaagaagacagcaacaggctggatgaccacaattaacggcaaggagctgaaggtggagggccagattacctactacaacagatacaagagacagaacgtagtcaaggacctgtccgtcgagctggatagactgagcgaagaatctgtgaacaacgacatctcctcctggacaaagggcagaagcggagaagctctgagcctcctgaagaaaagattctcccatagacccgtgcaggagaagttcgtgtgcctgaactgcggcttcgagacacacgcagccgagcaagccgccctgaacatcgccagatcctggctgttcctgcggagccaggagtacaagaaataccagacaaacaagacaaccggcaacaccgataagagagccttcgtcgagacctggcagtccttttaccggaagaagcttaaggaggtgtggaaacctgccgtgcggtctggcggatctggcggaggctccaccagccccaagaaaaagagaaaagtctaagctgccttctgcggggcttgccttctggccatgcccttcttctctcccttgcacctgtacctcttggtctttgaataaagcctgagtaggaaggctagcaaaaaaaaaaaaaaaaaaaaaaaaaaaaaaaaaaaaaaaaaaaaaaaaaaaaaaaaaaaaaaaaaaaaaaaaaaaaaaaagcccagccggctccccaacctctaccgaggagggcacctctgagtccgccacccccgagagcggccctggcacctccaccgagcccagcgagggcagcgcacccggcagccctgccggcagccccacctccacagaggagggaaccagcaccgagcccagcgaaggcagcgccccaggcaccagcaccgagcctagtgagcaggagattaaacggatcaacaagatcagaagaagacttgtgaaagacagcaacaccaagaaggccggcaagacaggccccatgaaaaccctgctggttagagtgatgacacccgatctgagagagcggctggaaaacctgagaaagaagcctgaaaatatcccccagcccatcagcaatacatctagagccaacctgaataagctgctgaccgattacaccgaaatgaagaaggcgatcctgcatgtgtactgggaagagttccagaaggaccctgtgggcctgatgagccgggtggcccagcctgccagcaagaagatcgatcagaacaagctgaaacctgagatggacgagaagggcaacctgaccaccgccggctttgcctgctctcagtgtggccagcccctgttcgtgtacaagctggagcaggtgtctgagaagggcaaggcttacaccaactacttcggacggtgcaatgtggccgagcacgaaaagctgatcctgctggcccagctgaagcccgagaaggatagcgacgaagccgtgacatatagcctgggaaagtttgggcagagggccctggatttctacagcattcatgtgaccaaggagtccacccaccccgtgaagcccctggcccagatcgccggaaacagatacgcctccggacctgtgggaaaggccctgagcgacgcatgtatgggcacaatcgcctccttcctgtctaagtaccaggacatcatcatcgaacaccagaaggtggtgaagggcaaccagaagagactggagagcctgcgggagctggccggcaaggaaaacctggaataccctagcgtgaccctgccacctcagcctcacaccaaggagggcgttgatgcctacaacgaagtgatcgcccgggtgcgaatgtgggtgaacctgaacctgtggcagaagctgaagctaagcagagatgatgccaagcctctgctgagactgaagggattcccttcctttcctctggtcgagagacaggccaacgaagtggactggtgggacatggtgtgtaacgtgaagaagctgatcaacgagaaaaaggaggatggcaaggtgttttggcagaatctggctggctacaagagacaggaagccctgagaccatacctgagcagcgaggaagatcggaagaagggaaagaaattcgctcggtaccagctgggcgacctgctgctgcacctggaaaagaagcacggcgaggactggggaaaggtgtacgacgaggcctgggagcggattgacaagaaagtggaaggcctgagcaagcacatcaagctggaagaggaacggagaagcgaggacgcccagagcaaggccgccctgaccgactggctgcgggctaaggccagcttcgtgatcgagggcctgaaggaggccgacaaggacgagttctgcagatgcgagctgaagctgcagaagtggtacggggacctgcggggaaagcccttcgccatcgaagccgagaacagcatcctggacatcagcggcttcagcaagcagtacaactgtgccttcatctggcagaaggacggcgtgaagaagctgaacctgtacctgatcatcaactacttcaagggcggcaagctgcggttcaagaagatcaaacctgaagccttcgaagccaacagattctacaccgtgatcaacaaaaagagcggcgagatcgtgcccatggaggtgaacttcaacttcgacgaccccaacctgatcatcctgcctctggcctttggcaagagacagggcagagaattcatctggaacgacctgctgtccctggaaaccggcagcctgaagctggccaacggaagagtgatcgagaagacactgtacaacagaagaacccggcaggatgagcctgccctgttcgtggccctgaccttcgagcggcgggaggtcctggactcctccaatatcaaaccaatgaacctgatcggcgtggcaagaggcgaaaacatccccgccgtgatcgccctgaccgaccccgagggctgcccactgagccggtttaaggatagcctgggaaacccaacccacatcctgagaatcggcgagagctataaggagaagcagcggaccatccaggccaagaaggaggtggagcagcggagagccggcggctacagccggaagtacgccagcaaagccaagaatctggcagacgatatggtgagaaacaccgctagagatctgctgtactacgccgtgacccaggatgccatgctgatcttcgccaacctgagccggggcttcggccggcagggcaagcggaccttcatggccgagagacagtacacacggatggaggactggctgaccgccaagctggcctacgagggcctgagcaagacctacctgtccaagacactggcccagtacacctccaagacatgcagcaactgtgggtttaccatcaccagcgccgactacgacagggtgctggagaagctgaagaagacagcaacaggctggatgaccacaattaacggcaaggagctgaaggtggagggccagattacctactacaacagatacaagagacagaacgtagtcaaggacctgtccgtcgagctggatagactgagcgaagaatctgtgaacaacgacatctcctcctggacaaagggcagaagcggagaagctctgagcctcctgaagaaaagattctcccatagacccgtgcaggagaagttcgtgtgcctgaactgcggcttcgagacacacgcagccgagcaagccgccctgaacatcgccagatcctggctgttcctgcggagccaggagtacaagaaataccagacaaacaagacaaccggcaacaccgataagagagccttcgtcgagacctggcagtccttttaccggaagaagcttaaggaggtgtggaaacctgccgtgcggtctggcggatctggcggaggctccaccagccccaagaaaaagagaaaagtctaagctgccttctgcggggcttgccttctggccatgcccttcttctctcccttgcacctgtacctcttggtctttgaataaagcctgagtaggaaggctagcaaaaaaaaaaaaaaaaaaaaaaaaaaaaaaaaaaaaaaaaaaaaaaaaaaaaaaaaaaaaaaaaaaaaaaaaaaaaaaaa

SEQ ID NO: 8955 - RNA, 8787 nt, synthetic construct
  source 1..8787: mol_type = other RNA
aggaaataagagagaaaagaagagtaagaagaaatataagagccaccatggcccctaagaagaagcgtaaagtgagccggatgaaccacgaccaggagttcgacccccctaaggtgtaccctcccgtccccgccgagaagagaaagcccatccgggtcctgagcctgttcgatggcatcgccaccggtctgctggtgctgaaggacctgggcatccaggtggataggtacattgcctccgaggtgtgcgaggactccatcaccgtgggaatggtgcgtcatcagggcaagatcatgtacgtgggcgacgtgcggagcgtgacacagaagcatatccaggagtggggccctttcgacctggtgatcggcggcagcccttgcaatgacctgagcatcgtgaacccagcccggaagggcctgtacgagggaaccggcagactgttcttcgagttttacagactgctgcacgacgcccggcctaaggaaggcgacgaccggcccttcttttggctgttcgagaatgtggtggccatgggagtcagcgacaagcgggatattagccggttcctggagagcaaccccgtgatgatcgatgccaaggaagtgagcgccgcccaccgggccagatacttctggggcaatctgcctggcatgaacagacccctggccagcaccgtgaacgacaagctggagctgcaggagtgcctggagcacggccggatcgccaagttcagcaaggtgagaaccatcaccacccgaagcaacagcatcaaacaaggcaaggaccagcactttcctgtgttcatgaacgagaaggaggacatcctgtggtgtaccgagatggagagagtgttcgggttcccagtccactacacagatgtcagcaacatgtctagactggccagacagagactgctgggaagaagctggtccgtccctgtgatcagacacctgttcgcccctctgaaggagtacttcgcctgcgtgagcagcggcaacagcaacgccaacagccggggccccagcttctctagcggcctggtgccactgtccctgagagggagccacatgggccccatggagatctacaaaaccgtgagcgcctggaagcggcagcctgtgcgcgtgctgagcctgtttcggaatatcgataaagtcctgaaaagcctgggattcctggagagcggctctggctccggcggtggcaccctgaagtacgtggaggatgtgacaaacgtggtcagacgggatgtggagaagtggggccccttcgatctggtgtacggcagcacccaacccctgggcagctcttgtgaccggtgccctggctggtacatgtttcagttccaccggatcctgcagtacgccctgccgagacaggagtcccagcggccattcttttggattttcatggacaacttgctgctgaccgaggatgaccaggaaactaccactcggttcctgcagaccgaagccgtgaccctgcaggacgtgagaggccgggactaccagaacgccatgcgggtgtggtccaacatccctggactgaaaagcaagcacgcacctctgacccctaaagaagaggagtacctgcaggcccaggtgcggagcagaagcaagctggacgcccctaaggtggatctgctggtgaagaattgcctcctgcccctgagagagtacttcaagtatttcagccagaatagtctgcccctgggaggcagcggcggcggcagccagagccccctgaccttcggcgacgtggccgtggagttcagcggcgacgagtgggcctggctggacagcgcccagaggagcctgcacaggagcgtgatgctggagaactacaggaacctggccagcctgggcctgtgcatgagcaagcccgagatgatcagcagcctggagcagagcaaggagccctgggccgtgaaggccaagagcaccaggggcaggtgccccggcctggaggccatcggcggcccaagcagcggcgcccctcctcccagcggcggcaggcggcccaagcagcggcgcccctcctcccagcggcggcagcccagccggctccccaacctctaccgaggagggcacctctgagtccgccacccccgagagcggccctggcacctccaccgagcccagcgagggcagcgcacccggcagccctgccggcagccccacctccacagaggagggaaccagcaccgagcccagcgaaggcagcgccccaggcaccagcaccgagcctagtgagcaggagattaaacggatcaacaagatcagaagaagacttgtgaaagacagcaacaccaagaaggccggcaagacaggccccatgaaaaccctgctggttagagtgatgacacccgatctgagagagcggctggaaaacctgagaaagaagcctgaaaatatcccccagcccatcagcaatacatctagagccaacctgaataagctgctgaccgattacaccgaaatgaagaaggcgatcctgcatgtgtactgggaagagttccagaaggaccctgtgggcctgatgagccgggtggcccagcctgccagcaagaagatcgatcagaacaagctgaaacctgagatggacgagaagggcaacctgaccaccgccggctttgcctgctctcagtgtggccagcccctgttcgtgtacaagctggagcaggtgtctgagaagggcaaggcttacaccaactacttcggacggtgcaatgtggccgagcacgaaaagctgatcctgctggcccagctgaagcccgagaaggatagcgacgaagccgtgacatatagcctgggaaagtttgggcagagggccctggatttctacagcattcatgtgaccaaggagtccacccaccccgtgaagcccctggcccagatcgccggaaacagatacgcctccggacctgtgggaaaggccctgagcgacgcatgtatgggcacaatcgcctccttcctgtctaagtaccaggacatcatcatcgaacaccagaaggtggtgaagggcaaccagaagagactggagagcctgcgggagctggccggcaaggaaaacctggaataccctagcgtgaccctgccacctcagcctcacaccaaggagggcgttgatgcctacaacgaagtgatcgcccgggtgcgaatgtgggtgaacctgaacctgtggcagaagctgaagctaagcagagatgatgccaagcctctgctgagactgaagggattcccttcctttcctctggtcgagagacaggccaacgaagtggactggtgggacatggtgtgtaacgtgaagaagctgatcaacgagaaaaaggaggatggcaaggtgttttggcagaatctggctggctacaagagacaggaagccctgagaccatacctgagcagcgaggaagatcggaagaagggaaagaaattcgctcggtaccagctgggcgacctgctgctgcacctggaaaagaagcacggcgaggactggggaaaggtgtacgacgaggcctgggagcggattgacaagaaagtggaaggcctgagcaagcacatcaagctggaagaggaacggagaagcgaggacgcccagagcaaggccgccctgaccgactggctgcgggctaaggccagcttcgtgatcgagggcctgaaggaggccgacaaggacgagttctgcagatgcgagctgaagctgcagaagtggtacggggacctgcggggaaagcccttcgccatcgaagccgagaacagcatcctggacatcagcggcttcagcaagcagtacaactgtgccttcatctggcagaaggacggcgtgaagaagctgaacctgtacctgatcatcaactacttcaagggcggcaagctgcggttcaagaagatcaaacctgaagccttcgaagccaacagattctacaccgtgatcaacaaaaagagcggcgagatcgtgcccatggaggtgaacttcaacttcgacgaccccaacctgatcatcctgcctctggcctttggcaagagacagggcagagaattcatctggaacgacctgctgtccctggaaaccggcagcctgaagctggccaacggaagagtgatcgagaagacactgtacaacagaagaacccggcaggatgagcctgccctgttcgtggccctgaccttcgagcggcgggaggtcctggactcctccaatatcaaaccaatgaacctgatcggcgtggcaagaggcgaaaacatccccgccgtgatcgccctgaccgaccccgagggctgcccactgagccggtttaaggatagcctgggaaacccaacccacatcctgagaatcggcgagagctataaggagaagcagcggaccatccaggccaagaaggaggtggagcagcggagagccggcggctacagccggaagtacgccagcaaagccaagaatctggcagacgatatggtgagaaacaccgctagagatctgctgtactacgccgtgacccaggatgccatgctgatcttcgccaacctgagccggggcttcggccggcagggcaagcggaccttcatggccgagagacagtacacacggatggaggactggctgaccgccaagctggcctacgagggcctgagcaagacctacctgtccaagacactggcccagtacacctccaagacatgcagcaactgtgggtttaccatcaccagcgccgactacgacagggtgctggagaagctgaagaagacagcaacaggctggatgaccacaattaacggcaaggagctgaaggtggagggccagattacctactacaacagatacaagagacagaacgtagtcaaggacctgtccgtcgagctggatagactgagcgaagaatctgtgaacaacgacatctcctcctggacaaagggcagaagcggagaagctctgagcctcctgaagaaaagattctcccatagacccgtgcaggagaagttcgtgtgcctgaactgcggcttcgagacacacgcagccgagcaagccgccctgaacatcgccagatcctggctgttcctgcggagccaggagtacaagaaataccagacaaacaagacaaccggcaacaccgataagagagccttcgtcgagacctggcagtccttttaccggaagaagcttaaggaggtgtggaaacctgccgtgcggtctggcggatctggcggaggctccaccagccccaagaaaaagagaaaagtctaagctgccttctgcggggcttgccttctggccatgcccttcttctctcccttgcacctgtacctcttggtctttgaataaagcctgagtaggaaggctagcaaaaaaaaaaaaaaaaaaaaaaaaaaaaaaaaaaaaaaaaaaaaaaaaaaaaaaaaaaaaaaaaaaaaaaaaaaaaaaaagcccagccggctccccaacctctaccgaggagggcacctctgagtccgccacccccgagagcggccctggcacctccaccgagcccagcgagggcagcgcacccggcagccctgccggcagccccacctccacagaggagggaaccagcaccgagcccagcgaaggcagcgccccaggcaccagcaccgagcctagtgagcaggagattaaacggatcaacaagatcagaagaagacttgtgaaagacagcaacaccaagaaggccggcaagacaggccccatgaaaaccctgctggttagagtgatgacacccgatctgagagagcggctggaaaacctgagaaagaagcctgaaaatatcccccagcccatcagcaatacatctagagccaacctgaataagctgctgaccgattacaccgaaatgaagaaggcgatcctgcatgtgtactgggaagagttccagaaggaccctgtgggcctgatgagccgggtggcccagcctgccagcaagaagatcgatcagaacaagctgaaacctgagatggacgagaagggcaacctgaccaccgccggctttgcctgctctcagtgtggccagcccctgttcgtgtacaagctggagcaggtgtctgagaagggcaaggcttacaccaactacttcggacggtgcaatgtggccgagcacgaaaagctgatcctgctggcccagctgaagcccgagaaggatagcgacgaagccgtgacatatagcctgggaaagtttgggcagagggccctggatttctacagcattcatgtgaccaaggagtccacccaccccgtgaagcccctggcccagatcgccggaaacagatacgcctccggacctgtgggaaaggccctgagcgacgcatgtatgggcacaatcgcctccttcctgtctaagtaccaggacatcatcatcgaacaccagaaggtggtgaagggcaaccagaagagactggagagcctgcgggagctggccggcaaggaaaacctggaataccctagcgtgaccctgccacctcagcctcacaccaaggagggcgttgatgcctacaacgaagtgatcgcccgggtgcgaatgtgggtgaacctgaacctgtggcagaagctgaagctaagcagagatgatgccaagcctctgctgagactgaagggattcccttcctttcctctggtcgagagacaggccaacgaagtggactggtgggacatggtgtgtaacgtgaagaagctgatcaacgagaaaaaggaggatggcaaggtgttttggcagaatctggctggctacaagagacaggaagccctgagaccatacctgagcagcgaggaagatcggaagaagggaaagaaattcgctcggtaccagctgggcgacctgctgctgcacctggaaaagaagcacggcgaggactggggaaaggtgtacgacgaggcctgggagcggattgacaagaaagtggaaggcctgagcaagcacatcaagctggaagaggaacggagaagcgaggacgcccagagcaaggccgccctgaccgactggctgcgggctaaggccagcttcgtgatcgagggcctgaaggaggccgacaaggacgagttctgcagatgcgagctgaagctgcagaagtggtacggggacctgcggggaaagcccttcgccatcgaagccgagaacagcatcctggacatcagcggcttcagcaagcagtacaactgtgccttcatctggcagaaggacggcgtgaagaagctgaacctgtacctgatcatcaactacttcaagggcggcaagctgcggttcaagaagatcaaacctgaagccttcgaagccaacagattctacaccgtgatcaacaaaaagagcggcgagatcgtgcccatggaggtgaacttcaacttcgacgaccccaacctgatcatcctgcctctggcctttggcaagagacagggcagagaattcatctggaacgacctgctgtccctggaaaccggcagcctgaagctggccaacggaagagtgatcgagaagacactgtacaacagaagaacccggcaggatgagcctgccctgttcgtggccctgaccttcgagcggcgggaggtcctggactcctccaatatcaaaccaatgaacctgatcggcgtggcaagaggcgaaaacatccccgccgtgatcgccctgaccgaccccgagggctgcccactgagccggtttaaggatagcctgggaaacccaacccacatcctgagaatcggcgagagctataaggagaagcagcggaccatccaggccaagaaggaggtggagcagcggagagccggcggctacagccggaagtacgccagcaaagccaagaatctggcagacgatatggtgagaaacaccgctagagatctgctgtactacgccgtgacccaggatgccatgctgatcttcgccaacctgagccggggcttcggccggcagggcaagcggaccttcatggccgagagacagtacacacggatggaggactggctgaccgccaagctggcctacgagggcctgagcaagacctacctgtccaagacactggcccagtacacctccaagacatgcagcaactgtgggtttaccatcaccagcgccgactacgacagggtgctggagaagctgaagaagacagcaacaggctggatgaccacaattaacggcaaggagctgaaggtggagggccagattacctactacaacagatacaagagacagaacgtagtcaaggacctgtccgtcgagctggatagactgagcgaagaatctgtgaacaacgacatctcctcctggacaaagggcagaagcggagaagctctgagcctcctgaagaaaagattctcccatagacccgtgcaggagaagttcgtgtgcctgaactgcggcttcgagacacacgcagccgagcaagccgccctgaacatcgccagatcctggctgttcctgcggagccaggagtacaagaaataccagacaaacaagacaaccggcaacaccgataagagagccttcgtcgagacctggcagtccttttaccggaagaagcttaaggaggtgtggaaacctgccgtgcggtctggcggatctggcggaggctccaccagccccaagaaaaagagaaaagtctaagctgccttctgcggggcttgccttctggccatgcccttcttctctcccttgcacctgtacctcttggtctttgaataaagcctgagtaggaaggctagcaaaaaaaaaaaaaaaaaaaaaaaaaaaaaaaaaaaaaaaaaaaaaaaaaaaaaaaaaaaaaaaaaaaaaaaaaaaaaaaa

SEQ ID NO: 8956 - RNA, 8787 nt, synthetic construct
  source 1..8787: mol_type = other RNA
aggaaataagagagaaaagaagagtaagaagaaatataagagccaccatggcccctaagaagaagcgtaaagtgagccggatgaaccacgaccaggagttcgacccccctaaggtgtaccctcccgtccccgccgagaagagaaagcccatccgggtcctgagcctgttcgatggcatcgccaccggtctgctggtgctgaaggacctgggcatccaggtggataggtacattgcctccgaggtgtgcgaggactccatcaccgtgggaatggtgcgtcatcagggcaagatcatgtacgtgggcgacgtgcggagcgtgacacagaagcatatccaggagtggggccctttcgacctggtgatcggcggcagcccttgcaatgacctgagcatcgtgaacccagcccggaagggcctgtacgagggaaccggcagactgttcttcgagttttacagactgctgcacgacgcccggcctaaggaaggcgacgaccggcccttcttttggctgttcgagaatgtggtggccatgggagtcagcgacaagcgggatattagccggttcctggagagcaaccccgtgatgatcgatgccaaggaagtgagcgccgcccaccgggccagatacttctggggcaatctgcctggcatgaacagacccctggccagcaccgtgaacgacaagctggagctgcaggagtgcctggagcacggccggatcgccaagttcagcaaggtgagaaccatcaccacccgaagcaacagcatcaaacaaggcaaggaccagcactttcctgtgttcatgaacgagaaggaggacatcctgtggtgtaccgagatggagagagtgttcgggttcccagtccactacacagatgtcagcaacatgtctagactggccagacagagactgctgggaagaagctggtccgtccctgtgatcagacacctgttcgcccctctgaaggagtacttcgcctgcgtgagcagcggcaacagcaacgccaacagccggggccccagcttctctagcggcctggtgccactgtccctgagagggagccacatgggccccatggagatctacaaaaccgtgagcgcctggaagcggcagcctgtgcgcgtgctgagcctgtttcggaatatcgataaagtcctgaaaagcctgggattcctggagagcggctctggctccggcggtggcaccctgaagtacgtggaggatgtgacaaacgtggtcagacgggatgtggagaagtggggccccttcgatctggtgtacggcagcacccaacccctgggcagctcttgtgaccggtgccctggctggtacatgtttcagttccaccggatcctgcagtacgccctgccgagacaggagtcccagcggccattcttttggattttcatggacaacttgctgctgaccgaggatgaccaggaaactaccactcggttcctgcagaccgaagccgtgaccctgcaggacgtgagaggccgggactaccagaacgccatgcgggtgtggtccaacatccctggactgaaaagcaagcacgcacctctgacccctaaagaagaggagtacctgcaggcccaggtgcggagcagaagcaagctggacgcccctaaggtggatctgctggtgaagaattgcctcctgcccctgagagagtacttcaagtatttcagccagaatagtctgcccctgggaggcagcggcggcggcatggccttcgaggacgtggccgtgtacttcagccaggaggagtggggcctgctggacaccgcccagagggccctgtacaggcacgtgatgctggagaacttcaccctggtgaccagcctgggcctgagcaccagcaggccctacgtggtgatccagctggagaggggcgaggagccctgggtgcccagcggcaaggacatgaccctggccaggaacacctacaggaggctgaacgccggcagcggcggcccaagcagcggcgcccctcctcccagcggcggcaggcggcccaagcagcggcgcccctcctcccagcggcggcagcccagccggctccccaacctctaccgaggagggcacctctgagtccgccacccccgagagcggccctggcacctccaccgagcccagcgagggcagcgcacccggcagccctgccggcagccccacctccacagaggagggaaccagcaccgagcccagcgaaggcagcgccccaggcaccagcaccgagcctagtgagcaggagattaaacggatcaacaagatcagaagaagacttgtgaaagacagcaacaccaagaaggccggcaagacaggccccatgaaaaccctgctggttagagtgatgacacccgatctgagagagcggctggaaaacctgagaaagaagcctgaaaatatcccccagcccatcagcaatacatctagagccaacctgaataagctgctgaccgattacaccgaaatgaagaaggcgatcctgcatgtgtactgggaagagttccagaaggaccctgtgggcctgatgagccgggtggcccagcctgccagcaagaagatcgatcagaacaagctgaaacctgagatggacgagaagggcaacctgaccaccgccggctttgcctgctctcagtgtggccagcccctgttcgtgtacaagctggagcaggtgtctgagaagggcaaggcttacaccaactacttcggacggtgcaatgtggccgagcacgaaaagctgatcctgctggcccagctgaagcccgagaaggatagcgacgaagccgtgacatatagcctgggaaagtttgggcagagggccctggatttctacagcattcatgtgaccaaggagtccacccaccccgtgaagcccctggcccagatcgccggaaacagatacgcctccggacctgtgggaaaggccctgagcgacgcatgtatgggcacaatcgcctccttcctgtctaagtaccaggacatcatcatcgaacaccagaaggtggtgaagggcaaccagaagagactggagagcctgcgggagctggccggcaaggaaaacctggaataccctagcgtgaccctgccacctcagcctcacaccaaggagggcgttgatgcctacaacgaagtgatcgcccgggtgcgaatgtgggtgaacctgaacctgtggcagaagctgaagctaagcagagatgatgccaagcctctgctgagactgaagggattcccttcctttcctctggtcgagagacaggccaacgaagtggactggtgggacatggtgtgtaacgtgaagaagctgatcaacgagaaaaaggaggatggcaaggtgttttggcagaatctggctggctacaagagacaggaagccctgagaccatacctgagcagcgaggaagatcggaagaagggaaagaaattcgctcggtaccagctgggcgacctgctgctgcacctggaaaagaagcacggcgaggactggggaaaggtgtacgacgaggcctgggagcggattgacaagaaagtggaaggcctgagcaagcacatcaagctggaagaggaacggagaagcgaggacgcccagagcaaggccgccctgaccgactggctgcgggctaaggccagcttcgtgatcgagggcctgaaggaggccgacaaggacgagttctgcagatgcgagctgaagctgcagaagtggtacggggacctgcggggaaagcccttcgccatcgaagccgagaacagcatcctggacatcagcggcttcagcaagcagtacaactgtgccttcatctggcagaaggacggcgtgaagaagctgaacctgtacctgatcatcaactacttcaagggcggcaagctgcggttcaagaagatcaaacctgaagccttcgaagccaacagattctacaccgtgatcaacaaaaagagcggcgagatcgtgcccatggaggtgaacttcaacttcgacgaccccaacctgatcatcctgcctctggcctttggcaagagacagggcagagaattcatctggaacgacctgctgtccctggaaaccggcagcctgaagctggccaacggaagagtgatcgagaagacactgtacaacagaagaacccggcaggatgagcctgccctgttcgtggccctgaccttcgagcggcgggaggtcctggactcctccaatatcaaaccaatgaacctgatcggcgtggcaagaggcgaaaacatccccgccgtgatcgccctgaccgaccccgagggctgcccactgagccggtttaaggatagcctgggaaacccaacccacatcctgagaatcggcgagagctataaggagaagcagcggaccatccaggccaagaaggaggtggagcagcggagagccggcggctacagccggaagtacgccagcaaagccaagaatctggcagacgatatggtgagaaacaccgctagagatctgctgtactacgccgtgacccaggatgccatgctgatcttcgccaacctgagccggggcttcggccggcagggcaagcggaccttcatggccgagagacagtacacacggatggaggactggctgaccgccaagctggcctacgagggcctgagcaagacctacctgtccaagacactggcccagtacacctccaagacatgcagcaactgtgggtttaccatcaccagcgccgactacgacagggtgctggagaagctgaagaagacagcaacaggctggatgaccacaattaacggcaaggagctgaaggtggagggccagattacctactacaacagatacaagagacagaacgtagtcaaggacctgtccgtcgagctggatagactgagcgaagaatctgtgaacaacgacatctcctcctggacaaagggcagaagcggagaagctctgagcctcctgaagaaaagattctcccatagacccgtgcaggagaagttcgtgtgcctgaactgcggcttcgagacacacgcagccgagcaagccgccctgaacatcgccagatcctggctgttcctgcggagccaggagtacaagaaataccagacaaacaagacaaccggcaacaccgataagagagccttcgtcgagacctggcagtccttttaccggaagaagcttaaggaggtgtggaaacctgccgtgcggtctggcggatctggcggaggctccaccagccccaagaaaaagagaaaagtctaagctgccttctgcggggcttgccttctggccatgcccttcttctctcccttgcacctgtacctcttggtctttgaataaagcctgagtaggaaggctagcaaaaaaaaaaaaaaaaaaaaaaaaaaaaaaaaaaaaaaaaaaaaaaaaaaaaaaaaaaaaaaaaaaaaaaaaaaaaaaaagcccagccggctccccaacctctaccgaggagggcacctctgagtccgccacccccgagagcggccctggcacctccaccgagcccagcgagggcagcgcacccggcagccctgccggcagccccacctccacagaggagggaaccagcaccgagcccagcgaaggcagcgccccaggcaccagcaccgagcctagtgagcaggagattaaacggatcaacaagatcagaagaagacttgtgaaagacagcaacaccaagaaggccggcaagacaggccccatgaaaaccctgctggttagagtgatgacacccgatctgagagagcggctggaaaacctgagaaagaagcctgaaaatatcccccagcccatcagcaatacatctagagccaacctgaataagctgctgaccgattacaccgaaatgaagaaggcgatcctgcatgtgtactgggaagagttccagaaggaccctgtgggcctgatgagccgggtggcccagcctgccagcaagaagatcgatcagaacaagctgaaacctgagatggacgagaagggcaacctgaccaccgccggctttgcctgctctcagtgtggccagcccctgttcgtgtacaagctggagcaggtgtctgagaagggcaaggcttacaccaactacttcggacggtgcaatgtggccgagcacgaaaagctgatcctgctggcccagctgaagcccgagaaggatagcgacgaagccgtgacatatagcctgggaaagtttgggcagagggccctggatttctacagcattcatgtgaccaaggagtccacccaccccgtgaagcccctggcccagatcgccggaaacagatacgcctccggacctgtgggaaaggccctgagcgacgcatgtatgggcacaatcgcctccttcctgtctaagtaccaggacatcatcatcgaacaccagaaggtggtgaagggcaaccagaagagactggagagcctgcgggagctggccggcaaggaaaacctggaataccctagcgtgaccctgccacctcagcctcacaccaaggagggcgttgatgcctacaacgaagtgatcgcccgggtgcgaatgtgggtgaacctgaacctgtggcagaagctgaagctaagcagagatgatgccaagcctctgctgagactgaagggattcccttcctttcctctggtcgagagacaggccaacgaagtggactggtgggacatggtgtgtaacgtgaagaagctgatcaacgagaaaaaggaggatggcaaggtgttttggcagaatctggctggctacaagagacaggaagccctgagaccatacctgagcagcgaggaagatcggaagaagggaaagaaattcgctcggtaccagctgggcgacctgctgctgcacctggaaaagaagcacggcgaggactggggaaaggtgtacgacgaggcctgggagcggattgacaagaaagtggaaggcctgagcaagcacatcaagctggaagaggaacggagaagcgaggacgcccagagcaaggccgccctgaccgactggctgcgggctaaggccagcttcgtgatcgagggcctgaaggaggccgacaaggacgagttctgcagatgcgagctgaagctgcagaagtggtacggggacctgcggggaaagcccttcgccatcgaagccgagaacagcatcctggacatcagcggcttcagcaagcagtacaactgtgccttcatctggcagaaggacggcgtgaagaagctgaacctgtacctgatcatcaactacttcaagggcggcaagctgcggttcaagaagatcaaacctgaagccttcgaagccaacagattctacaccgtgatcaacaaaaagagcggcgagatcgtgcccatggaggtgaacttcaacttcgacgaccccaacctgatcatcctgcctctggcctttggcaagagacagggcagagaattcatctggaacgacctgctgtccctggaaaccggcagcctgaagctggccaacggaagagtgatcgagaagacactgtacaacagaagaacccggcaggatgagcctgccctgttcgtggccctgaccttcgagcggcgggaggtcctggactcctccaatatcaaaccaatgaacctgatcggcgtggcaagaggcgaaaacatccccgccgtgatcgccctgaccgaccccgagggctgcccactgagccggtttaaggatagcctgggaaacccaacccacatcctgagaatcggcgagagctataaggagaagcagcggaccatccaggccaagaaggaggtggagcagcggagagccggcggctacagccggaagtacgccagcaaagccaagaatctggcagacgatatggtgagaaacaccgctagagatctgctgtactacgccgtgacccaggatgccatgctgatcttcgccaacctgagccggggcttcggccggcagggcaagcggaccttcatggccgagagacagtacacacggatggaggactggctgaccgccaagctggcctacgagggcctgagcaagacctacctgtccaagacactggcccagtacacctccaagacatgcagcaactgtgggtttaccatcaccagcgccgactacgacagggtgctggagaagctgaagaagacagcaacaggctggatgaccacaattaacggcaaggagctgaaggtggagggccagattacctactacaacagatacaagagacagaacgtagtcaaggacctgtccgtcgagctggatagactgagcgaagaatctgtgaacaacgacatctcctcctggacaaagggcagaagcggagaagctctgagcctcctgaagaaaagattctcccatagacccgtgcaggagaagttcgtgtgcctgaactgcggcttcgagacacacgcagccgagcaagccgccctgaacatcgccagatcctggctgttcctgcggagccaggagtacaagaaataccagacaaacaagacaaccggcaacaccgataagagagccttcgtcgagacctggcagtccttttaccggaagaagcttaaggaggtgtggaaacctgccgtgcggtctggcggatctggcggaggctccaccagccccaagaaaaagagaaaagtctaagctgccttctgcggggcttgccttctggccatgcccttcttctctcccttgcacctgtacctcttggtctttgaataaagcctgagtaggaaggctagcaaaaaaaaaaaaaaaaaaaaaaaaaaaaaaaaaaaaaaaaaaaaaaaaaaaaaaaaaaaaaaaaaaaaaaaaaaaaaaaa

SEQ ID NO: 8957 - RNA, 8787 nt, synthetic construct
  source 1..8787: mol_type = other RNA
aggaaataagagagaaaagaagagtaagaagaaatataagagccaccatggcccctaagaagaagcgtaaagtgagccggatgaaccacgaccaggagttcgacccccctaaggtgtaccctcccgtccccgccgagaagagaaagcccatccgggtcctgagcctgttcgatggcatcgccaccggtctgctggtgctgaaggacctgggcatccaggtggataggtacattgcctccgaggtgtgcgaggactccatcaccgtgggaatggtgcgtcatcagggcaagatcatgtacgtgggcgacgtgcggagcgtgacacagaagcatatccaggagtggggccctttcgacctggtgatcggcggcagcccttgcaatgacctgagcatcgtgaacccagcccggaagggcctgtacgagggaaccggcagactgttcttcgagttttacagactgctgcacgacgcccggcctaaggaaggcgacgaccggcccttcttttggctgttcgagaatgtggtggccatgggagtcagcgacaagcgggatattagccggttcctggagagcaaccccgtgatgatcgatgccaaggaagtgagcgccgcccaccgggccagatacttctggggcaatctgcctggcatgaacagacccctggccagcaccgtgaacgacaagctggagctgcaggagtgcctggagcacggccggatcgccaagttcagcaaggtgagaaccatcaccacccgaagcaacagcatcaaacaaggcaaggaccagcactttcctgtgttcatgaacgagaaggaggacatcctgtggtgtaccgagatggagagagtgttcgggttcccagtccactacacagatgtcagcaacatgtctagactggccagacagagactgctgggaagaagctggtccgtccctgtgatcagacacctgttcgcccctctgaaggagtacttcgcctgcgtgagcagcggcaacagcaacgccaacagccggggccccagcttctctagcggcctggtgccactgtccctgagagggagccacatgggccccatggagatctacaaaaccgtgagcgcctggaagcggcagcctgtgcgcgtgctgagcctgtttcggaatatcgataaagtcctgaaaagcctgggattcctggagagcggctctggctccggcggtggcaccctgaagtacgtggaggatgtgacaaacgtggtcagacgggatgtggagaagtggggccccttcgatctggtgtacggcagcacccaacccctgggcagctcttgtgaccggtgccctggctggtacatgtttcagttccaccggatcctgcagtacgccctgccgagacaggagtcccagcggccattcttttggattttcatggacaacttgctgctgaccgaggatgaccaggaaactaccactcggttcctgcagaccgaagccgtgaccctgcaggacgtgagaggccgggactaccagaacgccatgcgggtgtggtccaacatccctggactgaaaagcaagcacgcacctctgacccctaaagaagaggagtacctgcaggcccaggtgcggagcagaagcaagctggacgcccctaaggtggatctgctggtgaagaattgcctcctgcccctgagagagtacttcaagtatttcagccagaatagtctgcccctgggaggcagcggcggcggcatggccttcgaggacgtggccgtgtacttcagccaggaggagtggggcctgctggacaccgcccagagggccctgtacaggagggtgatgctggacaacttcgccctggtggccagcctgggcctgagcaccagcaggcccagggtggtgatccagctggagaggggcgaggagccctgggtgcccagcggcaccgacatgaccatgagcaggaacacccacaggaggaggaacagcggcttcggcggcccaagcagcggcgcccctcctcccagcggcggcaggcggcccaagcagcggcgcccctcctcccagcggcggcagcccagccggctccccaacctctaccgaggagggcacctctgagtccgccacccccgagagcggccctggcacctccaccgagcccagcgagggcagcgcacccggcagccctgccggcagccccacctccacagaggagggaaccagcaccgagcccagcgaaggcagcgccccaggcaccagcaccgagcctagtgagcaggagattaaacggatcaacaagatcagaagaagacttgtgaaagacagcaacaccaagaaggccggcaagacaggccccatgaaaaccctgctggttagagtgatgacacccgatctgagagagcggctggaaaacctgagaaagaagcctgaaaatatcccccagcccatcagcaatacatctagagccaacctgaataagctgctgaccgattacaccgaaatgaagaaggcgatcctgcatgtgtactgggaagagttccagaaggaccctgtgggcctgatgagccgggtggcccagcctgccagcaagaagatcgatcagaacaagctgaaacctgagatggacgagaagggcaacctgaccaccgccggctttgcctgctctcagtgtggccagcccctgttcgtgtacaagctggagcaggtgtctgagaagggcaaggcttacaccaactacttcggacggtgcaatgtggccgagcacgaaaagctgatcctgctggcccagctgaagcccgagaaggatagcgacgaagccgtgacatatagcctgggaaagtttgggcagagggccctggatttctacagcattcatgtgaccaaggagtccacccaccccgtgaagcccctggcccagatcgccggaaacagatacgcctccggacctgtgggaaaggccctgagcgacgcatgtatgggcacaatcgcctccttcctgtctaagtaccaggacatcatcatcgaacaccagaaggtggtgaagggcaaccagaagagactggagagcctgcgggagctggccggcaaggaaaacctggaataccctagcgtgaccctgccacctcagcctcacaccaaggagggcgttgatgcctacaacgaagtgatcgcccgggtgcgaatgtgggtgaacctgaacctgtggcagaagctgaagctaagcagagatgatgccaagcctctgctgagactgaagggattcccttcctttcctctggtcgagagacaggccaacgaagtggactggtgggacatggtgtgtaacgtgaagaagctgatcaacgagaaaaaggaggatggcaaggtgttttggcagaatctggctggctacaagagacaggaagccctgagaccatacctgagcagcgaggaagatcggaagaagggaaagaaattcgctcggtaccagctgggcgacctgctgctgcacctggaaaagaagcacggcgaggactggggaaaggtgtacgacgaggcctgggagcggattgacaagaaagtggaaggcctgagcaagcacatcaagctggaagaggaacggagaagcgaggacgcccagagcaaggccgccctgaccgactggctgcgggctaaggccagcttcgtgatcgagggcctgaaggaggccgacaaggacgagttctgcagatgcgagctgaagctgcagaagtggtacggggacctgcggggaaagcccttcgccatcgaagccgagaacagcatcctggacatcagcggcttcagcaagcagtacaactgtgccttcatctggcagaaggacggcgtgaagaagctgaacctgtacctgatcatcaactacttcaagggcggcaagctgcggttcaagaagatcaaacctgaagccttcgaagccaacagattctacaccgtgatcaacaaaaagagcggcgagatcgtgcccatggaggtgaacttcaacttcgacgaccccaacctgatcatcctgcctctggcctttggcaagagacagggcagagaattcatctggaacgacctgctgtccctggaaaccggcagcctgaagctggccaacggaagagtgatcgagaagacactgtacaacagaagaacccggcaggatgagcctgccctgttcgtggccctgaccttcgagcggcgggaggtcctggactcctccaatatcaaaccaatgaacctgatcggcgtggcaagaggcgaaaacatccccgccgtgatcgccctgaccgaccccgagggctgcccactgagccggtttaaggatagcctgggaaacccaacccacatcctgagaatcggcgagagctataaggagaagcagcggaccatccaggccaagaaggaggtggagcagcggagagccggcggctacagccggaagtacgccagcaaagccaagaatctggcagacgatatggtgagaaacaccgctagagatctgctgtactacgccgtgacccaggatgccatgctgatcttcgccaacctgagccggggcttcggccggcagggcaagcggaccttcatggccgagagacagtacacacggatggaggactggctgaccgccaagctggcctacgagggcctgagcaagacctacctgtccaagacactggcccagtacacctccaagacatgcagcaactgtgggtttaccatcaccagcgccgactacgacagggtgctggagaagctgaagaagacagcaacaggctggatgaccacaattaacggcaaggagctgaaggtggagggccagattacctactacaacagatacaagagacagaacgtagtcaaggacctgtccgtcgagctggatagactgagcgaagaatctgtgaacaacgacatctcctcctggacaaagggcagaagcggagaagctctgagcctcctgaagaaaagattctcccatagacccgtgcaggagaagttcgtgtgcctgaactgcggcttcgagacacacgcagccgagcaagccgccctgaacatcgccagatcctggctgttcctgcggagccaggagtacaagaaataccagacaaacaagacaaccggcaacaccgataagagagccttcgtcgagacctggcagtccttttaccggaagaagcttaaggaggtgtggaaacctgccgtgcggtctggcggatctggcggaggctccaccagccccaagaaaaagagaaaagtctaagctgccttctgcggggcttgccttctggccatgcccttcttctctcccttgcacctgtacctcttggtctttgaataaagcctgagtaggaaggctagcaaaaaaaaaaaaaaaaaaaaaaaaaaaaaaaaaaaaaaaaaaaaaaaaaaaaaaaaaaaaaaaaaaaaaaaaaaaaaaaagcccagccggctccccaacctctaccgaggagggcacctctgagtccgccacccccgagagcggccctggcacctccaccgagcccagcgagggcagcgcacccggcagccctgccggcagccccacctccacagaggagggaaccagcaccgagcccagcgaaggcagcgccccaggcaccagcaccgagcctagtgagcaggagattaaacggatcaacaagatcagaagaagacttgtgaaagacagcaacaccaagaaggccggcaagacaggccccatgaaaaccctgctggttagagtgatgacacccgatctgagagagcggctggaaaacctgagaaagaagcctgaaaatatcccccagcccatcagcaatacatctagagccaacctgaataagctgctgaccgattacaccgaaatgaagaaggcgatcctgcatgtgtactgggaagagttccagaaggaccctgtgggcctgatgagccgggtggcccagcctgccagcaagaagatcgatcagaacaagctgaaacctgagatggacgagaagggcaacctgaccaccgccggctttgcctgctctcagtgtggccagcccctgttcgtgtacaagctggagcaggtgtctgagaagggcaaggcttacaccaactacttcggacggtgcaatgtggccgagcacgaaaagctgatcctgctggcccagctgaagcccgagaaggatagcgacgaagccgtgacatatagcctgggaaagtttgggcagagggccctggatttctacagcattcatgtgaccaaggagtccacccaccccgtgaagcccctggcccagatcgccggaaacagatacgcctccggacctgtgggaaaggccctgagcgacgcatgtatgggcacaatcgcctccttcctgtctaagtaccaggacatcatcatcgaacaccagaaggtggtgaagggcaaccagaagagactggagagcctgcgggagctggccggcaaggaaaacctggaataccctagcgtgaccctgccacctcagcctcacaccaaggagggcgttgatgcctacaacgaagtgatcgcccgggtgcgaatgtgggtgaacctgaacctgtggcagaagctgaagctaagcagagatgatgccaagcctctgctgagactgaagggattcccttcctttcctctggtcgagagacaggccaacgaagtggactggtgggacatggtgtgtaacgtgaagaagctgatcaacgagaaaaaggaggatggcaaggtgttttggcagaatctggctggctacaagagacaggaagccctgagaccatacctgagcagcgaggaagatcggaagaagggaaagaaattcgctcggtaccagctgggcgacctgctgctgcacctggaaaagaagcacggcgaggactggggaaaggtgtacgacgaggcctgggagcggattgacaagaaagtggaaggcctgagcaagcacatcaagctggaagaggaacggagaagcgaggacgcccagagcaaggccgccctgaccgactggctgcgggctaaggccagcttcgtgatcgagggcctgaaggaggccgacaaggacgagttctgcagatgcgagctgaagctgcagaagtggtacggggacctgcggggaaagcccttcgccatcgaagccgagaacagcatcctggacatcagcggcttcagcaagcagtacaactgtgccttcatctggcagaaggacggcgtgaagaagctgaacctgtacctgatcatcaactacttcaagggcggcaagctgcggttcaagaagatcaaacctgaagccttcgaagccaacagattctacaccgtgatcaacaaaaagagcggcgagatcgtgcccatggaggtgaacttcaacttcgacgaccccaacctgatcatcctgcctctggcctttggcaagagacagggcagagaattcatctggaacgacctgctgtccctggaaaccggcagcctgaagctggccaacggaagagtgatcgagaagacactgtacaacagaagaacccggcaggatgagcctgccctgttcgtggccctgaccttcgagcggcgggaggtcctggactcctccaatatcaaaccaatgaacctgatcggcgtggcaagaggcgaaaacatccccgccgtgatcgccctgaccgaccccgagggctgcccactgagccggtttaaggatagcctgggaaacccaacccacatcctgagaatcggcgagagctataaggagaagcagcggaccatccaggccaagaaggaggtggagcagcggagagccggcggctacagccggaagtacgccagcaaagccaagaatctggcagacgatatggtgagaaacaccgctagagatctgctgtactacgccgtgacccaggatgccatgctgatcttcgccaacctgagccggggcttcggccggcagggcaagcggaccttcatggccgagagacagtacacacggatggaggactggctgaccgccaagctggcctacgagggcctgagcaagacctacctgtccaagacactggcccagtacacctccaagacatgcagcaactgtgggtttaccatcaccagcgccgactacgacagggtgctggagaagctgaagaagacagcaacaggctggatgaccacaattaacggcaaggagctgaaggtggagggccagattacctactacaacagatacaagagacagaacgtagtcaaggacctgtccgtcgagctggatagactgagcgaagaatctgtgaacaacgacatctcctcctggacaaagggcagaagcggagaagctctgagcctcctgaagaaaagattctcccatagacccgtgcaggagaagttcgtgtgcctgaactgcggcttcgagacacacgcagccgagcaagccgccctgaacatcgccagatcctggctgttcctgcggagccaggagtacaagaaataccagacaaacaagacaaccggcaacaccgataagagagccttcgtcgagacctggcagtccttttaccggaagaagcttaaggaggtgtggaaacctgccgtgcggtctggcggatctggcggaggctccaccagccccaagaaaaagagaaaagtctaagctgccttctgcggggcttgccttctggccatgcccttcttctctcccttgcacctgtacctcttggtctttgaataaagcctgagtaggaaggctagcaaaaaaaaaaaaaaaaaaaaaaaaaaaaaaaaaaaaaaaaaaaaaaaaaaaaaaaaaaaaaaaaaaaaaaaaaaaaaaaa

SEQ ID NO: 8958 - RNA, 8787 nt, synthetic construct
  source 1..8787: mol_type = other RNA
aggaaataagagagaaaagaagagtaagaagaaatataagagccaccatggcccctaagaagaagcgtaaagtgagccggatgaaccacgaccaggagttcgacccccctaaggtgtaccctcccgtccccgccgagaagagaaagcccatccgggtcctgagcctgttcgatggcatcgccaccggtctgctggtgctgaaggacctgggcatccaggtggataggtacattgcctccgaggtgtgcgaggactccatcaccgtgggaatggtgcgtcatcagggcaagatcatgtacgtgggcgacgtgcggagcgtgacacagaagcatatccaggagtggggccctttcgacctggtgatcggcggcagcccttgcaatgacctgagcatcgtgaacccagcccggaagggcctgtacgagggaaccggcagactgttcttcgagttttacagactgctgcacgacgcccggcctaaggaaggcgacgaccggcccttcttttggctgttcgagaatgtggtggccatgggagtcagcgacaagcgggatattagccggttcctggagagcaaccccgtgatgatcgatgccaaggaagtgagcgccgcccaccgggccagatacttctggggcaatctgcctggcatgaacagacccctggccagcaccgtgaacgacaagctggagctgcaggagtgcctggagcacggccggatcgccaagttcagcaaggtgagaaccatcaccacccgaagcaacagcatcaaacaaggcaaggaccagcactttcctgtgttcatgaacgagaaggaggacatcctgtggtgtaccgagatggagagagtgttcgggttcccagtccactacacagatgtcagcaacatgtctagactggccagacagagactgctgggaagaagctggtccgtccctgtgatcagacacctgttcgcccctctgaaggagtacttcgcctgcgtgagcagcggcaacagcaacgccaacagccggggccccagcttctctagcggcctggtgccactgtccctgagagggagccacatgggccccatggagatctacaaaaccgtgagcgcctggaagcggcagcctgtgcgcgtgctgagcctgtttcggaatatcgataaagtcctgaaaagcctgggattcctggagagcggctctggctccggcggtggcaccctgaagtacgtggaggatgtgacaaacgtggtcagacgggatgtggagaagtggggccccttcgatctggtgtacggcagcacccaacccctgggcagctcttgtgaccggtgccctggctggtacatgtttcagttccaccggatcctgcagtacgccctgccgagacaggagtcccagcggccattcttttggattttcatggacaacttgctgctgaccgaggatgaccaggaaactaccactcggttcctgcagaccgaagccgtgaccctgcaggacgtgagaggccgggactaccagaacgccatgcgggtgtggtccaacatccctggactgaaaagcaagcacgcacctctgacccctaaagaagaggagtacctgcaggcccaggtgcggagcagaagcaagctggacgcccctaaggtggatctgctggtgaagaattgcctcctgcccctgagagagtacttcaagtatttcagccagaatagtctgcccctgggaggcagcggcggcggcagccagagcctggtgaccttcggcgacgtggccgtggacttcagccaggaggagtgggagcagctgacctgcgcccagagggccctgtacagggacgtgatgctggagaactacaggaacctggtgagcctgggcctgtgcttcagcaagcccgacatgatcagcagcctggagcagagggaggagccctggatggccaagaggaagctgaccaggggcccctgccccgactggagggccgtgggcggcccaagcagcggcgcccctcctcccagcggcggcaggcggcccaagcagcggcgcccctcctcccagcggcggcagcccagccggctccccaacctctaccgaggagggcacctctgagtccgccacccccgagagcggccctggcacctccaccgagcccagcgagggcagcgcacccggcagccctgccggcagccccacctccacagaggagggaaccagcaccgagcccagcgaaggcagcgccccaggcaccagcaccgagcctagtgagcaggagattaaacggatcaacaagatcagaagaagacttgtgaaagacagcaacaccaagaaggccggcaagacaggccccatgaaaaccctgctggttagagtgatgacacccgatctgagagagcggctggaaaacctgagaaagaagcctgaaaatatcccccagcccatcagcaatacatctagagccaacctgaataagctgctgaccgattacaccgaaatgaagaaggcgatcctgcatgtgtactgggaagagttccagaaggaccctgtgggcctgatgagccgggtggcccagcctgccagcaagaagatcgatcagaacaagctgaaacctgagatggacgagaagggcaacctgaccaccgccggctttgcctgctctcagtgtggccagcccctgttcgtgtacaagctggagcaggtgtctgagaagggcaaggcttacaccaactacttcggacggtgcaatgtggccgagcacgaaaagctgatcctgctggcccagctgaagcccgagaaggatagcgacgaagccgtgacatatagcctgggaaagtttgggcagagggccctggatttctacagcattcatgtgaccaaggagtccacccaccccgtgaagcccctggcccagatcgccggaaacagatacgcctccggacctgtgggaaaggccctgagcgacgcatgtatgggcacaatcgcctccttcctgtctaagtaccaggacatcatcatcgaacaccagaaggtggtgaagggcaaccagaagagactggagagcctgcgggagctggccggcaaggaaaacctggaataccctagcgtgaccctgccacctcagcctcacaccaaggagggcgttgatgcctacaacgaagtgatcgcccgggtgcgaatgtgggtgaacctgaacctgtggcagaagctgaagctaagcagagatgatgccaagcctctgctgagactgaagggattcccttcctttcctctggtcgagagacaggccaacgaagtggactggtgggacatggtgtgtaacgtgaagaagctgatcaacgagaaaaaggaggatggcaaggtgttttggcagaatctggctggctacaagagacaggaagccctgagaccatacctgagcagcgaggaagatcggaagaagggaaagaaattcgctcggtaccagctgggcgacctgctgctgcacctggaaaagaagcacggcgaggactggggaaaggtgtacgacgaggcctgggagcggattgacaagaaagtggaaggcctgagcaagcacatcaagctggaagaggaacggagaagcgaggacgcccagagcaaggccgccctgaccgactggctgcgggctaaggccagcttcgtgatcgagggcctgaaggaggccgacaaggacgagttctgcagatgcgagctgaagctgcagaagtggtacggggacctgcggggaaagcccttcgccatcgaagccgagaacagcatcctggacatcagcggcttcagcaagcagtacaactgtgccttcatctggcagaaggacggcgtgaagaagctgaacctgtacctgatcatcaactacttcaagggcggcaagctgcggttcaagaagatcaaacctgaagccttcgaagccaacagattctacaccgtgatcaacaaaaagagcggcgagatcgtgcccatggaggtgaacttcaacttcgacgaccccaacctgatcatcctgcctctggcctttggcaagagacagggcagagaattcatctggaacgacctgctgtccctggaaaccggcagcctgaagctggccaacggaagagtgatcgagaagacactgtacaacagaagaacccggcaggatgagcctgccctgttcgtggccctgaccttcgagcggcgggaggtcctggactcctccaatatcaaaccaatgaacctgatcggcgtggcaagaggcgaaaacatccccgccgtgatcgccctgaccgaccccgagggctgcccactgagccggtttaaggatagcctgggaaacccaacccacatcctgagaatcggcgagagctataaggagaagcagcggaccatccaggccaagaaggaggtggagcagcggagagccggcggctacagccggaagtacgccagcaaagccaagaatctggcagacgatatggtgagaaacaccgctagagatctgctgtactacgccgtgacccaggatgccatgctgatcttcgccaacctgagccggggcttcggccggcagggcaagcggaccttcatggccgagagacagtacacacggatggaggactggctgaccgccaagctggcctacgagggcctgagcaagacctacctgtccaagacactggcccagtacacctccaagacatgcagcaactgtgggtttaccatcaccagcgccgactacgacagggtgctggagaagctgaagaagacagcaacaggctggatgaccacaattaacggcaaggagctgaaggtggagggccagattacctactacaacagatacaagagacagaacgtagtcaaggacctgtccgtcgagctggatagactgagcgaagaatctgtgaacaacgacatctcctcctggacaaagggcagaagcggagaagctctgagcctcctgaagaaaagattctcccatagacccgtgcaggagaagttcgtgtgcctgaactgcggcttcgagacacacgcagccgagcaagccgccctgaacatcgccagatcctggctgttcctgcggagccaggagtacaagaaataccagacaaacaagacaaccggcaacaccgataagagagccttcgtcgagacctggcagtccttttaccggaagaagcttaaggaggtgtggaaacctgccgtgcggtctggcggatctggcggaggctccaccagccccaagaaaaagagaaaagtctaagctgccttctgcggggcttgccttctggccatgcccttcttctctcccttgcacctgtacctcttggtctttgaataaagcctgagtaggaaggctagcaaaaaaaaaaaaaaaaaaaaaaaaaaaaaaaaaaaaaaaaaaaaaaaaaaaaaaaaaaaaaaaaaaaaaaaaaaaaaaaagcccagccggctccccaacctctaccgaggagggcacctctgagtccgccacccccgagagcggccctggcacctccaccgagcccagcgagggcagcgcacccggcagccctgccggcagccccacctccacagaggagggaaccagcaccgagcccagcgaaggcagcgccccaggcaccagcaccgagcctagtgagcaggagattaaacggatcaacaagatcagaagaagacttgtgaaagacagcaacaccaagaaggccggcaagacaggccccatgaaaaccctgctggttagagtgatgacacccgatctgagagagcggctggaaaacctgagaaagaagcctgaaaatatcccccagcccatcagcaatacatctagagccaacctgaataagctgctgaccgattacaccgaaatgaagaaggcgatcctgcatgtgtactgggaagagttccagaaggaccctgtgggcctgatgagccgggtggcccagcctgccagcaagaagatcgatcagaacaagctgaaacctgagatggacgagaagggcaacctgaccaccgccggctttgcctgctctcagtgtggccagcccctgttcgtgtacaagctggagcaggtgtctgagaagggcaaggcttacaccaactacttcggacggtgcaatgtggccgagcacgaaaagctgatcctgctggcccagctgaagcccgagaaggatagcgacgaagccgtgacatatagcctgggaaagtttgggcagagggccctggatttctacagcattcatgtgaccaaggagtccacccaccccgtgaagcccctggcccagatcgccggaaacagatacgcctccggacctgtgggaaaggccctgagcgacgcatgtatgggcacaatcgcctccttcctgtctaagtaccaggacatcatcatcgaacaccagaaggtggtgaagggcaaccagaagagactggagagcctgcgggagctggccggcaaggaaaacctggaataccctagcgtgaccctgccacctcagcctcacaccaaggagggcgttgatgcctacaacgaagtgatcgcccgggtgcgaatgtgggtgaacctgaacctgtggcagaagctgaagctaagcagagatgatgccaagcctctgctgagactgaagggattcccttcctttcctctggtcgagagacaggccaacgaagtggactggtgggacatggtgtgtaacgtgaagaagctgatcaacgagaaaaaggaggatggcaaggtgttttggcagaatctggctggctacaagagacaggaagccctgagaccatacctgagcagcgaggaagatcggaagaagggaaagaaattcgctcggtaccagctgggcgacctgctgctgcacctggaaaagaagcacggcgaggactggggaaaggtgtacgacgaggcctgggagcggattgacaagaaagtggaaggcctgagcaagcacatcaagctggaagaggaacggagaagcgaggacgcccagagcaaggccgccctgaccgactggctgcgggctaaggccagcttcgtgatcgagggcctgaaggaggccgacaaggacgagttctgcagatgcgagctgaagctgcagaagtggtacggggacctgcggggaaagcccttcgccatcgaagccgagaacagcatcctggacatcagcggcttcagcaagcagtacaactgtgccttcatctggcagaaggacggcgtgaagaagctgaacctgtacctgatcatcaactacttcaagggcggcaagctgcggttcaagaagatcaaacctgaagccttcgaagccaacagattctacaccgtgatcaacaaaaagagcggcgagatcgtgcccatggaggtgaacttcaacttcgacgaccccaacctgatcatcctgcctctggcctttggcaagagacagggcagagaattcatctggaacgacctgctgtccctggaaaccggcagcctgaagctggccaacggaagagtgatcgagaagacactgtacaacagaagaacccggcaggatgagcctgccctgttcgtggccctgaccttcgagcggcgggaggtcctggactcctccaatatcaaaccaatgaacctgatcggcgtggcaagaggcgaaaacatccccgccgtgatcgccctgaccgaccccgagggctgcccactgagccggtttaaggatagcctgggaaacccaacccacatcctgagaatcggcgagagctataaggagaagcagcggaccatccaggccaagaaggaggtggagcagcggagagccggcggctacagccggaagtacgccagcaaagccaagaatctggcagacgatatggtgagaaacaccgctagagatctgctgtactacgccgtgacccaggatgccatgctgatcttcgccaacctgagccggggcttcggccggcagggcaagcggaccttcatggccgagagacagtacacacggatggaggactggctgaccgccaagctggcctacgagggcctgagcaagacctacctgtccaagacactggcccagtacacctccaagacatgcagcaactgtgggtttaccatcaccagcgccgactacgacagggtgctggagaagctgaagaagacagcaacaggctggatgaccacaattaacggcaaggagctgaaggtggagggccagattacctactacaacagatacaagagacagaacgtagtcaaggacctgtccgtcgagctggatagactgagcgaagaatctgtgaacaacgacatctcctcctggacaaagggcagaagcggagaagctctgagcctcctgaagaaaagattctcccatagacccgtgcaggagaagttcgtgtgcctgaactgcggcttcgagacacacgcagccgagcaagccgccctgaacatcgccagatcctggctgttcctgcggagccaggagtacaagaaataccagacaaacaagacaaccggcaacaccgataagagagccttcgtcgagacctggcagtccttttaccggaagaagcttaaggaggtgtggaaacctgccgtgcggtctggcggatctggcggaggctccaccagccccaagaaaaagagaaaagtctaagctgccttctgcggggcttgccttctggccatgcccttcttctctcccttgcacctgtacctcttggtctttgaataaagcctgagtaggaaggctagcaaaaaaaaaaaaaaaaaaaaaaaaaaaaaaaaaaaaaaaaaaaaaaaaaaaaaaaaaaaaaaaaaaaaaaaaaaaaaaaa

SEQ ID NO: 8959 - RNA, 8787 nt, synthetic construct
  source 1..8787: mol_type = other RNA
aggaaataagagagaaaagaagagtaagaagaaatataagagccaccatggcccctaagaagaagcgtaaagtgagccggatgaaccacgaccaggagttcgacccccctaaggtgtaccctcccgtccccgccgagaagagaaagcccatccgggtcctgagcctgttcgatggcatcgccaccggtctgctggtgctgaaggacctgggcatccaggtggataggtacattgcctccgaggtgtgcgaggactccatcaccgtgggaatggtgcgtcatcagggcaagatcatgtacgtgggcgacgtgcggagcgtgacacagaagcatatccaggagtggggccctttcgacctggtgatcggcggcagcccttgcaatgacctgagcatcgtgaacccagcccggaagggcctgtacgagggaaccggcagactgttcttcgagttttacagactgctgcacgacgcccggcctaaggaaggcgacgaccggcccttcttttggctgttcgagaatgtggtggccatgggagtcagcgacaagcgggatattagccggttcctggagagcaaccccgtgatgatcgatgccaaggaagtgagcgccgcccaccgggccagatacttctggggcaatctgcctggcatgaacagacccctggccagcaccgtgaacgacaagctggagctgcaggagtgcctggagcacggccggatcgccaagttcagcaaggtgagaaccatcaccacccgaagcaacagcatcaaacaaggcaaggaccagcactttcctgtgttcatgaacgagaaggaggacatcctgtggtgtaccgagatggagagagtgttcgggttcccagtccactacacagatgtcagcaacatgtctagactggccagacagagactgctgggaagaagctggtccgtccctgtgatcagacacctgttcgcccctctgaaggagtacttcgcctgcgtgagcagcggcaacagcaacgccaacagccggggccccagcttctctagcggcctggtgccactgtccctgagagggagccacatgggccccatggagatctacaaaaccgtgagcgcctggaagcggcagcctgtgcgcgtgctgagcctgtttcggaatatcgataaagtcctgaaaagcctgggattcctggagagcggctctggctccggcggtggcaccctgaagtacgtggaggatgtgacaaacgtggtcagacgggatgtggagaagtggggccccttcgatctggtgtacggcagcacccaacccctgggcagctcttgtgaccggtgccctggctggtacatgtttcagttccaccggatcctgcagtacgccctgccgagacaggagtcccagcggccattcttttggattttcatggacaacttgctgctgaccgaggatgaccaggaaactaccactcggttcctgcagaccgaagccgtgaccctgcaggacgtgagaggccgggactaccagaacgccatgcgggtgtggtccaacatccctggactgaaaagcaagcacgcacctctgacccctaaagaagaggagtacctgcaggcccaggtgcggagcagaagcaagctggacgcccctaaggtggatctgctggtgaagaattgcctcctgcccctgagagagtacttcaagtatttcagccagaatagtctgcccctgggaggcagcggcggcggcatgcacctgaccgcctggccccagaagagcgtgaccttcgaggacgtggccgtgtacttcacccaggccgagtgggacggcctgagccccgcccagaggaccctgtacagggacgtgatgctggagaactacggcaacgtggccagcctgggcttccccctgctgaagcccgccgtgatcagccagctggagggcggcggcgagctgggcggccccagccccctggccgccggcaccggcctgggcggcccaagcagcggcgcccctcctcccagcggcggcaggcggcccaagcagcggcgcccctcctcccagcggcggcagcccagccggctccccaacctctaccgaggagggcacctctgagtccgccacccccgagagcggccctggcacctccaccgagcccagcgagggcagcgcacccggcagccctgccggcagccccacctccacagaggagggaaccagcaccgagcccagcgaaggcagcgccccaggcaccagcaccgagcctagtgagcaggagattaaacggatcaacaagatcagaagaagacttgtgaaagacagcaacaccaagaaggccggcaagacaggccccatgaaaaccctgctggttagagtgatgacacccgatctgagagagcggctggaaaacctgagaaagaagcctgaaaatatcccccagcccatcagcaatacatctagagccaacctgaataagctgctgaccgattacaccgaaatgaagaaggcgatcctgcatgtgtactgggaagagttccagaaggaccctgtgggcctgatgagccgggtggcccagcctgccagcaagaagatcgatcagaacaagctgaaacctgagatggacgagaagggcaacctgaccaccgccggctttgcctgctctcagtgtggccagcccctgttcgtgtacaagctggagcaggtgtctgagaagggcaaggcttacaccaactacttcggacggtgcaatgtggccgagcacgaaaagctgatcctgctggcccagctgaagcccgagaaggatagcgacgaagccgtgacatatagcctgggaaagtttgggcagagggccctggatttctacagcattcatgtgaccaaggagtccacccaccccgtgaagcccctggcccagatcgccggaaacagatacgcctccggacctgtgggaaaggccctgagcgacgcatgtatgggcacaatcgcctccttcctgtctaagtaccaggacatcatcatcgaacaccagaaggtggtgaagggcaaccagaagagactggagagcctgcgggagctggccggcaaggaaaacctggaataccctagcgtgaccctgccacctcagcctcacaccaaggagggcgttgatgcctacaacgaagtgatcgcccgggtgcgaatgtgggtgaacctgaacctgtggcagaagctgaagctaagcagagatgatgccaagcctctgctgagactgaagggattcccttcctttcctctggtcgagagacaggccaacgaagtggactggtgggacatggtgtgtaacgtgaagaagctgatcaacgagaaaaaggaggatggcaaggtgttttggcagaatctggctggctacaagagacaggaagccctgagaccatacctgagcagcgaggaagatcggaagaagggaaagaaattcgctcggtaccagctgggcgacctgctgctgcacctggaaaagaagcacggcgaggactggggaaaggtgtacgacgaggcctgggagcggattgacaagaaagtggaaggcctgagcaagcacatcaagctggaagaggaacggagaagcgaggacgcccagagcaaggccgccctgaccgactggctgcgggctaaggccagcttcgtgatcgagggcctgaaggaggccgacaaggacgagttctgcagatgcgagctgaagctgcagaagtggtacggggacctgcggggaaagcccttcgccatcgaagccgagaacagcatcctggacatcagcggcttcagcaagcagtacaactgtgccttcatctggcagaaggacggcgtgaagaagctgaacctgtacctgatcatcaactacttcaagggcggcaagctgcggttcaagaagatcaaacctgaagccttcgaagccaacagattctacaccgtgatcaacaaaaagagcggcgagatcgtgcccatggaggtgaacttcaacttcgacgaccccaacctgatcatcctgcctctggcctttggcaagagacagggcagagaattcatctggaacgacctgctgtccctggaaaccggcagcctgaagctggccaacggaagagtgatcgagaagacactgtacaacagaagaacccggcaggatgagcctgccctgttcgtggccctgaccttcgagcggcgggaggtcctggactcctccaatatcaaaccaatgaacctgatcggcgtggcaagaggcgaaaacatccccgccgtgatcgccctgaccgaccccgagggctgcccactgagccggtttaaggatagcctgggaaacccaacccacatcctgagaatcggcgagagctataaggagaagcagcggaccatccaggccaagaaggaggtggagcagcggagagccggcggctacagccggaagtacgccagcaaagccaagaatctggcagacgatatggtgagaaacaccgctagagatctgctgtactacgccgtgacccaggatgccatgctgatcttcgccaacctgagccggggcttcggccggcagggcaagcggaccttcatggccgagagacagtacacacggatggaggactggctgaccgccaagctggcctacgagggcctgagcaagacctacctgtccaagacactggcccagtacacctccaagacatgcagcaactgtgggtttaccatcaccagcgccgactacgacagggtgctggagaagctgaagaagacagcaacaggctggatgaccacaattaacggcaaggagctgaaggtggagggccagattacctactacaacagatacaagagacagaacgtagtcaaggacctgtccgtcgagctggatagactgagcgaagaatctgtgaacaacgacatctcctcctggacaaagggcagaagcggagaagctctgagcctcctgaagaaaagattctcccatagacccgtgcaggagaagttcgtgtgcctgaactgcggcttcgagacacacgcagccgagcaagccgccctgaacatcgccagatcctggctgttcctgcggagccaggagtacaagaaataccagacaaacaagacaaccggcaacaccgataagagagccttcgtcgagacctggcagtccttttaccggaagaagcttaaggaggtgtggaaacctgccgtgcggtctggcggatctggcggaggctccaccagccccaagaaaaagagaaaagtctaagctgccttctgcggggcttgccttctggccatgcccttcttctctcccttgcacctgtacctcttggtctttgaataaagcctgagtaggaaggctagcaaaaaaaaaaaaaaaaaaaaaaaaaaaaaaaaaaaaaaaaaaaaaaaaaaaaaaaaaaaaaaaaaaaaaaaaaaaaaaaagcccagccggctccccaacctctaccgaggagggcacctctgagtccgccacccccgagagcggccctggcacctccaccgagcccagcgagggcagcgcacccggcagccctgccggcagccccacctccacagaggagggaaccagcaccgagcccagcgaaggcagcgccccaggcaccagcaccgagcctagtgagcaggagattaaacggatcaacaagatcagaagaagacttgtgaaagacagcaacaccaagaaggccggcaagacaggccccatgaaaaccctgctggttagagtgatgacacccgatctgagagagcggctggaaaacctgagaaagaagcctgaaaatatcccccagcccatcagcaatacatctagagccaacctgaataagctgctgaccgattacaccgaaatgaagaaggcgatcctgcatgtgtactgggaagagttccagaaggaccctgtgggcctgatgagccgggtggcccagcctgccagcaagaagatcgatcagaacaagctgaaacctgagatggacgagaagggcaacctgaccaccgccggctttgcctgctctcagtgtggccagcccctgttcgtgtacaagctggagcaggtgtctgagaagggcaaggcttacaccaactacttcggacggtgcaatgtggccgagcacgaaaagctgatcctgctggcccagctgaagcccgagaaggatagcgacgaagccgtgacatatagcctgggaaagtttgggcagagggccctggatttctacagcattcatgtgaccaaggagtccacccaccccgtgaagcccctggcccagatcgccggaaacagatacgcctccggacctgtgggaaaggccctgagcgacgcatgtatgggcacaatcgcctccttcctgtctaagtaccaggacatcatcatcgaacaccagaaggtggtgaagggcaaccagaagagactggagagcctgcgggagctggccggcaaggaaaacctggaataccctagcgtgaccctgccacctcagcctcacaccaaggagggcgttgatgcctacaacgaagtgatcgcccgggtgcgaatgtgggtgaacctgaacctgtggcagaagctgaagctaagcagagatgatgccaagcctctgctgagactgaagggattcccttcctttcctctggtcgagagacaggccaacgaagtggactggtgggacatggtgtgtaacgtgaagaagctgatcaacgagaaaaaggaggatggcaaggtgttttggcagaatctggctggctacaagagacaggaagccctgagaccatacctgagcagcgaggaagatcggaagaagggaaagaaattcgctcggtaccagctgggcgacctgctgctgcacctggaaaagaagcacggcgaggactggggaaaggtgtacgacgaggcctgggagcggattgacaagaaagtggaaggcctgagcaagcacatcaagctggaagaggaacggagaagcgaggacgcccagagcaaggccgccctgaccgactggctgcgggctaaggccagcttcgtgatcgagggcctgaaggaggccgacaaggacgagttctgcagatgcgagctgaagctgcagaagtggtacggggacctgcggggaaagcccttcgccatcgaagccgagaacagcatcctggacatcagcggcttcagcaagcagtacaactgtgccttcatctggcagaaggacggcgtgaagaagctgaacctgtacctgatcatcaactacttcaagggcggcaagctgcggttcaagaagatcaaacctgaagccttcgaagccaacagattctacaccgtgatcaacaaaaagagcggcgagatcgtgcccatggaggtgaacttcaacttcgacgaccccaacctgatcatcctgcctctggcctttggcaagagacagggcagagaattcatctggaacgacctgctgtccctggaaaccggcagcctgaagctggccaacggaagagtgatcgagaagacactgtacaacagaagaacccggcaggatgagcctgccctgttcgtggccctgaccttcgagcggcgggaggtcctggactcctccaatatcaaaccaatgaacctgatcggcgtggcaagaggcgaaaacatccccgccgtgatcgccctgaccgaccccgagggctgcccactgagccggtttaaggatagcctgggaaacccaacccacatcctgagaatcggcgagagctataaggagaagcagcggaccatccaggccaagaaggaggtggagcagcggagagccggcggctacagccggaagtacgccagcaaagccaagaatctggcagacgatatggtgagaaacaccgctagagatctgctgtactacgccgtgacccaggatgccatgctgatcttcgccaacctgagccggggcttcggccggcagggcaagcggaccttcatggccgagagacagtacacacggatggaggactggctgaccgccaagctggcctacgagggcctgagcaagacctacctgtccaagacactggcccagtacacctccaagacatgcagcaactgtgggtttaccatcaccagcgccgactacgacagggtgctggagaagctgaagaagacagcaacaggctggatgaccacaattaacggcaaggagctgaaggtggagggccagattacctactacaacagatacaagagacagaacgtagtcaaggacctgtccgtcgagctggatagactgagcgaagaatctgtgaacaacgacatctcctcctggacaaagggcagaagcggagaagctctgagcctcctgaagaaaagattctcccatagacccgtgcaggagaagttcgtgtgcctgaactgcggcttcgagacacacgcagccgagcaagccgccctgaacatcgccagatcctggctgttcctgcggagccaggagtacaagaaataccagacaaacaagacaaccggcaacaccgataagagagccttcgtcgagacctggcagtccttttaccggaagaagcttaaggaggtgtggaaacctgccgtgcggtctggcggatctggcggaggctccaccagccccaagaaaaagagaaaagtctaagctgccttctgcggggcttgccttctggccatgcccttcttctctcccttgcacctgtacctcttggtctttgaataaagcctgagtaggaaggctagcaaaaaaaaaaaaaaaaaaaaaaaaaaaaaaaaaaaaaaaaaaaaaaaaaaaaaaaaaaaaaaaaaaaaaaaaaaaaaaaa

SEQ ID NO: 8960 - RNA, 8787 nt, synthetic construct
  source 1..8787: mol_type = other RNA
aggaaataagagagaaaagaagagtaagaagaaatataagagccaccatggcccctaagaagaagcgtaaagtgagccggatgaaccacgaccaggagttcgacccccctaaggtgtaccctcccgtccccgccgagaagagaaagcccatccgggtcctgagcctgttcgatggcatcgccaccggtctgctggtgctgaaggacctgggcatccaggtggataggtacattgcctccgaggtgtgcgaggactccatcaccgtgggaatggtgcgtcatcagggcaagatcatgtacgtgggcgacgtgcggagcgtgacacagaagcatatccaggagtggggccctttcgacctggtgatcggcggcagcccttgcaatgacctgagcatcgtgaacccagcccggaagggcctgtacgagggaaccggcagactgttcttcgagttttacagactgctgcacgacgcccggcctaaggaaggcgacgaccggcccttcttttggctgttcgagaatgtggtggccatgggagtcagcgacaagcgggatattagccggttcctggagagcaaccccgtgatgatcgatgccaaggaagtgagcgccgcccaccgggccagatacttctggggcaatctgcctggcatgaacagacccctggccagcaccgtgaacgacaagctggagctgcaggagtgcctggagcacggccggatcgccaagttcagcaaggtgagaaccatcaccacccgaagcaacagcatcaaacaaggcaaggaccagcactttcctgtgttcatgaacgagaaggaggacatcctgtggtgtaccgagatggagagagtgttcgggttcccagtccactacacagatgtcagcaacatgtctagactggccagacagagactgctgggaagaagctggtccgtccctgtgatcagacacctgttcgcccctctgaaggagtacttcgcctgcgtgagcagcggcaacagcaacgccaacagccggggccccagcttctctagcggcctggtgccactgtccctgagagggagccacatgggccccatggagatctacaaaaccgtgagcgcctggaagcggcagcctgtgcgcgtgctgagcctgtttcggaatatcgataaagtcctgaaaagcctgggattcctggagagcggctctggctccggcggtggcaccctgaagtacgtggaggatgtgacaaacgtggtcagacgggatgtggagaagtggggccccttcgatctggtgtacggcagcacccaacccctgggcagctcttgtgaccggtgccctggctggtacatgtttcagttccaccggatcctgcagtacgccctgccgagacaggagtcccagcggccattcttttggattttcatggacaacttgctgctgaccgaggatgaccaggaaactaccactcggttcctgcagaccgaagccgtgaccctgcaggacgtgagaggccgggactaccagaacgccatgcgggtgtggtccaacatccctggactgaaaagcaagcacgcacctctgacccctaaagaagaggagtacctgcaggcccaggtgcggagcagaagcaagctggacgcccctaaggtggatctgctggtgaagaattgcctcctgcccctgagagagtacttcaagtatttcagccagaatagtctgcccctgggaggcagcggcggcggcgcccccgtgaccttcggcgacctggccatctacttcagccaggaggagtgggagtggctgagccccatccagaaggacctgtacgaggacgtgatgctggagaactaccagaacctggtgagcctgggcctgtgcttcaggaggcccaacgtgatcaccctgctggagaggggcaaggccccctggatggtggaccccgtgaagaggaggaggggcctggacctgggcagcaagggcgagaccggcggcccaagcagcggcgcccctcctcccagcggcggcaggcggcccaagcagcggcgcccctcctcccagcggcggcagcccagccggctccccaacctctaccgaggagggcacctctgagtccgccacccccgagagcggccctggcacctccaccgagcccagcgagggcagcgcacccggcagccctgccggcagccccacctccacagaggagggaaccagcaccgagcccagcgaaggcagcgccccaggcaccagcaccgagcctagtgagcaggagattaaacggatcaacaagatcagaagaagacttgtgaaagacagcaacaccaagaaggccggcaagacaggccccatgaaaaccctgctggttagagtgatgacacccgatctgagagagcggctggaaaacctgagaaagaagcctgaaaatatcccccagcccatcagcaatacatctagagccaacctgaataagctgctgaccgattacaccgaaatgaagaaggcgatcctgcatgtgtactgggaagagttccagaaggaccctgtgggcctgatgagccgggtggcccagcctgccagcaagaagatcgatcagaacaagctgaaacctgagatggacgagaagggcaacctgaccaccgccggctttgcctgctctcagtgtggccagcccctgttcgtgtacaagctggagcaggtgtctgagaagggcaaggcttacaccaactacttcggacggtgcaatgtggccgagcacgaaaagctgatcctgctggcccagctgaagcccgagaaggatagcgacgaagccgtgacatatagcctgggaaagtttgggcagagggccctggatttctacagcattcatgtgaccaaggagtccacccaccccgtgaagcccctggcccagatcgccggaaacagatacgcctccggacctgtgggaaaggccctgagcgacgcatgtatgggcacaatcgcctccttcctgtctaagtaccaggacatcatcatcgaacaccagaaggtggtgaagggcaaccagaagagactggagagcctgcgggagctggccggcaaggaaaacctggaataccctagcgtgaccctgccacctcagcctcacaccaaggagggcgttgatgcctacaacgaagtgatcgcccgggtgcgaatgtgggtgaacctgaacctgtggcagaagctgaagctaagcagagatgatgccaagcctctgctgagactgaagggattcccttcctttcctctggtcgagagacaggccaacgaagtggactggtgggacatggtgtgtaacgtgaagaagctgatcaacgagaaaaaggaggatggcaaggtgttttggcagaatctggctggctacaagagacaggaagccctgagaccatacctgagcagcgaggaagatcggaagaagggaaagaaattcgctcggtaccagctgggcgacctgctgctgcacctggaaaagaagcacggcgaggactggggaaaggtgtacgacgaggcctgggagcggattgacaagaaagtggaaggcctgagcaagcacatcaagctggaagaggaacggagaagcgaggacgcccagagcaaggccgccctgaccgactggctgcgggctaaggccagcttcgtgatcgagggcctgaaggaggccgacaaggacgagttctgcagatgcgagctgaagctgcagaagtggtacggggacctgcggggaaagcccttcgccatcgaagccgagaacagcatcctggacatcagcggcttcagcaagcagtacaactgtgccttcatctggcagaaggacggcgtgaagaagctgaacctgtacctgatcatcaactacttcaagggcggcaagctgcggttcaagaagatcaaacctgaagccttcgaagccaacagattctacaccgtgatcaacaaaaagagcggcgagatcgtgcccatggaggtgaacttcaacttcgacgaccccaacctgatcatcctgcctctggcctttggcaagagacagggcagagaattcatctggaacgacctgctgtccctggaaaccggcagcctgaagctggccaacggaagagtgatcgagaagacactgtacaacagaagaacccggcaggatgagcctgccctgttcgtggccctgaccttcgagcggcgggaggtcctggactcctccaatatcaaaccaatgaacctgatcggcgtggcaagaggcgaaaacatccccgccgtgatcgccctgaccgaccccgagggctgcccactgagccggtttaaggatagcctgggaaacccaacccacatcctgagaatcggcgagagctataaggagaagcagcggaccatccaggccaagaaggaggtggagcagcggagagccggcggctacagccggaagtacgccagcaaagccaagaatctggcagacgatatggtgagaaacaccgctagagatctgctgtactacgccgtgacccaggatgccatgctgatcttcgccaacctgagccggggcttcggccggcagggcaagcggaccttcatggccgagagacagtacacacggatggaggactggctgaccgccaagctggcctacgagggcctgagcaagacctacctgtccaagacactggcccagtacacctccaagacatgcagcaactgtgggtttaccatcaccagcgccgactacgacagggtgctggagaagctgaagaagacagcaacaggctggatgaccacaattaacggcaaggagctgaaggtggagggccagattacctactacaacagatacaagagacagaacgtagtcaaggacctgtccgtcgagctggatagactgagcgaagaatctgtgaacaacgacatctcctcctggacaaagggcagaagcggagaagctctgagcctcctgaagaaaagattctcccatagacccgtgcaggagaagttcgtgtgcctgaactgcggcttcgagacacacgcagccgagcaagccgccctgaacatcgccagatcctggctgttcctgcggagccaggagtacaagaaataccagacaaacaagacaaccggcaacaccgataagagagccttcgtcgagacctggcagtccttttaccggaagaagcttaaggaggtgtggaaacctgccgtgcggtctggcggatctggcggaggctccaccagccccaagaaaaagagaaaagtctaagctgccttctgcggggcttgccttctggccatgcccttcttctctcccttgcacctgtacctcttggtctttgaataaagcctgagtaggaaggctagcaaaaaaaaaaaaaaaaaaaaaaaaaaaaaaaaaaaaaaaaaaaaaaaaaaaaaaaaaaaaaaaaaaaaaaaaaaaaaaaagcccagccggctccccaacctctaccgaggagggcacctctgagtccgccacccccgagagcggccctggcacctccaccgagcccagcgagggcagcgcacccggcagccctgccggcagccccacctccacagaggagggaaccagcaccgagcccagcgaaggcagcgccccaggcaccagcaccgagcctagtgagcaggagattaaacggatcaacaagatcagaagaagacttgtgaaagacagcaacaccaagaaggccggcaagacaggccccatgaaaaccctgctggttagagtgatgacacccgatctgagagagcggctggaaaacctgagaaagaagcctgaaaatatcccccagcccatcagcaatacatctagagccaacctgaataagctgctgaccgattacaccgaaatgaagaaggcgatcctgcatgtgtactgggaagagttccagaaggaccctgtgggcctgatgagccgggtggcccagcctgccagcaagaagatcgatcagaacaagctgaaacctgagatggacgagaagggcaacctgaccaccgccggctttgcctgctctcagtgtggccagcccctgttcgtgtacaagctggagcaggtgtctgagaagggcaaggcttacaccaactacttcggacggtgcaatgtggccgagcacgaaaagctgatcctgctggcccagctgaagcccgagaaggatagcgacgaagccgtgacatatagcctgggaaagtttgggcagagggccctggatttctacagcattcatgtgaccaaggagtccacccaccccgtgaagcccctggcccagatcgccggaaacagatacgcctccggacctgtgggaaaggccctgagcgacgcatgtatgggcacaatcgcctccttcctgtctaagtaccaggacatcatcatcgaacaccagaaggtggtgaagggcaaccagaagagactggagagcctgcgggagctggccggcaaggaaaacctggaataccctagcgtgaccctgccacctcagcctcacaccaaggagggcgttgatgcctacaacgaagtgatcgcccgggtgcgaatgtgggtgaacctgaacctgtggcagaagctgaagctaagcagagatgatgccaagcctctgctgagactgaagggattcccttcctttcctctggtcgagagacaggccaacgaagtggactggtgggacatggtgtgtaacgtgaagaagctgatcaacgagaaaaaggaggatggcaaggtgttttggcagaatctggctggctacaagagacaggaagccctgagaccatacctgagcagcgaggaagatcggaagaagggaaagaaattcgctcggtaccagctgggcgacctgctgctgcacctggaaaagaagcacggcgaggactggggaaaggtgtacgacgaggcctgggagcggattgacaagaaagtggaaggcctgagcaagcacatcaagctggaagaggaacggagaagcgaggacgcccagagcaaggccgccctgaccgactggctgcgggctaaggccagcttcgtgatcgagggcctgaaggaggccgacaaggacgagttctgcagatgcgagctgaagctgcagaagtggtacggggacctgcggggaaagcccttcgccatcgaagccgagaacagcatcctggacatcagcggcttcagcaagcagtacaactgtgccttcatctggcagaaggacggcgtgaagaagctgaacctgtacctgatcatcaactacttcaagggcggcaagctgcggttcaagaagatcaaacctgaagccttcgaagccaacagattctacaccgtgatcaacaaaaagagcggcgagatcgtgcccatggaggtgaacttcaacttcgacgaccccaacctgatcatcctgcctctggcctttggcaagagacagggcagagaattcatctggaacgacctgctgtccctggaaaccggcagcctgaagctggccaacggaagagtgatcgagaagacactgtacaacagaagaacccggcaggatgagcctgccctgttcgtggccctgaccttcgagcggcgggaggtcctggactcctccaatatcaaaccaatgaacctgatcggcgtggcaagaggcgaaaacatccccgccgtgatcgccctgaccgaccccgagggctgcccactgagccggtttaaggatagcctgggaaacccaacccacatcctgagaatcggcgagagctataaggagaagcagcggaccatccaggccaagaaggaggtggagcagcggagagccggcggctacagccggaagtacgccagcaaagccaagaatctggcagacgatatggtgagaaacaccgctagagatctgctgtactacgccgtgacccaggatgccatgctgatcttcgccaacctgagccggggcttcggccggcagggcaagcggaccttcatggccgagagacagtacacacggatggaggactggctgaccgccaagctggcctacgagggcctgagcaagacctacctgtccaagacactggcccagtacacctccaagacatgcagcaactgtgggtttaccatcaccagcgccgactacgacagggtgctggagaagctgaagaagacagcaacaggctggatgaccacaattaacggcaaggagctgaaggtggagggccagattacctactacaacagatacaagagacagaacgtagtcaaggacctgtccgtcgagctggatagactgagcgaagaatctgtgaacaacgacatctcctcctggacaaagggcagaagcggagaagctctgagcctcctgaagaaaagattctcccatagacccgtgcaggagaagttcgtgtgcctgaactgcggcttcgagacacacgcagccgagcaagccgccctgaacatcgccagatcctggctgttcctgcggagccaggagtacaagaaataccagacaaacaagacaaccggcaacaccgataagagagccttcgtcgagacctggcagtccttttaccggaagaagcttaaggaggtgtggaaacctgccgtgcggtctggcggatctggcggaggctccaccagccccaagaaaaagagaaaagtctaagctgccttctgcggggcttgccttctggccatgcccttcttctctcccttgcacctgtacctcttggtctttgaataaagcctgagtaggaaggctagcaaaaaaaaaaaaaaaaaaaaaaaaaaaaaaaaaaaaaaaaaaaaaaaaaaaaaaaaaaaaaaaaaaaaaaaaaaaaaaaa

SEQ ID NO: 8961 - RNA, 8787 nt, synthetic construct
  source 1..8787: mol_type = other RNA
aggaaataagagagaaaagaagagtaagaagaaatataagagccaccatggcccctaagaagaagcgtaaagtgagccggatgaaccacgaccaggagttcgacccccctaaggtgtaccctcccgtccccgccgagaagagaaagcccatccgggtcctgagcctgttcgatggcatcgccaccggtctgctggtgctgaaggacctgggcatccaggtggataggtacattgcctccgaggtgtgcgaggactccatcaccgtgggaatggtgcgtcatcagggcaagatcatgtacgtgggcgacgtgcggagcgtgacacagaagcatatccaggagtggggccctttcgacctggtgatcggcggcagcccttgcaatgacctgagcatcgtgaacccagcccggaagggcctgtacgagggaaccggcagactgttcttcgagttttacagactgctgcacgacgcccggcctaaggaaggcgacgaccggcccttcttttggctgttcgagaatgtggtggccatgggagtcagcgacaagcgggatattagccggttcctggagagcaaccccgtgatgatcgatgccaaggaagtgagcgccgcccaccgggccagatacttctggggcaatctgcctggcatgaacagacccctggccagcaccgtgaacgacaagctggagctgcaggagtgcctggagcacggccggatcgccaagttcagcaaggtgagaaccatcaccacccgaagcaacagcatcaaacaaggcaaggaccagcactttcctgtgttcatgaacgagaaggaggacatcctgtggtgtaccgagatggagagagtgttcgggttcccagtccactacacagatgtcagcaacatgtctagactggccagacagagactgctgggaagaagctggtccgtccctgtgatcagacacctgttcgcccctctgaaggagtacttcgcctgcgtgagcagcggcaacagcaacgccaacagccggggccccagcttctctagcggcctggtgccactgtccctgagagggagccacatgggccccatggagatctacaaaaccgtgagcgcctggaagcggcagcctgtgcgcgtgctgagcctgtttcggaatatcgataaagtcctgaaaagcctgggattcctggagagcggctctggctccggcggtggcaccctgaagtacgtggaggatgtgacaaacgtggtcagacgggatgtggagaagtggggccccttcgatctggtgtacggcagcacccaacccctgggcagctcttgtgaccggtgccctggctggtacatgtttcagttccaccggatcctgcagtacgccctgccgagacaggagtcccagcggccattcttttggattttcatggacaacttgctgctgaccgaggatgaccaggaaactaccactcggttcctgcagaccgaagccgtgaccctgcaggacgtgagaggccgggactaccagaacgccatgcgggtgtggtccaacatccctggactgaaaagcaagcacgcacctctgacccctaaagaagaggagtacctgcaggcccaggtgcggagcagaagcaagctggacgcccctaaggtggatctgctggtgaagaattgcctcctgcccctgagagagtacttcaagtatttcagccagaatagtctgcccctgggaggcagcggcggcggcagcaaggcccccatcaccttcggcgacctggccatctacttcagccaggaggagtgggagtggctgagccccatccagaaggacctgtacgaggacgtgatgctggagaactacaggaacctggtgagcctgggcctgagcttcaggaggcccaacgtgatcaccctgctggagaagggcaaggccccctggatgatcgagcccgtgaggaggaggagggcccccgacagcggcagcaagtgcggcggcccaagcagcggcgcccctcctcccagcggcggcaggcggcccaagcagcggcgcccctcctcccagcggcggcagcccagccggctccccaacctctaccgaggagggcacctctgagtccgccacccccgagagcggccctggcacctccaccgagcccagcgagggcagcgcacccggcagccctgccggcagccccacctccacagaggagggaaccagcaccgagcccagcgaaggcagcgccccaggcaccagcaccgagcctagtgagcaggagattaaacggatcaacaagatcagaagaagacttgtgaaagacagcaacaccaagaaggccggcaagacaggccccatgaaaaccctgctggttagagtgatgacacccgatctgagagagcggctggaaaacctgagaaagaagcctgaaaatatcccccagcccatcagcaatacatctagagccaacctgaataagctgctgaccgattacaccgaaatgaagaaggcgatcctgcatgtgtactgggaagagttccagaaggaccctgtgggcctgatgagccgggtggcccagcctgccagcaagaagatcgatcagaacaagctgaaacctgagatggacgagaagggcaacctgaccaccgccggctttgcctgctctcagtgtggccagcccctgttcgtgtacaagctggagcaggtgtctgagaagggcaaggcttacaccaactacttcggacggtgcaatgtggccgagcacgaaaagctgatcctgctggcccagctgaagcccgagaaggatagcgacgaagccgtgacatatagcctgggaaagtttgggcagagggccctggatttctacagcattcatgtgaccaaggagtccacccaccccgtgaagcccctggcccagatcgccggaaacagatacgcctccggacctgtgggaaaggccctgagcgacgcatgtatgggcacaatcgcctccttcctgtctaagtaccaggacatcatcatcgaacaccagaaggtggtgaagggcaaccagaagagactggagagcctgcgggagctggccggcaaggaaaacctggaataccctagcgtgaccctgccacctcagcctcacaccaaggagggcgttgatgcctacaacgaagtgatcgcccgggtgcgaatgtgggtgaacctgaacctgtggcagaagctgaagctaagcagagatgatgccaagcctctgctgagactgaagggattcccttcctttcctctggtcgagagacaggccaacgaagtggactggtgggacatggtgtgtaacgtgaagaagctgatcaacgagaaaaaggaggatggcaaggtgttttggcagaatctggctggctacaagagacaggaagccctgagaccatacctgagcagcgaggaagatcggaagaagggaaagaaattcgctcggtaccagctgggcgacctgctgctgcacctggaaaagaagcacggcgaggactggggaaaggtgtacgacgaggcctgggagcggattgacaagaaagtggaaggcctgagcaagcacatcaagctggaagaggaacggagaagcgaggacgcccagagcaaggccgccctgaccgactggctgcgggctaaggccagcttcgtgatcgagggcctgaaggaggccgacaaggacgagttctgcagatgcgagctgaagctgcagaagtggtacggggacctgcggggaaagcccttcgccatcgaagccgagaacagcatcctggacatcagcggcttcagcaagcagtacaactgtgccttcatctggcagaaggacggcgtgaagaagctgaacctgtacctgatcatcaactacttcaagggcggcaagctgcggttcaagaagatcaaacctgaagccttcgaagccaacagattctacaccgtgatcaacaaaaagagcggcgagatcgtgcccatggaggtgaacttcaacttcgacgaccccaacctgatcatcctgcctctggcctttggcaagagacagggcagagaattcatctggaacgacctgctgtccctggaaaccggcagcctgaagctggccaacggaagagtgatcgagaagacactgtacaacagaagaacccggcaggatgagcctgccctgttcgtggccctgaccttcgagcggcgggaggtcctggactcctccaatatcaaaccaatgaacctgatcggcgtggcaagaggcgaaaacatccccgccgtgatcgccctgaccgaccccgagggctgcccactgagccggtttaaggatagcctgggaaacccaacccacatcctgagaatcggcgagagctataaggagaagcagcggaccatccaggccaagaaggaggtggagcagcggagagccggcggctacagccggaagtacgccagcaaagccaagaatctggcagacgatatggtgagaaacaccgctagagatctgctgtactacgccgtgacccaggatgccatgctgatcttcgccaacctgagccggggcttcggccggcagggcaagcggaccttcatggccgagagacagtacacacggatggaggactggctgaccgccaagctggcctacgagggcctgagcaagacctacctgtccaagacactggcccagtacacctccaagacatgcagcaactgtgggtttaccatcaccagcgccgactacgacagggtgctggagaagctgaagaagacagcaacaggctggatgaccacaattaacggcaaggagctgaaggtggagggccagattacctactacaacagatacaagagacagaacgtagtcaaggacctgtccgtcgagctggatagactgagcgaagaatctgtgaacaacgacatctcctcctggacaaagggcagaagcggagaagctctgagcctcctgaagaaaagattctcccatagacccgtgcaggagaagttcgtgtgcctgaactgcggcttcgagacacacgcagccgagcaagccgccctgaacatcgccagatcctggctgttcctgcggagccaggagtacaagaaataccagacaaacaagacaaccggcaacaccgataagagagccttcgtcgagacctggcagtccttttaccggaagaagcttaaggaggtgtggaaacctgccgtgcggtctggcggatctggcggaggctccaccagccccaagaaaaagagaaaagtctaagctgccttctgcggggcttgccttctggccatgcccttcttctctcccttgcacctgtacctcttggtctttgaataaagcctgagtaggaaggctagcaaaaaaaaaaaaaaaaaaaaaaaaaaaaaaaaaaaaaaaaaaaaaaaaaaaaaaaaaaaaaaaaaaaaaaaaaaaaaaaagcccagccggctccccaacctctaccgaggagggcacctctgagtccgccacccccgagagcggccctggcacctccaccgagcccagcgagggcagcgcacccggcagccctgccggcagccccacctccacagaggagggaaccagcaccgagcccagcgaaggcagcgccccaggcaccagcaccgagcctagtgagcaggagattaaacggatcaacaagatcagaagaagacttgtgaaagacagcaacaccaagaaggccggcaagacaggccccatgaaaaccctgctggttagagtgatgacacccgatctgagagagcggctggaaaacctgagaaagaagcctgaaaatatcccccagcccatcagcaatacatctagagccaacctgaataagctgctgaccgattacaccgaaatgaagaaggcgatcctgcatgtgtactgggaagagttccagaaggaccctgtgggcctgatgagccgggtggcccagcctgccagcaagaagatcgatcagaacaagctgaaacctgagatggacgagaagggcaacctgaccaccgccggctttgcctgctctcagtgtggccagcccctgttcgtgtacaagctggagcaggtgtctgagaagggcaaggcttacaccaactacttcggacggtgcaatgtggccgagcacgaaaagctgatcctgctggcccagctgaagcccgagaaggatagcgacgaagccgtgacatatagcctgggaaagtttgggcagagggccctggatttctacagcattcatgtgaccaaggagtccacccaccccgtgaagcccctggcccagatcgccggaaacagatacgcctccggacctgtgggaaaggccctgagcgacgcatgtatgggcacaatcgcctccttcctgtctaagtaccaggacatcatcatcgaacaccagaaggtggtgaagggcaaccagaagagactggagagcctgcgggagctggccggcaaggaaaacctggaataccctagcgtgaccctgccacctcagcctcacaccaaggagggcgttgatgcctacaacgaagtgatcgcccgggtgcgaatgtgggtgaacctgaacctgtggcagaagctgaagctaagcagagatgatgccaagcctctgctgagactgaagggattcccttcctttcctctggtcgagagacaggccaacgaagtggactggtgggacatggtgtgtaacgtgaagaagctgatcaacgagaaaaaggaggatggcaaggtgttttggcagaatctggctggctacaagagacaggaagccctgagaccatacctgagcagcgaggaagatcggaagaagggaaagaaattcgctcggtaccagctgggcgacctgctgctgcacctggaaaagaagcacggcgaggactggggaaaggtgtacgacgaggcctgggagcggattgacaagaaagtggaaggcctgagcaagcacatcaagctggaagaggaacggagaagcgaggacgcccagagcaaggccgccctgaccgactggctgcgggctaaggccagcttcgtgatcgagggcctgaaggaggccgacaaggacgagttctgcagatgcgagctgaagctgcagaagtggtacggggacctgcggggaaagcccttcgccatcgaagccgagaacagcatcctggacatcagcggcttcagcaagcagtacaactgtgccttcatctggcagaaggacggcgtgaagaagctgaacctgtacctgatcatcaactacttcaagggcggcaagctgcggttcaagaagatcaaacctgaagccttcgaagccaacagattctacaccgtgatcaacaaaaagagcggcgagatcgtgcccatggaggtgaacttcaacttcgacgaccccaacctgatcatcctgcctctggcctttggcaagagacagggcagagaattcatctggaacgacctgctgtccctggaaaccggcagcctgaagctggccaacggaagagtgatcgagaagacactgtacaacagaagaacccggcaggatgagcctgccctgttcgtggccctgaccttcgagcggcgggaggtcctggactcctccaatatcaaaccaatgaacctgatcggcgtggcaagaggcgaaaacatccccgccgtgatcgccctgaccgaccccgagggctgcccactgagccggtttaaggatagcctgggaaacccaacccacatcctgagaatcggcgagagctataaggagaagcagcggaccatccaggccaagaaggaggtggagcagcggagagccggcggctacagccggaagtacgccagcaaagccaagaatctggcagacgatatggtgagaaacaccgctagagatctgctgtactacgccgtgacccaggatgccatgctgatcttcgccaacctgagccggggcttcggccggcagggcaagcggaccttcatggccgagagacagtacacacggatggaggactggctgaccgccaagctggcctacgagggcctgagcaagacctacctgtccaagacactggcccagtacacctccaagacatgcagcaactgtgggtttaccatcaccagcgccgactacgacagggtgctggagaagctgaagaagacagcaacaggctggatgaccacaattaacggcaaggagctgaaggtggagggccagattacctactacaacagatacaagagacagaacgtagtcaaggacctgtccgtcgagctggatagactgagcgaagaatctgtgaacaacgacatctcctcctggacaaagggcagaagcggagaagctctgagcctcctgaagaaaagattctcccatagacccgtgcaggagaagttcgtgtgcctgaactgcggcttcgagacacacgcagccgagcaagccgccctgaacatcgccagatcctggctgttcctgcggagccaggagtacaagaaataccagacaaacaagacaaccggcaacaccgataagagagccttcgtcgagacctggcagtccttttaccggaagaagcttaaggaggtgtggaaacctgccgtgcggtctggcggatctggcggaggctccaccagccccaagaaaaagagaaaagtctaagctgccttctgcggggcttgccttctggccatgcccttcttctctcccttgcacctgtacctcttggtctttgaataaagcctgagtaggaaggctagcaaaaaaaaaaaaaaaaaaaaaaaaaaaaaaaaaaaaaaaaaaaaaaaaaaaaaaaaaaaaaaaaaaaaaaaaaaaaaaaa

SEQ ID NO: 8962 - RNA, 8787 nt, synthetic construct
  source 1..8787: mol_type = other RNA
aggaaataagagagaaaagaagagtaagaagaaatataagagccaccatggcccctaagaagaagcgtaaagtgagccggatgaaccacgaccaggagttcgacccccctaaggtgtaccctcccgtccccgccgagaagagaaagcccatccgggtcctgagcctgttcgatggcatcgccaccggtctgctggtgctgaaggacctgggcatccaggtggataggtacattgcctccgaggtgtgcgaggactccatcaccgtgggaatggtgcgtcatcagggcaagatcatgtacgtgggcgacgtgcggagcgtgacacagaagcatatccaggagtggggccctttcgacctggtgatcggcggcagcccttgcaatgacctgagcatcgtgaacccagcccggaagggcctgtacgagggaaccggcagactgttcttcgagttttacagactgctgcacgacgcccggcctaaggaaggcgacgaccggcccttcttttggctgttcgagaatgtggtggccatgggagtcagcgacaagcgggatattagccggttcctggagagcaaccccgtgatgatcgatgccaaggaagtgagcgccgcccaccgggccagatacttctggggcaatctgcctggcatgaacagacccctggccagcaccgtgaacgacaagctggagctgcaggagtgcctggagcacggccggatcgccaagttcagcaaggtgagaaccatcaccacccgaagcaacagcatcaaacaaggcaaggaccagcactttcctgtgttcatgaacgagaaggaggacatcctgtggtgtaccgagatggagagagtgttcgggttcccagtccactacacagatgtcagcaacatgtctagactggccagacagagactgctgggaagaagctggtccgtccctgtgatcagacacctgttcgcccctctgaaggagtacttcgcctgcgtgagcagcggcaacagcaacgccaacagccggggccccagcttctctagcggcctggtgccactgtccctgagagggagccacatgggccccatggagatctacaaaaccgtgagcgcctggaagcggcagcctgtgcgcgtgctgagcctgtttcggaatatcgataaagtcctgaaaagcctgggattcctggagagcggctctggctccggcggtggcaccctgaagtacgtggaggatgtgacaaacgtggtcagacgggatgtggagaagtggggccccttcgatctggtgtacggcagcacccaacccctgggcagctcttgtgaccggtgccctggctggtacatgtttcagttccaccggatcctgcagtacgccctgccgagacaggagtcccagcggccattcttttggattttcatggacaacttgctgctgaccgaggatgaccaggaaactaccactcggttcctgcagaccgaagccgtgaccctgcaggacgtgagaggccgggactaccagaacgccatgcgggtgtggtccaacatccctggactgaaaagcaagcacgcacctctgacccctaaagaagaggagtacctgcaggcccaggtgcggagcagaagcaagctggacgcccctaaggtggatctgctggtgaagaattgcctcctgcccctgagagagtacttcaagtatttcagccagaatagtctgcccctgggaggcagcggcggcggcatggcccacaggagcgtgatgttcagcgacatcagcatcgacttcagccccgaggagtgggagtacctggacctggagcagaaggacctgtacagggacgtgatgctggagaactacagcaacctggtgagcctgggctgcttcatcagcaagcccgacgtgatcagcctgctggagcagggcaaggagccctggaaggtggtgaggaagaggaggaggcagtaccccgacctggagaccaagggcggcccaagcagcggcgcccctcctcccagcggcggcaggcggcccaagcagcggcgcccctcctcccagcggcggcagcccagccggctccccaacctctaccgaggagggcacctctgagtccgccacccccgagagcggccctggcacctccaccgagcccagcgagggcagcgcacccggcagccctgccggcagccccacctccacagaggagggaaccagcaccgagcccagcgaaggcagcgccccaggcaccagcaccgagcctagtgagcaggagattaaacggatcaacaagatcagaagaagacttgtgaaagacagcaacaccaagaaggccggcaagacaggccccatgaaaaccctgctggttagagtgatgacacccgatctgagagagcggctggaaaacctgagaaagaagcctgaaaatatcccccagcccatcagcaatacatctagagccaacctgaataagctgctgaccgattacaccgaaatgaagaaggcgatcctgcatgtgtactgggaagagttccagaaggaccctgtgggcctgatgagccgggtggcccagcctgccagcaagaagatcgatcagaacaagctgaaacctgagatggacgagaagggcaacctgaccaccgccggctttgcctgctctcagtgtggccagcccctgttcgtgtacaagctggagcaggtgtctgagaagggcaaggcttacaccaactacttcggacggtgcaatgtggccgagcacgaaaagctgatcctgctggcccagctgaagcccgagaaggatagcgacgaagccgtgacatatagcctgggaaagtttgggcagagggccctggatttctacagcattcatgtgaccaaggagtccacccaccccgtgaagcccctggcccagatcgccggaaacagatacgcctccggacctgtgggaaaggccctgagcgacgcatgtatgggcacaatcgcctccttcctgtctaagtaccaggacatcatcatcgaacaccagaaggtggtgaagggcaaccagaagagactggagagcctgcgggagctggccggcaaggaaaacctggaataccctagcgtgaccctgccacctcagcctcacaccaaggagggcgttgatgcctacaacgaagtgatcgcccgggtgcgaatgtgggtgaacctgaacctgtggcagaagctgaagctaagcagagatgatgccaagcctctgctgagactgaagggattcccttcctttcctctggtcgagagacaggccaacgaagtggactggtgggacatggtgtgtaacgtgaagaagctgatcaacgagaaaaaggaggatggcaaggtgttttggcagaatctggctggctacaagagacaggaagccctgagaccatacctgagcagcgaggaagatcggaagaagggaaagaaattcgctcggtaccagctgggcgacctgctgctgcacctggaaaagaagcacggcgaggactggggaaaggtgtacgacgaggcctgggagcggattgacaagaaagtggaaggcctgagcaagcacatcaagctggaagaggaacggagaagcgaggacgcccagagcaaggccgccctgaccgactggctgcgggctaaggccagcttcgtgatcgagggcctgaaggaggccgacaaggacgagttctgcagatgcgagctgaagctgcagaagtggtacggggacctgcggggaaagcccttcgccatcgaagccgagaacagcatcctggacatcagcggcttcagcaagcagtacaactgtgccttcatctggcagaaggacggcgtgaagaagctgaacctgtacctgatcatcaactacttcaagggcggcaagctgcggttcaagaagatcaaacctgaagccttcgaagccaacagattctacaccgtgatcaacaaaaagagcggcgagatcgtgcccatggaggtgaacttcaacttcgacgaccccaacctgatcatcctgcctctggcctttggcaagagacagggcagagaattcatctggaacgacctgctgtccctggaaaccggcagcctgaagctggccaacggaagagtgatcgagaagacactgtacaacagaagaacccggcaggatgagcctgccctgttcgtggccctgaccttcgagcggcgggaggtcctggactcctccaatatcaaaccaatgaacctgatcggcgtggcaagaggcgaaaacatccccgccgtgatcgccctgaccgaccccgagggctgcccactgagccggtttaaggatagcctgggaaacccaacccacatcctgagaatcggcgagagctataaggagaagcagcggaccatccaggccaagaaggaggtggagcagcggagagccggcggctacagccggaagtacgccagcaaagccaagaatctggcagacgatatggtgagaaacaccgctagagatctgctgtactacgccgtgacccaggatgccatgctgatcttcgccaacctgagccggggcttcggccggcagggcaagcggaccttcatggccgagagacagtacacacggatggaggactggctgaccgccaagctggcctacgagggcctgagcaagacctacctgtccaagacactggcccagtacacctccaagacatgcagcaactgtgggtttaccatcaccagcgccgactacgacagggtgctggagaagctgaagaagacagcaacaggctggatgaccacaattaacggcaaggagctgaaggtggagggccagattacctactacaacagatacaagagacagaacgtagtcaaggacctgtccgtcgagctggatagactgagcgaagaatctgtgaacaacgacatctcctcctggacaaagggcagaagcggagaagctctgagcctcctgaagaaaagattctcccatagacccgtgcaggagaagttcgtgtgcctgaactgcggcttcgagacacacgcagccgagcaagccgccctgaacatcgccagatcctggctgttcctgcggagccaggagtacaagaaataccagacaaacaagacaaccggcaacaccgataagagagccttcgtcgagacctggcagtccttttaccggaagaagcttaaggaggtgtggaaacctgccgtgcggtctggcggatctggcggaggctccaccagccccaagaaaaagagaaaagtctaagctgccttctgcggggcttgccttctggccatgcccttcttctctcccttgcacctgtacctcttggtctttgaataaagcctgagtaggaaggctagcaaaaaaaaaaaaaaaaaaaaaaaaaaaaaaaaaaaaaaaaaaaaaaaaaaaaaaaaaaaaaaaaaaaaaaaaaaaaaaaagcccagccggctccccaacctctaccgaggagggcacctctgagtccgccacccccgagagcggccctggcacctccaccgagcccagcgagggcagcgcacccggcagccctgccggcagccccacctccacagaggagggaaccagcaccgagcccagcgaaggcagcgccccaggcaccagcaccgagcctagtgagcaggagattaaacggatcaacaagatcagaagaagacttgtgaaagacagcaacaccaagaaggccggcaagacaggccccatgaaaaccctgctggttagagtgatgacacccgatctgagagagcggctggaaaacctgagaaagaagcctgaaaatatcccccagcccatcagcaatacatctagagccaacctgaataagctgctgaccgattacaccgaaatgaagaaggcgatcctgcatgtgtactgggaagagttccagaaggaccctgtgggcctgatgagccgggtggcccagcctgccagcaagaagatcgatcagaacaagctgaaacctgagatggacgagaagggcaacctgaccaccgccggctttgcctgctctcagtgtggccagcccctgttcgtgtacaagctggagcaggtgtctgagaagggcaaggcttacaccaactacttcggacggtgcaatgtggccgagcacgaaaagctgatcctgctggcccagctgaagcccgagaaggatagcgacgaagccgtgacatatagcctgggaaagtttgggcagagggccctggatttctacagcattcatgtgaccaaggagtccacccaccccgtgaagcccctggcccagatcgccggaaacagatacgcctccggacctgtgggaaaggccctgagcgacgcatgtatgggcacaatcgcctccttcctgtctaagtaccaggacatcatcatcgaacaccagaaggtggtgaagggcaaccagaagagactggagagcctgcgggagctggccggcaaggaaaacctggaataccctagcgtgaccctgccacctcagcctcacaccaaggagggcgttgatgcctacaacgaagtgatcgcccgggtgcgaatgtgggtgaacctgaacctgtggcagaagctgaagctaagcagagatgatgccaagcctctgctgagactgaagggattcccttcctttcctctggtcgagagacaggccaacgaagtggactggtgggacatggtgtgtaacgtgaagaagctgatcaacgagaaaaaggaggatggcaaggtgttttggcagaatctggctggctacaagagacaggaagccctgagaccatacctgagcagcgaggaagatcggaagaagggaaagaaattcgctcggtaccagctgggcgacctgctgctgcacctggaaaagaagcacggcgaggactggggaaaggtgtacgacgaggcctgggagcggattgacaagaaagtggaaggcctgagcaagcacatcaagctggaagaggaacggagaagcgaggacgcccagagcaaggccgccctgaccgactggctgcgggctaaggccagcttcgtgatcgagggcctgaaggaggccgacaaggacgagttctgcagatgcgagctgaagctgcagaagtggtacggggacctgcggggaaagcccttcgccatcgaagccgagaacagcatcctggacatcagcggcttcagcaagcagtacaactgtgccttcatctggcagaaggacggcgtgaagaagctgaacctgtacctgatcatcaactacttcaagggcggcaagctgcggttcaagaagatcaaacctgaagccttcgaagccaacagattctacaccgtgatcaacaaaaagagcggcgagatcgtgcccatggaggtgaacttcaacttcgacgaccccaacctgatcatcctgcctctggcctttggcaagagacagggcagagaattcatctggaacgacctgctgtccctggaaaccggcagcctgaagctggccaacggaagagtgatcgagaagacactgtacaacagaagaacccggcaggatgagcctgccctgttcgtggccctgaccttcgagcggcgggaggtcctggactcctccaatatcaaaccaatgaacctgatcggcgtggcaagaggcgaaaacatccccgccgtgatcgccctgaccgaccccgagggctgcccactgagccggtttaaggatagcctgggaaacccaacccacatcctgagaatcggcgagagctataaggagaagcagcggaccatccaggccaagaaggaggtggagcagcggagagccggcggctacagccggaagtacgccagcaaagccaagaatctggcagacgatatggtgagaaacaccgctagagatctgctgtactacgccgtgacccaggatgccatgctgatcttcgccaacctgagccggggcttcggccggcagggcaagcggaccttcatggccgagagacagtacacacggatggaggactggctgaccgccaagctggcctacgagggcctgagcaagacctacctgtccaagacactggcccagtacacctccaagacatgcagcaactgtgggtttaccatcaccagcgccgactacgacagggtgctggagaagctgaagaagacagcaacaggctggatgaccacaattaacggcaaggagctgaaggtggagggccagattacctactacaacagatacaagagacagaacgtagtcaaggacctgtccgtcgagctggatagactgagcgaagaatctgtgaacaacgacatctcctcctggacaaagggcagaagcggagaagctctgagcctcctgaagaaaagattctcccatagacccgtgcaggagaagttcgtgtgcctgaactgcggcttcgagacacacgcagccgagcaagccgccctgaacatcgccagatcctggctgttcctgcggagccaggagtacaagaaataccagacaaacaagacaaccggcaacaccgataagagagccttcgtcgagacctggcagtccttttaccggaagaagcttaaggaggtgtggaaacctgccgtgcggtctggcggatctggcggaggctccaccagccccaagaaaaagagaaaagtctaagctgccttctgcggggcttgccttctggccatgcccttcttctctcccttgcacctgtacctcttggtctttgaataaagcctgagtaggaaggctagcaaaaaaaaaaaaaaaaaaaaaaaaaaaaaaaaaaaaaaaaaaaaaaaaaaaaaaaaaaaaaaaaaaaaaaaaaaaaaaaa

SEQ ID NO: 8963 - RNA, 8787 nt, synthetic construct
  source 1..8787: mol_type = other RNA
aggaaataagagagaaaagaagagtaagaagaaatataagagccaccatggcccctaagaagaagcgtaaagtgagccggatgaaccacgaccaggagttcgacccccctaaggtgtaccctcccgtccccgccgagaagagaaagcccatccgggtcctgagcctgttcgatggcatcgccaccggtctgctggtgctgaaggacctgggcatccaggtggataggtacattgcctccgaggtgtgcgaggactccatcaccgtgggaatggtgcgtcatcagggcaagatcatgtacgtgggcgacgtgcggagcgtgacacagaagcatatccaggagtggggccctttcgacctggtgatcggcggcagcccttgcaatgacctgagcatcgtgaacccagcccggaagggcctgtacgagggaaccggcagactgttcttcgagttttacagactgctgcacgacgcccggcctaaggaaggcgacgaccggcccttcttttggctgttcgagaatgtggtggccatgggagtcagcgacaagcgggatattagccggttcctggagagcaaccccgtgatgatcgatgccaaggaagtgagcgccgcccaccgggccagatacttctggggcaatctgcctggcatgaacagacccctggccagcaccgtgaacgacaagctggagctgcaggagtgcctggagcacggccggatcgccaagttcagcaaggtgagaaccatcaccacccgaagcaacagcatcaaacaaggcaaggaccagcactttcctgtgttcatgaacgagaaggaggacatcctgtggtgtaccgagatggagagagtgttcgggttcccagtccactacacagatgtcagcaacatgtctagactggccagacagagactgctgggaagaagctggtccgtccctgtgatcagacacctgttcgcccctctgaaggagtacttcgcctgcgtgagcagcggcaacagcaacgccaacagccggggccccagcttctctagcggcctggtgccactgtccctgagagggagccacatgggccccatggagatctacaaaaccgtgagcgcctggaagcggcagcctgtgcgcgtgctgagcctgtttcggaatatcgataaagtcctgaaaagcctgggattcctggagagcggctctggctccggcggtggcaccctgaagtacgtggaggatgtgacaaacgtggtcagacgggatgtggagaagtggggccccttcgatctggtgtacggcagcacccaacccctgggcagctcttgtgaccggtgccctggctggtacatgtttcagttccaccggatcctgcagtacgccctgccgagacaggagtcccagcggccattcttttggattttcatggacaacttgctgctgaccgaggatgaccaggaaactaccactcggttcctgcagaccgaagccgtgaccctgcaggacgtgagaggccgggactaccagaacgccatgcgggtgtggtccaacatccctggactgaaaagcaagcacgcacctctgacccctaaagaagaggagtacctgcaggcccaggtgcggagcagaagcaagctggacgcccctaaggtggatctgctggtgaagaattgcctcctgcccctgagagagtacttcaagtatttcagccagaatagtctgcccctgggaggcagcggcggcggcagcaggagccccctgaccttcggcgacgtggccgtggagttcagcggcgaggagtgggccaggctggacagcgcccagaggagcctgcacaggagcgtgatgctggagaactacaggaacctggccagcctgggcctgtgcatgagcaagcccgagatgatcagcagcctggagcagaggaaggagccctgggccgtgaagaggaagagcaccaggggcaggtgccccgacagccagaccgccggcggcccaagcagcggcgcccctcctcccagcggcggcaggcggcccaagcagcggcgcccctcctcccagcggcggcagcccagccggctccccaacctctaccgaggagggcacctctgagtccgccacccccgagagcggccctggcacctccaccgagcccagcgagggcagcgcacccggcagccctgccggcagccccacctccacagaggagggaaccagcaccgagcccagcgaaggcagcgccccaggcaccagcaccgagcctagtgagcaggagattaaacggatcaacaagatcagaagaagacttgtgaaagacagcaacaccaagaaggccggcaagacaggccccatgaaaaccctgctggttagagtgatgacacccgatctgagagagcggctggaaaacctgagaaagaagcctgaaaatatcccccagcccatcagcaatacatctagagccaacctgaataagctgctgaccgattacaccgaaatgaagaaggcgatcctgcatgtgtactgggaagagttccagaaggaccctgtgggcctgatgagccgggtggcccagcctgccagcaagaagatcgatcagaacaagctgaaacctgagatggacgagaagggcaacctgaccaccgccggctttgcctgctctcagtgtggccagcccctgttcgtgtacaagctggagcaggtgtctgagaagggcaaggcttacaccaactacttcggacggtgcaatgtggccgagcacgaaaagctgatcctgctggcccagctgaagcccgagaaggatagcgacgaagccgtgacatatagcctgggaaagtttgggcagagggccctggatttctacagcattcatgtgaccaaggagtccacccaccccgtgaagcccctggcccagatcgccggaaacagatacgcctccggacctgtgggaaaggccctgagcgacgcatgtatgggcacaatcgcctccttcctgtctaagtaccaggacatcatcatcgaacaccagaaggtggtgaagggcaaccagaagagactggagagcctgcgggagctggccggcaaggaaaacctggaataccctagcgtgaccctgccacctcagcctcacaccaaggagggcgttgatgcctacaacgaagtgatcgcccgggtgcgaatgtgggtgaacctgaacctgtggcagaagctgaagctaagcagagatgatgccaagcctctgctgagactgaagggattcccttcctttcctctggtcgagagacaggccaacgaagtggactggtgggacatggtgtgtaacgtgaagaagctgatcaacgagaaaaaggaggatggcaaggtgttttggcagaatctggctggctacaagagacaggaagccctgagaccatacctgagcagcgaggaagatcggaagaagggaaagaaattcgctcggtaccagctgggcgacctgctgctgcacctggaaaagaagcacggcgaggactggggaaaggtgtacgacgaggcctgggagcggattgacaagaaagtggaaggcctgagcaagcacatcaagctggaagaggaacggagaagcgaggacgcccagagcaaggccgccctgaccgactggctgcgggctaaggccagcttcgtgatcgagggcctgaaggaggccgacaaggacgagttctgcagatgcgagctgaagctgcagaagtggtacggggacctgcggggaaagcccttcgccatcgaagccgagaacagcatcctggacatcagcggcttcagcaagcagtacaactgtgccttcatctggcagaaggacggcgtgaagaagctgaacctgtacctgatcatcaactacttcaagggcggcaagctgcggttcaagaagatcaaacctgaagccttcgaagccaacagattctacaccgtgatcaacaaaaagagcggcgagatcgtgcccatggaggtgaacttcaacttcgacgaccccaacctgatcatcctgcctctggcctttggcaagagacagggcagagaattcatctggaacgacctgctgtccctggaaaccggcagcctgaagctggccaacggaagagtgatcgagaagacactgtacaacagaagaacccggcaggatgagcctgccctgttcgtggccctgaccttcgagcggcgggaggtcctggactcctccaatatcaaaccaatgaacctgatcggcgtggcaagaggcgaaaacatccccgccgtgatcgccctgaccgaccccgagggctgcccactgagccggtttaaggatagcctgggaaacccaacccacatcctgagaatcggcgagagctataaggagaagcagcggaccatccaggccaagaaggaggtggagcagcggagagccggcggctacagccggaagtacgccagcaaagccaagaatctggcagacgatatggtgagaaacaccgctagagatctgctgtactacgccgtgacccaggatgccatgctgatcttcgccaacctgagccggggcttcggccggcagggcaagcggaccttcatggccgagagacagtacacacggatggaggactggctgaccgccaagctggcctacgagggcctgagcaagacctacctgtccaagacactggcccagtacacctccaagacatgcagcaactgtgggtttaccatcaccagcgccgactacgacagggtgctggagaagctgaagaagacagcaacaggctggatgaccacaattaacggcaaggagctgaaggtggagggccagattacctactacaacagatacaagagacagaacgtagtcaaggacctgtccgtcgagctggatagactgagcgaagaatctgtgaacaacgacatctcctcctggacaaagggcagaagcggagaagctctgagcctcctgaagaaaagattctcccatagacccgtgcaggagaagttcgtgtgcctgaactgcggcttcgagacacacgcagccgagcaagccgccctgaacatcgccagatcctggctgttcctgcggagccaggagtacaagaaataccagacaaacaagacaaccggcaacaccgataagagagccttcgtcgagacctggcagtccttttaccggaagaagcttaaggaggtgtggaaacctgccgtgcggtctggcggatctggcggaggctccaccagccccaagaaaaagagaaaagtctaagctgccttctgcggggcttgccttctggccatgcccttcttctctcccttgcacctgtacctcttggtctttgaataaagcctgagtaggaaggctagcaaaaaaaaaaaaaaaaaaaaaaaaaaaaaaaaaaaaaaaaaaaaaaaaaaaaaaaaaaaaaaaaaaaaaaaaaaaaaaaagcccagccggctccccaacctctaccgaggagggcacctctgagtccgccacccccgagagcggccctggcacctccaccgagcccagcgagggcagcgcacccggcagccctgccggcagccccacctccacagaggagggaaccagcaccgagcccagcgaaggcagcgccccaggcaccagcaccgagcctagtgagcaggagattaaacggatcaacaagatcagaagaagacttgtgaaagacagcaacaccaagaaggccggcaagacaggccccatgaaaaccctgctggttagagtgatgacacccgatctgagagagcggctggaaaacctgagaaagaagcctgaaaatatcccccagcccatcagcaatacatctagagccaacctgaataagctgctgaccgattacaccgaaatgaagaaggcgatcctgcatgtgtactgggaagagttccagaaggaccctgtgggcctgatgagccgggtggcccagcctgccagcaagaagatcgatcagaacaagctgaaacctgagatggacgagaagggcaacctgaccaccgccggctttgcctgctctcagtgtggccagcccctgttcgtgtacaagctggagcaggtgtctgagaagggcaaggcttacaccaactacttcggacggtgcaatgtggccgagcacgaaaagctgatcctgctggcccagctgaagcccgagaaggatagcgacgaagccgtgacatatagcctgggaaagtttgggcagagggccctggatttctacagcattcatgtgaccaaggagtccacccaccccgtgaagcccctggcccagatcgccggaaacagatacgcctccggacctgtgggaaaggccctgagcgacgcatgtatgggcacaatcgcctccttcctgtctaagtaccaggacatcatcatcgaacaccagaaggtggtgaagggcaaccagaagagactggagagcctgcgggagctggccggcaaggaaaacctggaataccctagcgtgaccctgccacctcagcctcacaccaaggagggcgttgatgcctacaacgaagtgatcgcccgggtgcgaatgtgggtgaacctgaacctgtggcagaagctgaagctaagcagagatgatgccaagcctctgctgagactgaagggattcccttcctttcctctggtcgagagacaggccaacgaagtggactggtgggacatggtgtgtaacgtgaagaagctgatcaacgagaaaaaggaggatggcaaggtgttttggcagaatctggctggctacaagagacaggaagccctgagaccatacctgagcagcgaggaagatcggaagaagggaaagaaattcgctcggtaccagctgggcgacctgctgctgcacctggaaaagaagcacggcgaggactggggaaaggtgtacgacgaggcctgggagcggattgacaagaaagtggaaggcctgagcaagcacatcaagctggaagaggaacggagaagcgaggacgcccagagcaaggccgccctgaccgactggctgcgggctaaggccagcttcgtgatcgagggcctgaaggaggccgacaaggacgagttctgcagatgcgagctgaagctgcagaagtggtacggggacctgcggggaaagcccttcgccatcgaagccgagaacagcatcctggacatcagcggcttcagcaagcagtacaactgtgccttcatctggcagaaggacggcgtgaagaagctgaacctgtacctgatcatcaactacttcaagggcggcaagctgcggttcaagaagatcaaacctgaagccttcgaagccaacagattctacaccgtgatcaacaaaaagagcggcgagatcgtgcccatggaggtgaacttcaacttcgacgaccccaacctgatcatcctgcctctggcctttggcaagagacagggcagagaattcatctggaacgacctgctgtccctggaaaccggcagcctgaagctggccaacggaagagtgatcgagaagacactgtacaacagaagaacccggcaggatgagcctgccctgttcgtggccctgaccttcgagcggcgggaggtcctggactcctccaatatcaaaccaatgaacctgatcggcgtggcaagaggcgaaaacatccccgccgtgatcgccctgaccgaccccgagggctgcccactgagccggtttaaggatagcctgggaaacccaacccacatcctgagaatcggcgagagctataaggagaagcagcggaccatccaggccaagaaggaggtggagcagcggagagccggcggctacagccggaagtacgccagcaaagccaagaatctggcagacgatatggtgagaaacaccgctagagatctgctgtactacgccgtgacccaggatgccatgctgatcttcgccaacctgagccggggcttcggccggcagggcaagcggaccttcatggccgagagacagtacacacggatggaggactggctgaccgccaagctggcctacgagggcctgagcaagacctacctgtccaagacactggcccagtacacctccaagacatgcagcaactgtgggtttaccatcaccagcgccgactacgacagggtgctggagaagctgaagaagacagcaacaggctggatgaccacaattaacggcaaggagctgaaggtggagggccagattacctactacaacagatacaagagacagaacgtagtcaaggacctgtccgtcgagctggatagactgagcgaagaatctgtgaacaacgacatctcctcctggacaaagggcagaagcggagaagctctgagcctcctgaagaaaagattctcccatagacccgtgcaggagaagttcgtgtgcctgaactgcggcttcgagacacacgcagccgagcaagccgccctgaacatcgccagatcctggctgttcctgcggagccaggagtacaagaaataccagacaaacaagacaaccggcaacaccgataagagagccttcgtcgagacctggcagtccttttaccggaagaagcttaaggaggtgtggaaacctgccgtgcggtctggcggatctggcggaggctccaccagccccaagaaaaagagaaaagtctaagctgccttctgcggggcttgccttctggccatgcccttcttctctcccttgcacctgtacctcttggtctttgaataaagcctgagtaggaaggctagcaaaaaaaaaaaaaaaaaaaaaaaaaaaaaaaaaaaaaaaaaaaaaaaaaaaaaaaaaaaaaaaaaaaaaaaaaaaaaaaa

SEQ ID NO: 8964 - RNA, 8796 nt, synthetic construct
  source 1..8796: mol_type = other RNA
aggaaataagagagaaaagaagagtaagaagaaatataagagccaccatggcccctaagaagaagcgtaaagtgagccggatgaaccacgaccaggagttcgacccccctaaggtgtaccctcccgtccccgccgagaagagaaagcccatccgggtcctgagcctgttcgatggcatcgccaccggtctgctggtgctgaaggacctgggcatccaggtggataggtacattgcctccgaggtgtgcgaggactccatcaccgtgggaatggtgcgtcatcagggcaagatcatgtacgtgggcgacgtgcggagcgtgacacagaagcatatccaggagtggggccctttcgacctggtgatcggcggcagcccttgcaatgacctgagcatcgtgaacccagcccggaagggcctgtacgagggaaccggcagactgttcttcgagttttacagactgctgcacgacgcccggcctaaggaaggcgacgaccggcccttcttttggctgttcgagaatgtggtggccatgggagtcagcgacaagcgggatattagccggttcctggagagcaaccccgtgatgatcgatgccaaggaagtgagcgccgcccaccgggccagatacttctggggcaatctgcctggcatgaacagacccctggccagcaccgtgaacgacaagctggagctgcaggagtgcctggagcacggccggatcgccaagttcagcaaggtgagaaccatcaccacccgaagcaacagcatcaaacaaggcaaggaccagcactttcctgtgttcatgaacgagaaggaggacatcctgtggtgtaccgagatggagagagtgttcgggttcccagtccactacacagatgtcagcaacatgtctagactggccagacagagactgctgggaagaagctggtccgtccctgtgatcagacacctgttcgcccctctgaaggagtacttcgcctgcgtgagcagcggcaacagcaacgccaacagccggggccccagcttctctagcggcctggtgccactgtccctgagagggagccacatgggccccatggagatctacaaaaccgtgagcgcctggaagcggcagcctgtgcgcgtgctgagcctgtttcggaatatcgataaagtcctgaaaagcctgggattcctggagagcggctctggctccggcggtggcaccctgaagtacgtggaggatgtgacaaacgtggtcagacgggatgtggagaagtggggccccttcgatctggtgtacggcagcacccaacccctgggcagctcttgtgaccggtgccctggctggtacatgtttcagttccaccggatcctgcagtacgccctgccgagacaggagtcccagcggccattcttttggattttcatggacaacttgctgctgaccgaggatgaccaggaaactaccactcggttcctgcagaccgaagccgtgaccctgcaggacgtgagaggccgggactaccagaacgccatgcgggtgtggtccaacatccctggactgaaaagcaagcacgcacctctgacccctaaagaagaggagtacctgcaggcccaggtgcggagcagaagcaagctggacgcccctaaggtggatctgctggtgaagaattgcctcctgcccctgagagagtacttcaagtatttcagccagaatagtctgcccctgggaggcagcggcggcggcgtgacctacaacgacgtgcacgtggacatcacccaggaggagtgggccctgatggaccccagccagaggaacctgtacaaggacgtgatggtggagacctacatgaacctgaccgccatcggctacaactgggagaacctggaggtggaggagccctgccagaaccccctgaagcacggcaggcacgagaggccccacaccggcgagaagccctacgagtacaaccagtgcggcaaggccttcgcccagcccggcggcccaagcagcggcgcccctcctcccagcggcggcaggcggcccaagcagcggcgcccctcctcccagcggcggcagcccagccggctccccaacctctaccgaggagggcacctctgagtccgccacccccgagagcggccctggcacctccaccgagcccagcgagggcagcgcacccggcagccctgccggcagccccacctccacagaggagggaaccagcaccgagcccagcgaaggcagcgccccaggcaccagcaccgagcctagtgagcaggagattaaacggatcaacaagatcagaagaagacttgtgaaagacagcaacaccaagaaggccggcaagacaggccccatgaaaaccctgctggttagagtgatgacacccgatctgagagagcggctggaaaacctgagaaagaagcctgaaaatatcccccagcccatcagcaatacatctagagccaacctgaataagctgctgaccgattacaccgaaatgaagaaggcgatcctgcatgtgtactgggaagagttccagaaggaccctgtgggcctgatgagccgggtggcccagcctgccagcaagaagatcgatcagaacaagctgaaacctgagatggacgagaagggcaacctgaccaccgccggctttgcctgctctcagtgtggccagcccctgttcgtgtacaagctggagcaggtgtctgagaagggcaaggcttacaccaactacttcggacggtgcaatgtggccgagcacgaaaagctgatcctgctggcccagctgaagcccgagaaggatagcgacgaagccgtgacatatagcctgggaaagtttgggcagagggccctggatttctacagcattcatgtgaccaaggagtccacccaccccgtgaagcccctggcccagatcgccggaaacagatacgcctccggacctgtgggaaaggccctgagcgacgcatgtatgggcacaatcgcctccttcctgtctaagtaccaggacatcatcatcgaacaccagaaggtggtgaagggcaaccagaagagactggagagcctgcgggagctggccggcaaggaaaacctggaataccctagcgtgaccctgccacctcagcctcacaccaaggagggcgttgatgcctacaacgaagtgatcgcccgggtgcgaatgtgggtgaacctgaacctgtggcagaagctgaagctaagcagagatgatgccaagcctctgctgagactgaagggattcccttcctttcctctggtcgagagacaggccaacgaagtggactggtgggacatggtgtgtaacgtgaagaagctgatcaacgagaaaaaggaggatggcaaggtgttttggcagaatctggctggctacaagagacaggaagccctgagaccatacctgagcagcgaggaagatcggaagaagggaaagaaattcgctcggtaccagctgggcgacctgctgctgcacctggaaaagaagcacggcgaggactggggaaaggtgtacgacgaggcctgggagcggattgacaagaaagtggaaggcctgagcaagcacatcaagctggaagaggaacggagaagcgaggacgcccagagcaaggccgccctgaccgactggctgcgggctaaggccagcttcgtgatcgagggcctgaaggaggccgacaaggacgagttctgcagatgcgagctgaagctgcagaagtggtacggggacctgcggggaaagcccttcgccatcgaagccgagaacagcatcctggacatcagcggcttcagcaagcagtacaactgtgccttcatctggcagaaggacggcgtgaagaagctgaacctgtacctgatcatcaactacttcaagggcggcaagctgcggttcaagaagatcaaacctgaagccttcgaagccaacagattctacaccgtgatcaacaaaaagagcggcgagatcgtgcccatggaggtgaacttcaacttcgacgaccccaacctgatcatcctgcctctggcctttggcaagagacagggcagagaattcatctggaacgacctgctgtccctggaaaccggcagcctgaagctggccaacggaagagtgatcgagaagacactgtacaacagaagaacccggcaggatgagcctgccctgttcgtggccctgaccttcgagcggcgggaggtcctggactcctccaatatcaaaccaatgaacctgatcggcgtggcaagaggcgaaaacatccccgccgtgatcgccctgaccgaccccgagggctgcccactgagccggtttaaggatagcctgggaaacccaacccacatcctgagaatcggcgagagctataaggagaagcagcggaccatccaggccaagaaggaggtggagcagcggagagccggcggctacagccggaagtacgccagcaaagccaagaatctggcagacgatatggtgagaaacaccgctagagatctgctgtactacgccgtgacccaggatgccatgctgatcttcgccaacctgagccggggcttcggccggcagggcaagcggaccttcatggccgagagacagtacacacggatggaggactggctgaccgccaagctggcctacgagggcctgagcaagacctacctgtccaagacactggcccagtacacctccaagacatgcagcaactgtgggtttaccatcaccagcgccgactacgacagggtgctggagaagctgaagaagacagcaacaggctggatgaccacaattaacggcaaggagctgaaggtggagggccagattacctactacaacagatacaagagacagaacgtagtcaaggacctgtccgtcgagctggatagactgagcgaagaatctgtgaacaacgacatctcctcctggacaaagggcagaagcggagaagctctgagcctcctgaagaaaagattctcccatagacccgtgcaggagaagttcgtgtgcctgaactgcggcttcgagacacacgcagccgagcaagccgccctgaacatcgccagatcctggctgttcctgcggagccaggagtacaagaaataccagacaaacaagacaaccggcaacaccgataagagagccttcgtcgagacctggcagtccttttaccggaagaagcttaaggaggtgtggaaacctgccgtgcggtctggcggatctggcggaggctccaccagccccaagaaaaagagaaaagtctaagctgccttctgcggggcttgccttctggccatgcccttcttctctcccttgcacctgtacctcttggtctttgaataaagcctgagtaggaaggctagcaaaaaaaaaaaaaaaaaaaaaaaaaaaaaaaaaaaaaaaaaaaaaaaaaaaaaaaaaaaaaaaaaaaaaaaaaaaaaaaagcccagccggctccccaacctctaccgaggagggcacctctgagtccgccacccccgagagcggccctggcacctccaccgagcccagcgagggcagcgcacccggcagccctgccggcagccccacctccacagaggagggaaccagcaccgagcccagcgaaggcagcgccccaggcaccagcaccgagcctagtgagcaggagattaaacggatcaacaagatcagaagaagacttgtgaaagacagcaacaccaagaaggccggcaagacaggccccatgaaaaccctgctggttagagtgatgacacccgatctgagagagcggctggaaaacctgagaaagaagcctgaaaatatcccccagcccatcagcaatacatctagagccaacctgaataagctgctgaccgattacaccgaaatgaagaaggcgatcctgcatgtgtactgggaagagttccagaaggaccctgtgggcctgatgagccgggtggcccagcctgccagcaagaagatcgatcagaacaagctgaaacctgagatggacgagaagggcaacctgaccaccgccggctttgcctgctctcagtgtggccagcccctgttcgtgtacaagctggagcaggtgtctgagaagggcaaggcttacaccaactacttcggacggtgcaatgtggccgagcacgaaaagctgatcctgctggcccagctgaagcccgagaaggatagcgacgaagccgtgacatatagcctgggaaagtttgggcagagggccctggatttctacagcattcatgtgaccaaggagtccacccaccccgtgaagcccctggcccagatcgccggaaacagatacgcctccggacctgtgggaaaggccctgagcgacgcatgtatgggcacaatcgcctccttcctgtctaagtaccaggacatcatcatcgaacaccagaaggtggtgaagggcaaccagaagagactggagagcctgcgggagctggccggcaaggaaaacctggaataccctagcgtgaccctgccacctcagcctcacaccaaggagggcgttgatgcctacaacgaagtgatcgcccgggtgcgaatgtgggtgaacctgaacctgtggcagaagctgaagctaagcagagatgatgccaagcctctgctgagactgaagggattcccttcctttcctctggtcgagagacaggccaacgaagtggactggtgggacatggtgtgtaacgtgaagaagctgatcaacgagaaaaaggaggatggcaaggtgttttggcagaatctggctggctacaagagacaggaagccctgagaccatacctgagcagcgaggaagatcggaagaagggaaagaaattcgctcggtaccagctgggcgacctgctgctgcacctggaaaagaagcacggcgaggactggggaaaggtgtacgacgaggcctgggagcggattgacaagaaagtggaaggcctgagcaagcacatcaagctggaagaggaacggagaagcgaggacgcccagagcaaggccgccctgaccgactggctgcgggctaaggccagcttcgtgatcgagggcctgaaggaggccgacaaggacgagttctgcagatgcgagctgaagctgcagaagtggtacggggacctgcggggaaagcccttcgccatcgaagccgagaacagcatcctggacatcagcggcttcagcaagcagtacaactgtgccttcatctggcagaaggacggcgtgaagaagctgaacctgtacctgatcatcaactacttcaagggcggcaagctgcggttcaagaagatcaaacctgaagccttcgaagccaacagattctacaccgtgatcaacaaaaagagcggcgagatcgtgcccatggaggtgaacttcaacttcgacgaccccaacctgatcatcctgcctctggcctttggcaagagacagggcagagaattcatctggaacgacctgctgtccctggaaaccggcagcctgaagctggccaacggaagagtgatcgagaagacactgtacaacagaagaacccggcaggatgagcctgccctgttcgtggccctgaccttcgagcggcgggaggtcctggactcctccaatatcaaaccaatgaacctgatcggcgtggcaagaggcgaaaacatccccgccgtgatcgccctgaccgaccccgagggctgcccactgagccggtttaaggatagcctgggaaacccaacccacatcctgagaatcggcgagagctataaggagaagcagcggaccatccaggccaagaaggaggtggagcagcggagagccggcggctacagccggaagtacgccagcaaagccaagaatctggcagacgatatggtgagaaacaccgctagagatctgctgtactacgccgtgacccaggatgccatgctgatcttcgccaacctgagccggggcttcggccggcagggcaagcggaccttcatggccgagagacagtacacacggatggaggactggctgaccgccaagctggcctacgagggcctgagcaagacctacctgtccaagacactggcccagtacacctccaagacatgcagcaactgtgggtttaccatcaccagcgccgactacgacagggtgctggagaagctgaagaagacagcaacaggctggatgaccacaattaacggcaaggagctgaaggtggagggccagattacctactacaacagatacaagagacagaacgtagtcaaggacctgtccgtcgagctggatagactgagcgaagaatctgtgaacaacgacatctcctcctggacaaagggcagaagcggagaagctctgagcctcctgaagaaaagattctcccatagacccgtgcaggagaagttcgtgtgcctgaactgcggcttcgagacacacgcagccgagcaagccgccctgaacatcgccagatcctggctgttcctgcggagccaggagtacaagaaataccagacaaacaagacaaccggcaacaccgataagagagccttcgtcgagacctggcagtccttttaccggaagaagcttaaggaggtgtggaaacctgccgtgcggtctggcggatctggcggaggctccaccagccccaagaaaaagagaaaagtctaagctgccttctgcggggcttgccttctggccatgcccttcttctctcccttgcacctgtacctcttggtctttgaataaagcctgagtaggaaggctagcaaaaaaaaaaaaaaaaaaaaaaaaaaaaaaaaaaaaaaaaaaaaaaaaaaaaaaaaaaaaaaaaaaaaaaaaaaaaaaaa

SEQ ID NO: 8965 - RNA, 8787 nt, synthetic construct
  source 1..8787: mol_type = other RNA
aggaaataagagagaaaagaagagtaagaagaaatataagagccaccatggcccctaagaagaagcgtaaagtgagccggatgaaccacgaccaggagttcgacccccctaaggtgtaccctcccgtccccgccgagaagagaaagcccatccgggtcctgagcctgttcgatggcatcgccaccggtctgctggtgctgaaggacctgggcatccaggtggataggtacattgcctccgaggtgtgcgaggactccatcaccgtgggaatggtgcgtcatcagggcaagatcatgtacgtgggcgacgtgcggagcgtgacacagaagcatatccaggagtggggccctttcgacctggtgatcggcggcagcccttgcaatgacctgagcatcgtgaacccagcccggaagggcctgtacgagggaaccggcagactgttcttcgagttttacagactgctgcacgacgcccggcctaaggaaggcgacgaccggcccttcttttggctgttcgagaatgtggtggccatgggagtcagcgacaagcgggatattagccggttcctggagagcaaccccgtgatgatcgatgccaaggaagtgagcgccgcccaccgggccagatacttctggggcaatctgcctggcatgaacagacccctggccagcaccgtgaacgacaagctggagctgcaggagtgcctggagcacggccggatcgccaagttcagcaaggtgagaaccatcaccacccgaagcaacagcatcaaacaaggcaaggaccagcactttcctgtgttcatgaacgagaaggaggacatcctgtggtgtaccgagatggagagagtgttcgggttcccagtccactacacagatgtcagcaacatgtctagactggccagacagagactgctgggaagaagctggtccgtccctgtgatcagacacctgttcgcccctctgaaggagtacttcgcctgcgtgagcagcggcaacagcaacgccaacagccggggccccagcttctctagcggcctggtgccactgtccctgagagggagccacatgggccccatggagatctacaaaaccgtgagcgcctggaagcggcagcctgtgcgcgtgctgagcctgtttcggaatatcgataaagtcctgaaaagcctgggattcctggagagcggctctggctccggcggtggcaccctgaagtacgtggaggatgtgacaaacgtggtcagacgggatgtggagaagtggggccccttcgatctggtgtacggcagcacccaacccctgggcagctcttgtgaccggtgccctggctggtacatgtttcagttccaccggatcctgcagtacgccctgccgagacaggagtcccagcggccattcttttggattttcatggacaacttgctgctgaccgaggatgaccaggaaactaccactcggttcctgcagaccgaagccgtgaccctgcaggacgtgagaggccgggactaccagaacgccatgcgggtgtggtccaacatccctggactgaaaagcaagcacgcacctctgacccctaaagaagaggagtacctgcaggcccaggtgcggagcagaagcaagctggacgcccctaaggtggatctgctggtgaagaattgcctcctgcccctgagagagtacttcaagtatttcagccagaatagtctgcccctgggaggcagcggcggcggcagcaaggcccccgtgaccttcggcgacctggccatctacttcagccaggaggagtgggagtggctgagccccatccagaaggacctgtacgaggacgtgatgctggagaactaccagaacctggtgagcctgggcctgtgcttcaggaggcccaacgtgatcaccctgctggagaagggcaaggccccctggatggtggaccccgtgaagaggaggaggggcctggacctgggcagcaagggcggcggcccaagcagcggcgcccctcctcccagcggcggcaggcggcccaagcagcggcgcccctcctcccagcggcggcagcccagccggctccccaacctctaccgaggagggcacctctgagtccgccacccccgagagcggccctggcacctccaccgagcccagcgagggcagcgcacccggcagccctgccggcagccccacctccacagaggagggaaccagcaccgagcccagcgaaggcagcgccccaggcaccagcaccgagcctagtgagcaggagattaaacggatcaacaagatcagaagaagacttgtgaaagacagcaacaccaagaaggccggcaagacaggccccatgaaaaccctgctggttagagtgatgacacccgatctgagagagcggctggaaaacctgagaaagaagcctgaaaatatcccccagcccatcagcaatacatctagagccaacctgaataagctgctgaccgattacaccgaaatgaagaaggcgatcctgcatgtgtactgggaagagttccagaaggaccctgtgggcctgatgagccgggtggcccagcctgccagcaagaagatcgatcagaacaagctgaaacctgagatggacgagaagggcaacctgaccaccgccggctttgcctgctctcagtgtggccagcccctgttcgtgtacaagctggagcaggtgtctgagaagggcaaggcttacaccaactacttcggacggtgcaatgtggccgagcacgaaaagctgatcctgctggcccagctgaagcccgagaaggatagcgacgaagccgtgacatatagcctgggaaagtttgggcagagggccctggatttctacagcattcatgtgaccaaggagtccacccaccccgtgaagcccctggcccagatcgccggaaacagatacgcctccggacctgtgggaaaggccctgagcgacgcatgtatgggcacaatcgcctccttcctgtctaagtaccaggacatcatcatcgaacaccagaaggtggtgaagggcaaccagaagagactggagagcctgcgggagctggccggcaaggaaaacctggaataccctagcgtgaccctgccacctcagcctcacaccaaggagggcgttgatgcctacaacgaagtgatcgcccgggtgcgaatgtgggtgaacctgaacctgtggcagaagctgaagctaagcagagatgatgccaagcctctgctgagactgaagggattcccttcctttcctctggtcgagagacaggccaacgaagtggactggtgggacatggtgtgtaacgtgaagaagctgatcaacgagaaaaaggaggatggcaaggtgttttggcagaatctggctggctacaagagacaggaagccctgagaccatacctgagcagcgaggaagatcggaagaagggaaagaaattcgctcggtaccagctgggcgacctgctgctgcacctggaaaagaagcacggcgaggactggggaaaggtgtacgacgaggcctgggagcggattgacaagaaagtggaaggcctgagcaagcacatcaagctggaagaggaacggagaagcgaggacgcccagagcaaggccgccctgaccgactggctgcgggctaaggccagcttcgtgatcgagggcctgaaggaggccgacaaggacgagttctgcagatgcgagctgaagctgcagaagtggtacggggacctgcggggaaagcccttcgccatcgaagccgagaacagcatcctggacatcagcggcttcagcaagcagtacaactgtgccttcatctggcagaaggacggcgtgaagaagctgaacctgtacctgatcatcaactacttcaagggcggcaagctgcggttcaagaagatcaaacctgaagccttcgaagccaacagattctacaccgtgatcaacaaaaagagcggcgagatcgtgcccatggaggtgaacttcaacttcgacgaccccaacctgatcatcctgcctctggcctttggcaagagacagggcagagaattcatctggaacgacctgctgtccctggaaaccggcagcctgaagctggccaacggaagagtgatcgagaagacactgtacaacagaagaacccggcaggatgagcctgccctgttcgtggccctgaccttcgagcggcgggaggtcctggactcctccaatatcaaaccaatgaacctgatcggcgtggcaagaggcgaaaacatccccgccgtgatcgccctgaccgaccccgagggctgcccactgagccggtttaaggatagcctgggaaacccaacccacatcctgagaatcggcgagagctataaggagaagcagcggaccatccaggccaagaaggaggtggagcagcggagagccggcggctacagccggaagtacgccagcaaagccaagaatctggcagacgatatggtgagaaacaccgctagagatctgctgtactacgccgtgacccaggatgccatgctgatcttcgccaacctgagccggggcttcggccggcagggcaagcggaccttcatggccgagagacagtacacacggatggaggactggctgaccgccaagctggcctacgagggcctgagcaagacctacctgtccaagacactggcccagtacacctccaagacatgcagcaactgtgggtttaccatcaccagcgccgactacgacagggtgctggagaagctgaagaagacagcaacaggctggatgaccacaattaacggcaaggagctgaaggtggagggccagattacctactacaacagatacaagagacagaacgtagtcaaggacctgtccgtcgagctggatagactgagcgaagaatctgtgaacaacgacatctcctcctggacaaagggcagaagcggagaagctctgagcctcctgaagaaaagattctcccatagacccgtgcaggagaagttcgtgtgcctgaactgcggcttcgagacacacgcagccgagcaagccgccctgaacatcgccagatcctggctgttcctgcggagccaggagtacaagaaataccagacaaacaagacaaccggcaacaccgataagagagccttcgtcgagacctggcagtccttttaccggaagaagcttaaggaggtgtggaaacctgccgtgcggtctggcggatctggcggaggctccaccagccccaagaaaaagagaaaagtctaagctgccttctgcggggcttgccttctggccatgcccttcttctctcccttgcacctgtacctcttggtctttgaataaagcctgagtaggaaggctagcaaaaaaaaaaaaaaaaaaaaaaaaaaaaaaaaaaaaaaaaaaaaaaaaaaaaaaaaaaaaaaaaaaaaaaaaaaaaaaaagcccagccggctccccaacctctaccgaggagggcacctctgagtccgccacccccgagagcggccctggcacctccaccgagcccagcgagggcagcgcacccggcagccctgccggcagccccacctccacagaggagggaaccagcaccgagcccagcgaaggcagcgccccaggcaccagcaccgagcctagtgagcaggagattaaacggatcaacaagatcagaagaagacttgtgaaagacagcaacaccaagaaggccggcaagacaggccccatgaaaaccctgctggttagagtgatgacacccgatctgagagagcggctggaaaacctgagaaagaagcctgaaaatatcccccagcccatcagcaatacatctagagccaacctgaataagctgctgaccgattacaccgaaatgaagaaggcgatcctgcatgtgtactgggaagagttccagaaggaccctgtgggcctgatgagccgggtggcccagcctgccagcaagaagatcgatcagaacaagctgaaacctgagatggacgagaagggcaacctgaccaccgccggctttgcctgctctcagtgtggccagcccctgttcgtgtacaagctggagcaggtgtctgagaagggcaaggcttacaccaactacttcggacggtgcaatgtggccgagcacgaaaagctgatcctgctggcccagctgaagcccgagaaggatagcgacgaagccgtgacatatagcctgggaaagtttgggcagagggccctggatttctacagcattcatgtgaccaaggagtccacccaccccgtgaagcccctggcccagatcgccggaaacagatacgcctccggacctgtgggaaaggccctgagcgacgcatgtatgggcacaatcgcctccttcctgtctaagtaccaggacatcatcatcgaacaccagaaggtggtgaagggcaaccagaagagactggagagcctgcgggagctggccggcaaggaaaacctggaataccctagcgtgaccctgccacctcagcctcacaccaaggagggcgttgatgcctacaacgaagtgatcgcccgggtgcgaatgtgggtgaacctgaacctgtggcagaagctgaagctaagcagagatgatgccaagcctctgctgagactgaagggattcccttcctttcctctggtcgagagacaggccaacgaagtggactggtgggacatggtgtgtaacgtgaagaagctgatcaacgagaaaaaggaggatggcaaggtgttttggcagaatctggctggctacaagagacaggaagccctgagaccatacctgagcagcgaggaagatcggaagaagggaaagaaattcgctcggtaccagctgggcgacctgctgctgcacctggaaaagaagcacggcgaggactggggaaaggtgtacgacgaggcctgggagcggattgacaagaaagtggaaggcctgagcaagcacatcaagctggaagaggaacggagaagcgaggacgcccagagcaaggccgccctgaccgactggctgcgggctaaggccagcttcgtgatcgagggcctgaaggaggccgacaaggacgagttctgcagatgcgagctgaagctgcagaagtggtacggggacctgcggggaaagcccttcgccatcgaagccgagaacagcatcctggacatcagcggcttcagcaagcagtacaactgtgccttcatctggcagaaggacggcgtgaagaagctgaacctgtacctgatcatcaactacttcaagggcggcaagctgcggttcaagaagatcaaacctgaagccttcgaagccaacagattctacaccgtgatcaacaaaaagagcggcgagatcgtgcccatggaggtgaacttcaacttcgacgaccccaacctgatcatcctgcctctggcctttggcaagagacagggcagagaattcatctggaacgacctgctgtccctggaaaccggcagcctgaagctggccaacggaagagtgatcgagaagacactgtacaacagaagaacccggcaggatgagcctgccctgttcgtggccctgaccttcgagcggcgggaggtcctggactcctccaatatcaaaccaatgaacctgatcggcgtggcaagaggcgaaaacatccccgccgtgatcgccctgaccgaccccgagggctgcccactgagccggtttaaggatagcctgggaaacccaacccacatcctgagaatcggcgagagctataaggagaagcagcggaccatccaggccaagaaggaggtggagcagcggagagccggcggctacagccggaagtacgccagcaaagccaagaatctggcagacgatatggtgagaaacaccgctagagatctgctgtactacgccgtgacccaggatgccatgctgatcttcgccaacctgagccggggcttcggccggcagggcaagcggaccttcatggccgagagacagtacacacggatggaggactggctgaccgccaagctggcctacgagggcctgagcaagacctacctgtccaagacactggcccagtacacctccaagacatgcagcaactgtgggtttaccatcaccagcgccgactacgacagggtgctggagaagctgaagaagacagcaacaggctggatgaccacaattaacggcaaggagctgaaggtggagggccagattacctactacaacagatacaagagacagaacgtagtcaaggacctgtccgtcgagctggatagactgagcgaagaatctgtgaacaacgacatctcctcctggacaaagggcagaagcggagaagctctgagcctcctgaagaaaagattctcccatagacccgtgcaggagaagttcgtgtgcctgaactgcggcttcgagacacacgcagccgagcaagccgccctgaacatcgccagatcctggctgttcctgcggagccaggagtacaagaaataccagacaaacaagacaaccggcaacaccgataagagagccttcgtcgagacctggcagtccttttaccggaagaagcttaaggaggtgtggaaacctgccgtgcggtctggcggatctggcggaggctccaccagccccaagaaaaagagaaaagtctaagctgccttctgcggggcttgccttctggccatgcccttcttctctcccttgcacctgtacctcttggtctttgaataaagcctgagtaggaaggctagcaaaaaaaaaaaaaaaaaaaaaaaaaaaaaaaaaaaaaaaaaaaaaaaaaaaaaaaaaaaaaaaaaaaaaaaaaaaaaaaa

SEQ ID NO: 8966 - RNA, 8787 nt, synthetic construct
  source 1..8787: mol_type = other RNA
aggaaataagagagaaaagaagagtaagaagaaatataagagccaccatggcccctaagaagaagcgtaaagtgagccggatgaaccacgaccaggagttcgacccccctaaggtgtaccctcccgtccccgccgagaagagaaagcccatccgggtcctgagcctgttcgatggcatcgccaccggtctgctggtgctgaaggacctgggcatccaggtggataggtacattgcctccgaggtgtgcgaggactccatcaccgtgggaatggtgcgtcatcagggcaagatcatgtacgtgggcgacgtgcggagcgtgacacagaagcatatccaggagtggggccctttcgacctggtgatcggcggcagcccttgcaatgacctgagcatcgtgaacccagcccggaagggcctgtacgagggaaccggcagactgttcttcgagttttacagactgctgcacgacgcccggcctaaggaaggcgacgaccggcccttcttttggctgttcgagaatgtggtggccatgggagtcagcgacaagcgggatattagccggttcctggagagcaaccccgtgatgatcgatgccaaggaagtgagcgccgcccaccgggccagatacttctggggcaatctgcctggcatgaacagacccctggccagcaccgtgaacgacaagctggagctgcaggagtgcctggagcacggccggatcgccaagttcagcaaggtgagaaccatcaccacccgaagcaacagcatcaaacaaggcaaggaccagcactttcctgtgttcatgaacgagaaggaggacatcctgtggtgtaccgagatggagagagtgttcgggttcccagtccactacacagatgtcagcaacatgtctagactggccagacagagactgctgggaagaagctggtccgtccctgtgatcagacacctgttcgcccctctgaaggagtacttcgcctgcgtgagcagcggcaacagcaacgccaacagccggggccccagcttctctagcggcctggtgccactgtccctgagagggagccacatgggccccatggagatctacaaaaccgtgagcgcctggaagcggcagcctgtgcgcgtgctgagcctgtttcggaatatcgataaagtcctgaaaagcctgggattcctggagagcggctctggctccggcggtggcaccctgaagtacgtggaggatgtgacaaacgtggtcagacgggatgtggagaagtggggccccttcgatctggtgtacggcagcacccaacccctgggcagctcttgtgaccggtgccctggctggtacatgtttcagttccaccggatcctgcagtacgccctgccgagacaggagtcccagcggccattcttttggattttcatggacaacttgctgctgaccgaggatgaccaggaaactaccactcggttcctgcagaccgaagccgtgaccctgcaggacgtgagaggccgggactaccagaacgccatgcgggtgtggtccaacatccctggactgaaaagcaagcacgcacctctgacccctaaagaagaggagtacctgcaggcccaggtgcggagcagaagcaagctggacgcccctaaggtggatctgctggtgaagaattgcctcctgcccctgagagagtacttcaagtatttcagccagaatagtctgcccctgggaggcagcggcggcggcgcccaccacctggtgatgttcagggacgtggccgtggacttcagcaaggaggagtgggagtgcctgaacagctaccagaggaacctgtacagggacgtgatcctggagaactacagcaacctggtgagcgtggccggctgcagcatcagcaagcccgacgtgatcaccctgctggagcagggcaaggagccctggatggtggtgagggacgagaggaggaggaggagcctggacctggagagcggcggcccaagcagcggcgcccctcctcccagcggcggcaggcggcccaagcagcggcgcccctcctcccagcggcggcagcccagccggctccccaacctctaccgaggagggcacctctgagtccgccacccccgagagcggccctggcacctccaccgagcccagcgagggcagcgcacccggcagccctgccggcagccccacctccacagaggagggaaccagcaccgagcccagcgaaggcagcgccccaggcaccagcaccgagcctagtgagcaggagattaaacggatcaacaagatcagaagaagacttgtgaaagacagcaacaccaagaaggccggcaagacaggccccatgaaaaccctgctggttagagtgatgacacccgatctgagagagcggctggaaaacctgagaaagaagcctgaaaatatcccccagcccatcagcaatacatctagagccaacctgaataagctgctgaccgattacaccgaaatgaagaaggcgatcctgcatgtgtactgggaagagttccagaaggaccctgtgggcctgatgagccgggtggcccagcctgccagcaagaagatcgatcagaacaagctgaaacctgagatggacgagaagggcaacctgaccaccgccggctttgcctgctctcagtgtggccagcccctgttcgtgtacaagctggagcaggtgtctgagaagggcaaggcttacaccaactacttcggacggtgcaatgtggccgagcacgaaaagctgatcctgctggcccagctgaagcccgagaaggatagcgacgaagccgtgacatatagcctgggaaagtttgggcagagggccctggatttctacagcattcatgtgaccaaggagtccacccaccccgtgaagcccctggcccagatcgccggaaacagatacgcctccggacctgtgggaaaggccctgagcgacgcatgtatgggcacaatcgcctccttcctgtctaagtaccaggacatcatcatcgaacaccagaaggtggtgaagggcaaccagaagagactggagagcctgcgggagctggccggcaaggaaaacctggaataccctagcgtgaccctgccacctcagcctcacaccaaggagggcgttgatgcctacaacgaagtgatcgcccgggtgcgaatgtgggtgaacctgaacctgtggcagaagctgaagctaagcagagatgatgccaagcctctgctgagactgaagggattcccttcctttcctctggtcgagagacaggccaacgaagtggactggtgggacatggtgtgtaacgtgaagaagctgatcaacgagaaaaaggaggatggcaaggtgttttggcagaatctggctggctacaagagacaggaagccctgagaccatacctgagcagcgaggaagatcggaagaagggaaagaaattcgctcggtaccagctgggcgacctgctgctgcacctggaaaagaagcacggcgaggactggggaaaggtgtacgacgaggcctgggagcggattgacaagaaagtggaaggcctgagcaagcacatcaagctggaagaggaacggagaagcgaggacgcccagagcaaggccgccctgaccgactggctgcgggctaaggccagcttcgtgatcgagggcctgaaggaggccgacaaggacgagttctgcagatgcgagctgaagctgcagaagtggtacggggacctgcggggaaagcccttcgccatcgaagccgagaacagcatcctggacatcagcggcttcagcaagcagtacaactgtgccttcatctggcagaaggacggcgtgaagaagctgaacctgtacctgatcatcaactacttcaagggcggcaagctgcggttcaagaagatcaaacctgaagccttcgaagccaacagattctacaccgtgatcaacaaaaagagcggcgagatcgtgcccatggaggtgaacttcaacttcgacgaccccaacctgatcatcctgcctctggcctttggcaagagacagggcagagaattcatctggaacgacctgctgtccctggaaaccggcagcctgaagctggccaacggaagagtgatcgagaagacactgtacaacagaagaacccggcaggatgagcctgccctgttcgtggccctgaccttcgagcggcgggaggtcctggactcctccaatatcaaaccaatgaacctgatcggcgtggcaagaggcgaaaacatccccgccgtgatcgccctgaccgaccccgagggctgcccactgagccggtttaaggatagcctgggaaacccaacccacatcctgagaatcggcgagagctataaggagaagcagcggaccatccaggccaagaaggaggtggagcagcggagagccggcggctacagccggaagtacgccagcaaagccaagaatctggcagacgatatggtgagaaacaccgctagagatctgctgtactacgccgtgacccaggatgccatgctgatcttcgccaacctgagccggggcttcggccggcagggcaagcggaccttcatggccgagagacagtacacacggatggaggactggctgaccgccaagctggcctacgagggcctgagcaagacctacctgtccaagacactggcccagtacacctccaagacatgcagcaactgtgggtttaccatcaccagcgccgactacgacagggtgctggagaagctgaagaagacagcaacaggctggatgaccacaattaacggcaaggagctgaaggtggagggccagattacctactacaacagatacaagagacagaacgtagtcaaggacctgtccgtcgagctggatagactgagcgaagaatctgtgaacaacgacatctcctcctggacaaagggcagaagcggagaagctctgagcctcctgaagaaaagattctcccatagacccgtgcaggagaagttcgtgtgcctgaactgcggcttcgagacacacgcagccgagcaagccgccctgaacatcgccagatcctggctgttcctgcggagccaggagtacaagaaataccagacaaacaagacaaccggcaacaccgataagagagccttcgtcgagacctggcagtccttttaccggaagaagcttaaggaggtgtggaaacctgccgtgcggtctggcggatctggcggaggctccaccagccccaagaaaaagagaaaagtctaagctgccttctgcggggcttgccttctggccatgcccttcttctctcccttgcacctgtacctcttggtctttgaataaagcctgagtaggaaggctagcaaaaaaaaaaaaaaaaaaaaaaaaaaaaaaaaaaaaaaaaaaaaaaaaaaaaaaaaaaaaaaaaaaaaaaaaaaaaaaaagcccagccggctccccaacctctaccgaggagggcacctctgagtccgccacccccgagagcggccctggcacctccaccgagcccagcgagggcagcgcacccggcagccctgccggcagccccacctccacagaggagggaaccagcaccgagcccagcgaaggcagcgccccaggcaccagcaccgagcctagtgagcaggagattaaacggatcaacaagatcagaagaagacttgtgaaagacagcaacaccaagaaggccggcaagacaggccccatgaaaaccctgctggttagagtgatgacacccgatctgagagagcggctggaaaacctgagaaagaagcctgaaaatatcccccagcccatcagcaatacatctagagccaacctgaataagctgctgaccgattacaccgaaatgaagaaggcgatcctgcatgtgtactgggaagagttccagaaggaccctgtgggcctgatgagccgggtggcccagcctgccagcaagaagatcgatcagaacaagctgaaacctgagatggacgagaagggcaacctgaccaccgccggctttgcctgctctcagtgtggccagcccctgttcgtgtacaagctggagcaggtgtctgagaagggcaaggcttacaccaactacttcggacggtgcaatgtggccgagcacgaaaagctgatcctgctggcccagctgaagcccgagaaggatagcgacgaagccgtgacatatagcctgggaaagtttgggcagagggccctggatttctacagcattcatgtgaccaaggagtccacccaccccgtgaagcccctggcccagatcgccggaaacagatacgcctccggacctgtgggaaaggccctgagcgacgcatgtatgggcacaatcgcctccttcctgtctaagtaccaggacatcatcatcgaacaccagaaggtggtgaagggcaaccagaagagactggagagcctgcgggagctggccggcaaggaaaacctggaataccctagcgtgaccctgccacctcagcctcacaccaaggagggcgttgatgcctacaacgaagtgatcgcccgggtgcgaatgtgggtgaacctgaacctgtggcagaagctgaagctaagcagagatgatgccaagcctctgctgagactgaagggattcccttcctttcctctggtcgagagacaggccaacgaagtggactggtgggacatggtgtgtaacgtgaagaagctgatcaacgagaaaaaggaggatggcaaggtgttttggcagaatctggctggctacaagagacaggaagccctgagaccatacctgagcagcgaggaagatcggaagaagggaaagaaattcgctcggtaccagctgggcgacctgctgctgcacctggaaaagaagcacggcgaggactggggaaaggtgtacgacgaggcctgggagcggattgacaagaaagtggaaggcctgagcaagcacatcaagctggaagaggaacggagaagcgaggacgcccagagcaaggccgccctgaccgactggctgcgggctaaggccagcttcgtgatcgagggcctgaaggaggccgacaaggacgagttctgcagatgcgagctgaagctgcagaagtggtacggggacctgcggggaaagcccttcgccatcgaagccgagaacagcatcctggacatcagcggcttcagcaagcagtacaactgtgccttcatctggcagaaggacggcgtgaagaagctgaacctgtacctgatcatcaactacttcaagggcggcaagctgcggttcaagaagatcaaacctgaagccttcgaagccaacagattctacaccgtgatcaacaaaaagagcggcgagatcgtgcccatggaggtgaacttcaacttcgacgaccccaacctgatcatcctgcctctggcctttggcaagagacagggcagagaattcatctggaacgacctgctgtccctggaaaccggcagcctgaagctggccaacggaagagtgatcgagaagacactgtacaacagaagaacccggcaggatgagcctgccctgttcgtggccctgaccttcgagcggcgggaggtcctggactcctccaatatcaaaccaatgaacctgatcggcgtggcaagaggcgaaaacatccccgccgtgatcgccctgaccgaccccgagggctgcccactgagccggtttaaggatagcctgggaaacccaacccacatcctgagaatcggcgagagctataaggagaagcagcggaccatccaggccaagaaggaggtggagcagcggagagccggcggctacagccggaagtacgccagcaaagccaagaatctggcagacgatatggtgagaaacaccgctagagatctgctgtactacgccgtgacccaggatgccatgctgatcttcgccaacctgagccggggcttcggccggcagggcaagcggaccttcatggccgagagacagtacacacggatggaggactggctgaccgccaagctggcctacgagggcctgagcaagacctacctgtccaagacactggcccagtacacctccaagacatgcagcaactgtgggtttaccatcaccagcgccgactacgacagggtgctggagaagctgaagaagacagcaacaggctggatgaccacaattaacggcaaggagctgaaggtggagggccagattacctactacaacagatacaagagacagaacgtagtcaaggacctgtccgtcgagctggatagactgagcgaagaatctgtgaacaacgacatctcctcctggacaaagggcagaagcggagaagctctgagcctcctgaagaaaagattctcccatagacccgtgcaggagaagttcgtgtgcctgaactgcggcttcgagacacacgcagccgagcaagccgccctgaacatcgccagatcctggctgttcctgcggagccaggagtacaagaaataccagacaaacaagacaaccggcaacaccgataagagagccttcgtcgagacctggcagtccttttaccggaagaagcttaaggaggtgtggaaacctgccgtgcggtctggcggatctggcggaggctccaccagccccaagaaaaagagaaaagtctaagctgccttctgcggggcttgccttctggccatgcccttcttctctcccttgcacctgtacctcttggtctttgaataaagcctgagtaggaaggctagcaaaaaaaaaaaaaaaaaaaaaaaaaaaaaaaaaaaaaaaaaaaaaaaaaaaaaaaaaaaaaaaaaaaaaaaaaaaaaaaa

SEQ ID NO: 8967 - RNA, 8787 nt, synthetic construct
  source 1..8787: mol_type = other RNA
aggaaataagagagaaaagaagagtaagaagaaatataagagccaccatggcccctaagaagaagcgtaaagtgagccggatgaaccacgaccaggagttcgacccccctaaggtgtaccctcccgtccccgccgagaagagaaagcccatccgggtcctgagcctgttcgatggcatcgccaccggtctgctggtgctgaaggacctgggcatccaggtggataggtacattgcctccgaggtgtgcgaggactccatcaccgtgggaatggtgcgtcatcagggcaagatcatgtacgtgggcgacgtgcggagcgtgacacagaagcatatccaggagtggggccctttcgacctggtgatcggcggcagcccttgcaatgacctgagcatcgtgaacccagcccggaagggcctgtacgagggaaccggcagactgttcttcgagttttacagactgctgcacgacgcccggcctaaggaaggcgacgaccggcccttcttttggctgttcgagaatgtggtggccatgggagtcagcgacaagcgggatattagccggttcctggagagcaaccccgtgatgatcgatgccaaggaagtgagcgccgcccaccgggccagatacttctggggcaatctgcctggcatgaacagacccctggccagcaccgtgaacgacaagctggagctgcaggagtgcctggagcacggccggatcgccaagttcagcaaggtgagaaccatcaccacccgaagcaacagcatcaaacaaggcaaggaccagcactttcctgtgttcatgaacgagaaggaggacatcctgtggtgtaccgagatggagagagtgttcgggttcccagtccactacacagatgtcagcaacatgtctagactggccagacagagactgctgggaagaagctggtccgtccctgtgatcagacacctgttcgcccctctgaaggagtacttcgcctgcgtgagcagcggcaacagcaacgccaacagccggggccccagcttctctagcggcctggtgccactgtccctgagagggagccacatgggccccatggagatctacaaaaccgtgagcgcctggaagcggcagcctgtgcgcgtgctgagcctgtttcggaatatcgataaagtcctgaaaagcctgggattcctggagagcggctctggctccggcggtggcaccctgaagtacgtggaggatgtgacaaacgtggtcagacgggatgtggagaagtggggccccttcgatctggtgtacggcagcacccaacccctgggcagctcttgtgaccggtgccctggctggtacatgtttcagttccaccggatcctgcagtacgccctgccgagacaggagtcccagcggccattcttttggattttcatggacaacttgctgctgaccgaggatgaccaggaaactaccactcggttcctgcagaccgaagccgtgaccctgcaggacgtgagaggccgggactaccagaacgccatgcgggtgtggtccaacatccctggactgaaaagcaagcacgcacctctgacccctaaagaagaggagtacctgcaggcccaggtgcggagcagaagcaagctggacgcccctaaggtggatctgctggtgaagaattgcctcctgcccctgagagagtacttcaagtatttcagccagaatagtctgcccctgggaggcagcggcggcggcgccatcaggagcgtgatgttcagcgacatcagcatcgacttcagccccgaggagtgggagtacctggacctggagcagaaggacctgtacagggacgtgatgctggagaactacagcaacctggtgagcctgggctgcttcatcagcaagcccgacgtgatcagcctgctggagcagggcaaggagccctggaaggtggtgaggaagaggaggaggcagtaccccgagatgctgctgctgctgggcggcccaagcagcggcgcccctcctcccagcggcggcaggcggcccaagcagcggcgcccctcctcccagcggcggcagcccagccggctccccaacctctaccgaggagggcacctctgagtccgccacccccgagagcggccctggcacctccaccgagcccagcgagggcagcgcacccggcagccctgccggcagccccacctccacagaggagggaaccagcaccgagcccagcgaaggcagcgccccaggcaccagcaccgagcctagtgagcaggagattaaacggatcaacaagatcagaagaagacttgtgaaagacagcaacaccaagaaggccggcaagacaggccccatgaaaaccctgctggttagagtgatgacacccgatctgagagagcggctggaaaacctgagaaagaagcctgaaaatatcccccagcccatcagcaatacatctagagccaacctgaataagctgctgaccgattacaccgaaatgaagaaggcgatcctgcatgtgtactgggaagagttccagaaggaccctgtgggcctgatgagccgggtggcccagcctgccagcaagaagatcgatcagaacaagctgaaacctgagatggacgagaagggcaacctgaccaccgccggctttgcctgctctcagtgtggccagcccctgttcgtgtacaagctggagcaggtgtctgagaagggcaaggcttacaccaactacttcggacggtgcaatgtggccgagcacgaaaagctgatcctgctggcccagctgaagcccgagaaggatagcgacgaagccgtgacatatagcctgggaaagtttgggcagagggccctggatttctacagcattcatgtgaccaaggagtccacccaccccgtgaagcccctggcccagatcgccggaaacagatacgcctccggacctgtgggaaaggccctgagcgacgcatgtatgggcacaatcgcctccttcctgtctaagtaccaggacatcatcatcgaacaccagaaggtggtgaagggcaaccagaagagactggagagcctgcgggagctggccggcaaggaaaacctggaataccctagcgtgaccctgccacctcagcctcacaccaaggagggcgttgatgcctacaacgaagtgatcgcccgggtgcgaatgtgggtgaacctgaacctgtggcagaagctgaagctaagcagagatgatgccaagcctctgctgagactgaagggattcccttcctttcctctggtcgagagacaggccaacgaagtggactggtgggacatggtgtgtaacgtgaagaagctgatcaacgagaaaaaggaggatggcaaggtgttttggcagaatctggctggctacaagagacaggaagccctgagaccatacctgagcagcgaggaagatcggaagaagggaaagaaattcgctcggtaccagctgggcgacctgctgctgcacctggaaaagaagcacggcgaggactggggaaaggtgtacgacgaggcctgggagcggattgacaagaaagtggaaggcctgagcaagcacatcaagctggaagaggaacggagaagcgaggacgcccagagcaaggccgccctgaccgactggctgcgggctaaggccagcttcgtgatcgagggcctgaaggaggccgacaaggacgagttctgcagatgcgagctgaagctgcagaagtggtacggggacctgcggggaaagcccttcgccatcgaagccgagaacagcatcctggacatcagcggcttcagcaagcagtacaactgtgccttcatctggcagaaggacggcgtgaagaagctgaacctgtacctgatcatcaactacttcaagggcggcaagctgcggttcaagaagatcaaacctgaagccttcgaagccaacagattctacaccgtgatcaacaaaaagagcggcgagatcgtgcccatggaggtgaacttcaacttcgacgaccccaacctgatcatcctgcctctggcctttggcaagagacagggcagagaattcatctggaacgacctgctgtccctggaaaccggcagcctgaagctggccaacggaagagtgatcgagaagacactgtacaacagaagaacccggcaggatgagcctgccctgttcgtggccctgaccttcgagcggcgggaggtcctggactcctccaatatcaaaccaatgaacctgatcggcgtggcaagaggcgaaaacatccccgccgtgatcgccctgaccgaccccgagggctgcccactgagccggtttaaggatagcctgggaaacccaacccacatcctgagaatcggcgagagctataaggagaagcagcggaccatccaggccaagaaggaggtggagcagcggagagccggcggctacagccggaagtacgccagcaaagccaagaatctggcagacgatatggtgagaaacaccgctagagatctgctgtactacgccgtgacccaggatgccatgctgatcttcgccaacctgagccggggcttcggccggcagggcaagcggaccttcatggccgagagacagtacacacggatggaggactggctgaccgccaagctggcctacgagggcctgagcaagacctacctgtccaagacactggcccagtacacctccaagacatgcagcaactgtgggtttaccatcaccagcgccgactacgacagggtgctggagaagctgaagaagacagcaacaggctggatgaccacaattaacggcaaggagctgaaggtggagggccagattacctactacaacagatacaagagacagaacgtagtcaaggacctgtccgtcgagctggatagactgagcgaagaatctgtgaacaacgacatctcctcctggacaaagggcagaagcggagaagctctgagcctcctgaagaaaagattctcccatagacccgtgcaggagaagttcgtgtgcctgaactgcggcttcgagacacacgcagccgagcaagccgccctgaacatcgccagatcctggctgttcctgcggagccaggagtacaagaaataccagacaaacaagacaaccggcaacaccgataagagagccttcgtcgagacctggcagtccttttaccggaagaagcttaaggaggtgtggaaacctgccgtgcggtctggcggatctggcggaggctccaccagccccaagaaaaagagaaaagtctaagctgccttctgcggggcttgccttctggccatgcccttcttctctcccttgcacctgtacctcttggtctttgaataaagcctgagtaggaaggctagcaaaaaaaaaaaaaaaaaaaaaaaaaaaaaaaaaaaaaaaaaaaaaaaaaaaaaaaaaaaaaaaaaaaaaaaaaaaaaaaagcccagccggctccccaacctctaccgaggagggcacctctgagtccgccacccccgagagcggccctggcacctccaccgagcccagcgagggcagcgcacccggcagccctgccggcagccccacctccacagaggagggaaccagcaccgagcccagcgaaggcagcgccccaggcaccagcaccgagcctagtgagcaggagattaaacggatcaacaagatcagaagaagacttgtgaaagacagcaacaccaagaaggccggcaagacaggccccatgaaaaccctgctggttagagtgatgacacccgatctgagagagcggctggaaaacctgagaaagaagcctgaaaatatcccccagcccatcagcaatacatctagagccaacctgaataagctgctgaccgattacaccgaaatgaagaaggcgatcctgcatgtgtactgggaagagttccagaaggaccctgtgggcctgatgagccgggtggcccagcctgccagcaagaagatcgatcagaacaagctgaaacctgagatggacgagaagggcaacctgaccaccgccggctttgcctgctctcagtgtggccagcccctgttcgtgtacaagctggagcaggtgtctgagaagggcaaggcttacaccaactacttcggacggtgcaatgtggccgagcacgaaaagctgatcctgctggcccagctgaagcccgagaaggatagcgacgaagccgtgacatatagcctgggaaagtttgggcagagggccctggatttctacagcattcatgtgaccaaggagtccacccaccccgtgaagcccctggcccagatcgccggaaacagatacgcctccggacctgtgggaaaggccctgagcgacgcatgtatgggcacaatcgcctccttcctgtctaagtaccaggacatcatcatcgaacaccagaaggtggtgaagggcaaccagaagagactggagagcctgcgggagctggccggcaaggaaaacctggaataccctagcgtgaccctgccacctcagcctcacaccaaggagggcgttgatgcctacaacgaagtgatcgcccgggtgcgaatgtgggtgaacctgaacctgtggcagaagctgaagctaagcagagatgatgccaagcctctgctgagactgaagggattcccttcctttcctctggtcgagagacaggccaacgaagtggactggtgggacatggtgtgtaacgtgaagaagctgatcaacgagaaaaaggaggatggcaaggtgttttggcagaatctggctggctacaagagacaggaagccctgagaccatacctgagcagcgaggaagatcggaagaagggaaagaaattcgctcggtaccagctgggcgacctgctgctgcacctggaaaagaagcacggcgaggactggggaaaggtgtacgacgaggcctgggagcggattgacaagaaagtggaaggcctgagcaagcacatcaagctggaagaggaacggagaagcgaggacgcccagagcaaggccgccctgaccgactggctgcgggctaaggccagcttcgtgatcgagggcctgaaggaggccgacaaggacgagttctgcagatgcgagctgaagctgcagaagtggtacggggacctgcggggaaagcccttcgccatcgaagccgagaacagcatcctggacatcagcggcttcagcaagcagtacaactgtgccttcatctggcagaaggacggcgtgaagaagctgaacctgtacctgatcatcaactacttcaagggcggcaagctgcggttcaagaagatcaaacctgaagccttcgaagccaacagattctacaccgtgatcaacaaaaagagcggcgagatcgtgcccatggaggtgaacttcaacttcgacgaccccaacctgatcatcctgcctctggcctttggcaagagacagggcagagaattcatctggaacgacctgctgtccctggaaaccggcagcctgaagctggccaacggaagagtgatcgagaagacactgtacaacagaagaacccggcaggatgagcctgccctgttcgtggccctgaccttcgagcggcgggaggtcctggactcctccaatatcaaaccaatgaacctgatcggcgtggcaagaggcgaaaacatccccgccgtgatcgccctgaccgaccccgagggctgcccactgagccggtttaaggatagcctgggaaacccaacccacatcctgagaatcggcgagagctataaggagaagcagcggaccatccaggccaagaaggaggtggagcagcggagagccggcggctacagccggaagtacgccagcaaagccaagaatctggcagacgatatggtgagaaacaccgctagagatctgctgtactacgccgtgacccaggatgccatgctgatcttcgccaacctgagccggggcttcggccggcagggcaagcggaccttcatggccgagagacagtacacacggatggaggactggctgaccgccaagctggcctacgagggcctgagcaagacctacctgtccaagacactggcccagtacacctccaagacatgcagcaactgtgggtttaccatcaccagcgccgactacgacagggtgctggagaagctgaagaagacagcaacaggctggatgaccacaattaacggcaaggagctgaaggtggagggccagattacctactacaacagatacaagagacagaacgtagtcaaggacctgtccgtcgagctggatagactgagcgaagaatctgtgaacaacgacatctcctcctggacaaagggcagaagcggagaagctctgagcctcctgaagaaaagattctcccatagacccgtgcaggagaagttcgtgtgcctgaactgcggcttcgagacacacgcagccgagcaagccgccctgaacatcgccagatcctggctgttcctgcggagccaggagtacaagaaataccagacaaacaagacaaccggcaacaccgataagagagccttcgtcgagacctggcagtccttttaccggaagaagcttaaggaggtgtggaaacctgccgtgcggtctggcggatctggcggaggctccaccagccccaagaaaaagagaaaagtctaagctgccttctgcggggcttgccttctggccatgcccttcttctctcccttgcacctgtacctcttggtctttgaataaagcctgagtaggaaggctagcaaaaaaaaaaaaaaaaaaaaaaaaaaaaaaaaaaaaaaaaaaaaaaaaaaaaaaaaaaaaaaaaaaaaaaaaaaaaaaaa

SEQ ID NO: 8968 - RNA, 8784 nt, synthetic construct
  source 1..8784: mol_type = other RNA
aggaaataagagagaaaagaagagtaagaagaaatataagagccaccatggcccctaagaagaagcgtaaagtgagccggatgaaccacgaccaggagttcgacccccctaaggtgtaccctcccgtccccgccgagaagagaaagcccatccgggtcctgagcctgttcgatggcatcgccaccggtctgctggtgctgaaggacctgggcatccaggtggataggtacattgcctccgaggtgtgcgaggactccatcaccgtgggaatggtgcgtcatcagggcaagatcatgtacgtgggcgacgtgcggagcgtgacacagaagcatatccaggagtggggccctttcgacctggtgatcggcggcagcccttgcaatgacctgagcatcgtgaacccagcccggaagggcctgtacgagggaaccggcagactgttcttcgagttttacagactgctgcacgacgcccggcctaaggaaggcgacgaccggcccttcttttggctgttcgagaatgtggtggccatgggagtcagcgacaagcgggatattagccggttcctggagagcaaccccgtgatgatcgatgccaaggaagtgagcgccgcccaccgggccagatacttctggggcaatctgcctggcatgaacagacccctggccagcaccgtgaacgacaagctggagctgcaggagtgcctggagcacggccggatcgccaagttcagcaaggtgagaaccatcaccacccgaagcaacagcatcaaacaaggcaaggaccagcactttcctgtgttcatgaacgagaaggaggacatcctgtggtgtaccgagatggagagagtgttcgggttcccagtccactacacagatgtcagcaacatgtctagactggccagacagagactgctgggaagaagctggtccgtccctgtgatcagacacctgttcgcccctctgaaggagtacttcgcctgcgtgagcagcggcaacagcaacgccaacagccggggccccagcttctctagcggcctggtgccactgtccctgagagggagccacatgggccccatggagatctacaaaaccgtgagcgcctggaagcggcagcctgtgcgcgtgctgagcctgtttcggaatatcgataaagtcctgaaaagcctgggattcctggagagcggctctggctccggcggtggcaccctgaagtacgtggaggatgtgacaaacgtggtcagacgggatgtggagaagtggggccccttcgatctggtgtacggcagcacccaacccctgggcagctcttgtgaccggtgccctggctggtacatgtttcagttccaccggatcctgcagtacgccctgccgagacaggagtcccagcggccattcttttggattttcatggacaacttgctgctgaccgaggatgaccaggaaactaccactcggttcctgcagaccgaagccgtgaccctgcaggacgtgagaggccgggactaccagaacgccatgcgggtgtggtccaacatccctggactgaaaagcaagcacgcacctctgacccctaaagaagaggagtacctgcaggcccaggtgcggagcagaagcaagctggacgcccctaaggtggatctgctggtgaagaattgcctcctgcccctgagagagtacttcaagtatttcagccagaatagtctgcccctgggaggcagcggcggcggcatggcccccagccagggcaggctgaccttcgaggacgtggccatcgagttcagccaggaggagtgggagtgcctggaccccgcccagagggccctgtacggcgaggtgatgctggagacctacaggaacctggtgagcctgggcctgaccagcaaggacagctgcagcctgaggaagaagcccaggaggaggaggaggggccagaagaggaccagggagtggcccctgctgaggtaccacggcggcccaagcagcggcgcccctcctcccagcggcggcaggcggcccaagcagcggcgcccctcctcccagcggcggcagcccagccggctccccaacctctaccgaggagggcacctctgagtccgccacccccgagagcggccctggcacctccaccgagcccagcgagggcagcgcacccggcagccctgccggcagccccacctccacagaggagggaaccagcaccgagcccagcgaaggcagcgccccaggcaccagcaccgagcctagtgagcaggagattaaacggatcaacaagatcagaagaagacttgtgaaagacagcaacaccaagaaggccggcaagacaggccccatgaaaaccctgctggttagagtgatgacacccgatctgagagagcggctggaaaacctgagaaagaagcctgaaaatatcccccagcccatcagcaatacatctagagccaacctgaataagctgctgaccgattacaccgaaatgaagaaggcgatcctgcatgtgtactgggaagagttccagaaggaccctgtgggcctgatgagccgggtggcccagcctgccagcaagaagatcgatcagaacaagctgaaacctgagatggacgagaagggcaacctgaccaccgccggctttgcctgctctcagtgtggccagcccctgttcgtgtacaagctggagcaggtgtctgagaagggcaaggcttacaccaactacttcggacggtgcaatgtggccgagcacgaaaagctgatcctgctggcccagctgaagcccgagaaggatagcgacgaagccgtgacatatagcctgggaaagtttgggcagagggccctggatttctacagcattcatgtgaccaaggagtccacccaccccgtgaagcccctggcccagatcgccggaaacagatacgcctccggacctgtgggaaaggccctgagcgacgcatgtatgggcacaatcgcctccttcctgtctaagtaccaggacatcatcatcgaacaccagaaggtggtgaagggcaaccagaagagactggagagcctgcgggagctggccggcaaggaaaacctggaataccctagcgtgaccctgccacctcagcctcacaccaaggagggcgttgatgcctacaacgaagtgatcgcccgggtgcgaatgtgggtgaacctgaacctgtggcagaagctgaagctaagcagagatgatgccaagcctctgctgagactgaagggattcccttcctttcctctggtcgagagacaggccaacgaagtggactggtgggacatggtgtgtaacgtgaagaagctgatcaacgagaaaaaggaggatggcaaggtgttttggcagaatctggctggctacaagagacaggaagccctgagaccatacctgagcagcgaggaagatcggaagaagggaaagaaattcgctcggtaccagctgggcgacctgctgctgcacctggaaaagaagcacggcgaggactggggaaaggtgtacgacgaggcctgggagcggattgacaagaaagtggaaggcctgagcaagcacatcaagctggaagaggaacggagaagcgaggacgcccagagcaaggccgccctgaccgactggctgcgggctaaggccagcttcgtgatcgagggcctgaaggaggccgacaaggacgagttctgcagatgcgagctgaagctgcagaagtggtacggggacctgcggggaaagcccttcgccatcgaagccgagaacagcatcctggacatcagcggcttcagcaagcagtacaactgtgccttcatctggcagaaggacggcgtgaagaagctgaacctgtacctgatcatcaactacttcaagggcggcaagctgcggttcaagaagatcaaacctgaagccttcgaagccaacagattctacaccgtgatcaacaaaaagagcggcgagatcgtgcccatggaggtgaacttcaacttcgacgaccccaacctgatcatcctgcctctggcctttggcaagagacagggcagagaattcatctggaacgacctgctgtccctggaaaccggcagcctgaagctggccaacggaagagtgatcgagaagacactgtacaacagaagaacccggcaggatgagcctgccctgttcgtggccctgaccttcgagcggcgggaggtcctggactcctccaatatcaaaccaatgaacctgatcggcgtggcaagaggcgaaaacatccccgccgtgatcgccctgaccgaccccgagggctgcccactgagccggtttaaggatagcctgggaaacccaacccacatcctgagaatcggcgagagctataaggagaagcagcggaccatccaggccaagaaggaggtggagcagcggagagccggcggctacagccggaagtacgccagcaaagccaagaatctggcagacgatatggtgagaaacaccgctagagatctgctgtactacgccgtgacccaggatgccatgctgatcttcgccaacctgagccggggcttcggccggcagggcaagcggaccttcatggccgagagacagtacacacggatggaggactggctgaccgccaagctggcctacgagggcctgagcaagacctacctgtccaagacactggcccagtacacctccaagacatgcagcaactgtgggtttaccatcaccagcgccgactacgacagggtgctggagaagctgaagaagacagcaacaggctggatgaccacaattaacggcaaggagctgaaggtggagggccagattacctactacaacagatacaagagacagaacgtagtcaaggacctgtccgtcgagctggatagactgagcgaagaatctgtgaacaacgacatctcctcctggacaaagggcagaagcggagaagctctgagcctcctgaagaaaagattctcccatagacccgtgcaggagaagttcgtgtgcctgaactgcggcttcgagacacacgcagccgagcaagccgccctgaacatcgccagatcctggctgttcctgcggagccaggagtacaagaaataccagacaaacaagacaaccggcaacaccgataagagagccttcgtcgagacctggcagtccttttaccggaagaagcttaaggaggtgtggaaacctgccgtgcggtctggcggatctggcggaggctccaccagccccaagaaaaagagaaaagtctaagctgccttctgcggggcttgccttctggccatgcccttcttctctcccttgcacctgtacctcttggtctttgaataaagcctgagtaggaaggctagcaaaaaaaaaaaaaaaaaaaaaaaaaaaaaaaaaaaaaaaaaaaaaaaaaaaaaaaaaaaaaaaaaaaaaaaaaaaaaaaagcccagccggctccccaacctctaccgaggagggcacctctgagtccgccacccccgagagcggccctggcacctccaccgagcccagcgagggcagcgcacccggcagccctgccggcagccccacctccacagaggagggaaccagcaccgagcccagcgaaggcagcgccccaggcaccagcaccgagcctagtgagcaggagattaaacggatcaacaagatcagaagaagacttgtgaaagacagcaacaccaagaaggccggcaagacaggccccatgaaaaccctgctggttagagtgatgacacccgatctgagagagcggctggaaaacctgagaaagaagcctgaaaatatcccccagcccatcagcaatacatctagagccaacctgaataagctgctgaccgattacaccgaaatgaagaaggcgatcctgcatgtgtactgggaagagttccagaaggaccctgtgggcctgatgagccgggtggcccagcctgccagcaagaagatcgatcagaacaagctgaaacctgagatggacgagaagggcaacctgaccaccgccggctttgcctgctctcagtgtggccagcccctgttcgtgtacaagctggagcaggtgtctgagaagggcaaggcttacaccaactacttcggacggtgcaatgtggccgagcacgaaaagctgatcctgctggcccagctgaagcccgagaaggatagcgacgaagccgtgacatatagcctgggaaagtttgggcagagggccctggatttctacagcattcatgtgaccaaggagtccacccaccccgtgaagcccctggcccagatcgccggaaacagatacgcctccggacctgtgggaaaggccctgagcgacgcatgtatgggcacaatcgcctccttcctgtctaagtaccaggacatcatcatcgaacaccagaaggtggtgaagggcaaccagaagagactggagagcctgcgggagctggccggcaaggaaaacctggaataccctagcgtgaccctgccacctcagcctcacaccaaggagggcgttgatgcctacaacgaagtgatcgcccgggtgcgaatgtgggtgaacctgaacctgtggcagaagctgaagctaagcagagatgatgccaagcctctgctgagactgaagggattcccttcctttcctctggtcgagagacaggccaacgaagtggactggtgggacatggtgtgtaacgtgaagaagctgatcaacgagaaaaaggaggatggcaaggtgttttggcagaatctggctggctacaagagacaggaagccctgagaccatacctgagcagcgaggaagatcggaagaagggaaagaaattcgctcggtaccagctgggcgacctgctgctgcacctggaaaagaagcacggcgaggactggggaaaggtgtacgacgaggcctgggagcggattgacaagaaagtggaaggcctgagcaagcacatcaagctggaagaggaacggagaagcgaggacgcccagagcaaggccgccctgaccgactggctgcgggctaaggccagcttcgtgatcgagggcctgaaggaggccgacaaggacgagttctgcagatgcgagctgaagctgcagaagtggtacggggacctgcggggaaagcccttcgccatcgaagccgagaacagcatcctggacatcagcggcttcagcaagcagtacaactgtgccttcatctggcagaaggacggcgtgaagaagctgaacctgtacctgatcatcaactacttcaagggcggcaagctgcggttcaagaagatcaaacctgaagccttcgaagccaacagattctacaccgtgatcaacaaaaagagcggcgagatcgtgcccatggaggtgaacttcaacttcgacgaccccaacctgatcatcctgcctctggcctttggcaagagacagggcagagaattcatctggaacgacctgctgtccctggaaaccggcagcctgaagctggccaacggaagagtgatcgagaagacactgtacaacagaagaacccggcaggatgagcctgccctgttcgtggccctgaccttcgagcggcgggaggtcctggactcctccaatatcaaaccaatgaacctgatcggcgtggcaagaggcgaaaacatccccgccgtgatcgccctgaccgaccccgagggctgcccactgagccggtttaaggatagcctgggaaacccaacccacatcctgagaatcggcgagagctataaggagaagcagcggaccatccaggccaagaaggaggtggagcagcggagagccggcggctacagccggaagtacgccagcaaagccaagaatctggcagacgatatggtgagaaacaccgctagagatctgctgtactacgccgtgacccaggatgccatgctgatcttcgccaacctgagccggggcttcggccggcagggcaagcggaccttcatggccgagagacagtacacacggatggaggactggctgaccgccaagctggcctacgagggcctgagcaagacctacctgtccaagacactggcccagtacacctccaagacatgcagcaactgtgggtttaccatcaccagcgccgactacgacagggtgctggagaagctgaagaagacagcaacaggctggatgaccacaattaacggcaaggagctgaaggtggagggccagattacctactacaacagatacaagagacagaacgtagtcaaggacctgtccgtcgagctggatagactgagcgaagaatctgtgaacaacgacatctcctcctggacaaagggcagaagcggagaagctctgagcctcctgaagaaaagattctcccatagacccgtgcaggagaagttcgtgtgcctgaactgcggcttcgagacacacgcagccgagcaagccgccctgaacatcgccagatcctggctgttcctgcggagccaggagtacaagaaataccagacaaacaagacaaccggcaacaccgataagagagccttcgtcgagacctggcagtccttttaccggaagaagcttaaggaggtgtggaaacctgccgtgcggtctggcggatctggcggaggctccaccagccccaagaaaaagagaaaagtctaagctgccttctgcggggcttgccttctggccatgcccttcttctctcccttgcacctgtacctcttggtctttgaataaagcctgagtaggaaggctagcaaaaaaaaaaaaaaaaaaaaaaaaaaaaaaaaaaaaaaaaaaaaaaaaaaaaaaaaaaaaaaaaaaaaaaaaaaaaaaaa

SEQ ID NO: 8969 - RNA, 8787 nt, synthetic construct
  source 1..8787: mol_type = other RNA
aggaaataagagagaaaagaagagtaagaagaaatataagagccaccatggcccctaagaagaagcgtaaagtgagccggatgaaccacgaccaggagttcgacccccctaaggtgtaccctcccgtccccgccgagaagagaaagcccatccgggtcctgagcctgttcgatggcatcgccaccggtctgctggtgctgaaggacctgggcatccaggtggataggtacattgcctccgaggtgtgcgaggactccatcaccgtgggaatggtgcgtcatcagggcaagatcatgtacgtgggcgacgtgcggagcgtgacacagaagcatatccaggagtggggccctttcgacctggtgatcggcggcagcccttgcaatgacctgagcatcgtgaacccagcccggaagggcctgtacgagggaaccggcagactgttcttcgagttttacagactgctgcacgacgcccggcctaaggaaggcgacgaccggcccttcttttggctgttcgagaatgtggtggccatgggagtcagcgacaagcgggatattagccggttcctggagagcaaccccgtgatgatcgatgccaaggaagtgagcgccgcccaccgggccagatacttctggggcaatctgcctggcatgaacagacccctggccagcaccgtgaacgacaagctggagctgcaggagtgcctggagcacggccggatcgccaagttcagcaaggtgagaaccatcaccacccgaagcaacagcatcaaacaaggcaaggaccagcactttcctgtgttcatgaacgagaaggaggacatcctgtggtgtaccgagatggagagagtgttcgggttcccagtccactacacagatgtcagcaacatgtctagactggccagacagagactgctgggaagaagctggtccgtccctgtgatcagacacctgttcgcccctctgaaggagtacttcgcctgcgtgagcagcggcaacagcaacgccaacagccggggccccagcttctctagcggcctggtgccactgtccctgagagggagccacatgggccccatggagatctacaaaaccgtgagcgcctggaagcggcagcctgtgcgcgtgctgagcctgtttcggaatatcgataaagtcctgaaaagcctgggattcctggagagcggctctggctccggcggtggcaccctgaagtacgtggaggatgtgacaaacgtggtcagacgggatgtggagaagtggggccccttcgatctggtgtacggcagcacccaacccctgggcagctcttgtgaccggtgccctggctggtacatgtttcagttccaccggatcctgcagtacgccctgccgagacaggagtcccagcggccattcttttggattttcatggacaacttgctgctgaccgaggatgaccaggaaactaccactcggttcctgcagaccgaagccgtgaccctgcaggacgtgagaggccgggactaccagaacgccatgcgggtgtggtccaacatccctggactgaaaagcaagcacgcacctctgacccctaaagaagaggagtacctgcaggcccaggtgcggagcagaagcaagctggacgcccctaaggtggatctgctggtgaagaattgcctcctgcccctgagagagtacttcaagtatttcagccagaatagtctgcccctgggaggcagcggcggcggcagccagagcctggtgaccttcggcgacgtggccgtggagttcagccccgaggagtgggagtggctggacagcgcccagaggagcctgtacaggagcgtgatgctggagaactacaggagcctggtgagcctgggcctgtgcgtgagcaagcccaagatgatcagcagcctggagcagaggaaggagccctgggccgccaagaggaccctgaccaggggcggctgcagcgacagcagggccctgggcggcccaagcagcggcgcccctcctcccagcggcggcaggcggcccaagcagcggcgcccctcctcccagcggcggcagcccagccggctccccaacctctaccgaggagggcacctctgagtccgccacccccgagagcggccctggcacctccaccgagcccagcgagggcagcgcacccggcagccctgccggcagccccacctccacagaggagggaaccagcaccgagcccagcgaaggcagcgccccaggcaccagcaccgagcctagtgagcaggagattaaacggatcaacaagatcagaagaagacttgtgaaagacagcaacaccaagaaggccggcaagacaggccccatgaaaaccctgctggttagagtgatgacacccgatctgagagagcggctggaaaacctgagaaagaagcctgaaaatatcccccagcccatcagcaatacatctagagccaacctgaataagctgctgaccgattacaccgaaatgaagaaggcgatcctgcatgtgtactgggaagagttccagaaggaccctgtgggcctgatgagccgggtggcccagcctgccagcaagaagatcgatcagaacaagctgaaacctgagatggacgagaagggcaacctgaccaccgccggctttgcctgctctcagtgtggccagcccctgttcgtgtacaagctggagcaggtgtctgagaagggcaaggcttacaccaactacttcggacggtgcaatgtggccgagcacgaaaagctgatcctgctggcccagctgaagcccgagaaggatagcgacgaagccgtgacatatagcctgggaaagtttgggcagagggccctggatttctacagcattcatgtgaccaaggagtccacccaccccgtgaagcccctggcccagatcgccggaaacagatacgcctccggacctgtgggaaaggccctgagcgacgcatgtatgggcacaatcgcctccttcctgtctaagtaccaggacatcatcatcgaacaccagaaggtggtgaagggcaaccagaagagactggagagcctgcgggagctggccggcaaggaaaacctggaataccctagcgtgaccctgccacctcagcctcacaccaaggagggcgttgatgcctacaacgaagtgatcgcccgggtgcgaatgtgggtgaacctgaacctgtggcagaagctgaagctaagcagagatgatgccaagcctctgctgagactgaagggattcccttcctttcctctggtcgagagacaggccaacgaagtggactggtgggacatggtgtgtaacgtgaagaagctgatcaacgagaaaaaggaggatggcaaggtgttttggcagaatctggctggctacaagagacaggaagccctgagaccatacctgagcagcgaggaagatcggaagaagggaaagaaattcgctcggtaccagctgggcgacctgctgctgcacctggaaaagaagcacggcgaggactggggaaaggtgtacgacgaggcctgggagcggattgacaagaaagtggaaggcctgagcaagcacatcaagctggaagaggaacggagaagcgaggacgcccagagcaaggccgccctgaccgactggctgcgggctaaggccagcttcgtgatcgagggcctgaaggaggccgacaaggacgagttctgcagatgcgagctgaagctgcagaagtggtacggggacctgcggggaaagcccttcgccatcgaagccgagaacagcatcctggacatcagcggcttcagcaagcagtacaactgtgccttcatctggcagaaggacggcgtgaagaagctgaacctgtacctgatcatcaactacttcaagggcggcaagctgcggttcaagaagatcaaacctgaagccttcgaagccaacagattctacaccgtgatcaacaaaaagagcggcgagatcgtgcccatggaggtgaacttcaacttcgacgaccccaacctgatcatcctgcctctggcctttggcaagagacagggcagagaattcatctggaacgacctgctgtccctggaaaccggcagcctgaagctggccaacggaagagtgatcgagaagacactgtacaacagaagaacccggcaggatgagcctgccctgttcgtggccctgaccttcgagcggcgggaggtcctggactcctccaatatcaaaccaatgaacctgatcggcgtggcaagaggcgaaaacatccccgccgtgatcgccctgaccgaccccgagggctgcccactgagccggtttaaggatagcctgggaaacccaacccacatcctgagaatcggcgagagctataaggagaagcagcggaccatccaggccaagaaggaggtggagcagcggagagccggcggctacagccggaagtacgccagcaaagccaagaatctggcagacgatatggtgagaaacaccgctagagatctgctgtactacgccgtgacccaggatgccatgctgatcttcgccaacctgagccggggcttcggccggcagggcaagcggaccttcatggccgagagacagtacacacggatggaggactggctgaccgccaagctggcctacgagggcctgagcaagacctacctgtccaagacactggcccagtacacctccaagacatgcagcaactgtgggtttaccatcaccagcgccgactacgacagggtgctggagaagctgaagaagacagcaacaggctggatgaccacaattaacggcaaggagctgaaggtggagggccagattacctactacaacagatacaagagacagaacgtagtcaaggacctgtccgtcgagctggatagactgagcgaagaatctgtgaacaacgacatctcctcctggacaaagggcagaagcggagaagctctgagcctcctgaagaaaagattctcccatagacccgtgcaggagaagttcgtgtgcctgaactgcggcttcgagacacacgcagccgagcaagccgccctgaacatcgccagatcctggctgttcctgcggagccaggagtacaagaaataccagacaaacaagacaaccggcaacaccgataagagagccttcgtcgagacctggcagtccttttaccggaagaagcttaaggaggtgtggaaacctgccgtgcggtctggcggatctggcggaggctccaccagccccaagaaaaagagaaaagtctaagctgccttctgcggggcttgccttctggccatgcccttcttctctcccttgcacctgtacctcttggtctttgaataaagcctgagtaggaaggctagcaaaaaaaaaaaaaaaaaaaaaaaaaaaaaaaaaaaaaaaaaaaaaaaaaaaaaaaaaaaaaaaaaaaaaaaaaaaaaaaagcccagccggctccccaacctctaccgaggagggcacctctgagtccgccacccccgagagcggccctggcacctccaccgagcccagcgagggcagcgcacccggcagccctgccggcagccccacctccacagaggagggaaccagcaccgagcccagcgaaggcagcgccccaggcaccagcaccgagcctagtgagcaggagattaaacggatcaacaagatcagaagaagacttgtgaaagacagcaacaccaagaaggccggcaagacaggccccatgaaaaccctgctggttagagtgatgacacccgatctgagagagcggctggaaaacctgagaaagaagcctgaaaatatcccccagcccatcagcaatacatctagagccaacctgaataagctgctgaccgattacaccgaaatgaagaaggcgatcctgcatgtgtactgggaagagttccagaaggaccctgtgggcctgatgagccgggtggcccagcctgccagcaagaagatcgatcagaacaagctgaaacctgagatggacgagaagggcaacctgaccaccgccggctttgcctgctctcagtgtggccagcccctgttcgtgtacaagctggagcaggtgtctgagaagggcaaggcttacaccaactacttcggacggtgcaatgtggccgagcacgaaaagctgatcctgctggcccagctgaagcccgagaaggatagcgacgaagccgtgacatatagcctgggaaagtttgggcagagggccctggatttctacagcattcatgtgaccaaggagtccacccaccccgtgaagcccctggcccagatcgccggaaacagatacgcctccggacctgtgggaaaggccctgagcgacgcatgtatgggcacaatcgcctccttcctgtctaagtaccaggacatcatcatcgaacaccagaaggtggtgaagggcaaccagaagagactggagagcctgcgggagctggccggcaaggaaaacctggaataccctagcgtgaccctgccacctcagcctcacaccaaggagggcgttgatgcctacaacgaagtgatcgcccgggtgcgaatgtgggtgaacctgaacctgtggcagaagctgaagctaagcagagatgatgccaagcctctgctgagactgaagggattcccttcctttcctctggtcgagagacaggccaacgaagtggactggtgggacatggtgtgtaacgtgaagaagctgatcaacgagaaaaaggaggatggcaaggtgttttggcagaatctggctggctacaagagacaggaagccctgagaccatacctgagcagcgaggaagatcggaagaagggaaagaaattcgctcggtaccagctgggcgacctgctgctgcacctggaaaagaagcacggcgaggactggggaaaggtgtacgacgaggcctgggagcggattgacaagaaagtggaaggcctgagcaagcacatcaagctggaagaggaacggagaagcgaggacgcccagagcaaggccgccctgaccgactggctgcgggctaaggccagcttcgtgatcgagggcctgaaggaggccgacaaggacgagttctgcagatgcgagctgaagctgcagaagtggtacggggacctgcggggaaagcccttcgccatcgaagccgagaacagcatcctggacatcagcggcttcagcaagcagtacaactgtgccttcatctggcagaaggacggcgtgaagaagctgaacctgtacctgatcatcaactacttcaagggcggcaagctgcggttcaagaagatcaaacctgaagccttcgaagccaacagattctacaccgtgatcaacaaaaagagcggcgagatcgtgcccatggaggtgaacttcaacttcgacgaccccaacctgatcatcctgcctctggcctttggcaagagacagggcagagaattcatctggaacgacctgctgtccctggaaaccggcagcctgaagctggccaacggaagagtgatcgagaagacactgtacaacagaagaacccggcaggatgagcctgccctgttcgtggccctgaccttcgagcggcgggaggtcctggactcctccaatatcaaaccaatgaacctgatcggcgtggcaagaggcgaaaacatccccgccgtgatcgccctgaccgaccccgagggctgcccactgagccggtttaaggatagcctgggaaacccaacccacatcctgagaatcggcgagagctataaggagaagcagcggaccatccaggccaagaaggaggtggagcagcggagagccggcggctacagccggaagtacgccagcaaagccaagaatctggcagacgatatggtgagaaacaccgctagagatctgctgtactacgccgtgacccaggatgccatgctgatcttcgccaacctgagccggggcttcggccggcagggcaagcggaccttcatggccgagagacagtacacacggatggaggactggctgaccgccaagctggcctacgagggcctgagcaagacctacctgtccaagacactggcccagtacacctccaagacatgcagcaactgtgggtttaccatcaccagcgccgactacgacagggtgctggagaagctgaagaagacagcaacaggctggatgaccacaattaacggcaaggagctgaaggtggagggccagattacctactacaacagatacaagagacagaacgtagtcaaggacctgtccgtcgagctggatagactgagcgaagaatctgtgaacaacgacatctcctcctggacaaagggcagaagcggagaagctctgagcctcctgaagaaaagattctcccatagacccgtgcaggagaagttcgtgtgcctgaactgcggcttcgagacacacgcagccgagcaagccgccctgaacatcgccagatcctggctgttcctgcggagccaggagtacaagaaataccagacaaacaagacaaccggcaacaccgataagagagccttcgtcgagacctggcagtccttttaccggaagaagcttaaggaggtgtggaaacctgccgtgcggtctggcggatctggcggaggctccaccagccccaagaaaaagagaaaagtctaagctgccttctgcggggcttgccttctggccatgcccttcttctctcccttgcacctgtacctcttggtctttgaataaagcctgagtaggaaggctagcaaaaaaaaaaaaaaaaaaaaaaaaaaaaaaaaaaaaaaaaaaaaaaaaaaaaaaaaaaaaaaaaaaaaaaaaaaaaaaaa

SEQ ID NO: 8970 - RNA, 8787 nt, synthetic construct
  source 1..8787: mol_type = other RNA
aggaaataagagagaaaagaagagtaagaagaaatataagagccaccatggcccctaagaagaagcgtaaagtgagccggatgaaccacgaccaggagttcgacccccctaaggtgtaccctcccgtccccgccgagaagagaaagcccatccgggtcctgagcctgttcgatggcatcgccaccggtctgctggtgctgaaggacctgggcatccaggtggataggtacattgcctccgaggtgtgcgaggactccatcaccgtgggaatggtgcgtcatcagggcaagatcatgtacgtgggcgacgtgcggagcgtgacacagaagcatatccaggagtggggccctttcgacctggtgatcggcggcagcccttgcaatgacctgagcatcgtgaacccagcccggaagggcctgtacgagggaaccggcagactgttcttcgagttttacagactgctgcacgacgcccggcctaaggaaggcgacgaccggcccttcttttggctgttcgagaatgtggtggccatgggagtcagcgacaagcgggatattagccggttcctggagagcaaccccgtgatgatcgatgccaaggaagtgagcgccgcccaccgggccagatacttctggggcaatctgcctggcatgaacagacccctggccagcaccgtgaacgacaagctggagctgcaggagtgcctggagcacggccggatcgccaagttcagcaaggtgagaaccatcaccacccgaagcaacagcatcaaacaaggcaaggaccagcactttcctgtgttcatgaacgagaaggaggacatcctgtggtgtaccgagatggagagagtgttcgggttcccagtccactacacagatgtcagcaacatgtctagactggccagacagagactgctgggaagaagctggtccgtccctgtgatcagacacctgttcgcccctctgaaggagtacttcgcctgcgtgagcagcggcaacagcaacgccaacagccggggccccagcttctctagcggcctggtgccactgtccctgagagggagccacatgggccccatggagatctacaaaaccgtgagcgcctggaagcggcagcctgtgcgcgtgctgagcctgtttcggaatatcgataaagtcctgaaaagcctgggattcctggagagcggctctggctccggcggtggcaccctgaagtacgtggaggatgtgacaaacgtggtcagacgggatgtggagaagtggggccccttcgatctggtgtacggcagcacccaacccctgggcagctcttgtgaccggtgccctggctggtacatgtttcagttccaccggatcctgcagtacgccctgccgagacaggagtcccagcggccattcttttggattttcatggacaacttgctgctgaccgaggatgaccaggaaactaccactcggttcctgcagaccgaagccgtgaccctgcaggacgtgagaggccgggactaccagaacgccatgcgggtgtggtccaacatccctggactgaaaagcaagcacgcacctctgacccctaaagaagaggagtacctgcaggcccaggtgcggagcagaagcaagctggacgcccctaaggtggatctgctggtgaagaattgcctcctgcccctgagagagtacttcaagtatttcagccagaatagtctgcccctgggaggcagcggcggcggcagcaagctgcccgtgaccttcggcgacctggccatctacttcagccaggaggagtgggagtggctgagccccatccagaaggacctgtacgaggacgtgatgctggagaactaccagaacctggtgagcctgggcctgagcttcaggaggcccaacgtgatcaccctgctggagaagggcaaggccccctggatggtggagcccgtgaggaagaggaggggcctggacagcaagagcaagtgcggcggcccaagcagcggcgcccctcctcccagcggcggcaggcggcccaagcagcggcgcccctcctcccagcggcggcagcccagccggctccccaacctctaccgaggagggcacctctgagtccgccacccccgagagcggccctggcacctccaccgagcccagcgagggcagcgcacccggcagccctgccggcagccccacctccacagaggagggaaccagcaccgagcccagcgaaggcagcgccccaggcaccagcaccgagcctagtgagcaggagattaaacggatcaacaagatcagaagaagacttgtgaaagacagcaacaccaagaaggccggcaagacaggccccatgaaaaccctgctggttagagtgatgacacccgatctgagagagcggctggaaaacctgagaaagaagcctgaaaatatcccccagcccatcagcaatacatctagagccaacctgaataagctgctgaccgattacaccgaaatgaagaaggcgatcctgcatgtgtactgggaagagttccagaaggaccctgtgggcctgatgagccgggtggcccagcctgccagcaagaagatcgatcagaacaagctgaaacctgagatggacgagaagggcaacctgaccaccgccggctttgcctgctctcagtgtggccagcccctgttcgtgtacaagctggagcaggtgtctgagaagggcaaggcttacaccaactacttcggacggtgcaatgtggccgagcacgaaaagctgatcctgctggcccagctgaagcccgagaaggatagcgacgaagccgtgacatatagcctgggaaagtttgggcagagggccctggatttctacagcattcatgtgaccaaggagtccacccaccccgtgaagcccctggcccagatcgccggaaacagatacgcctccggacctgtgggaaaggccctgagcgacgcatgtatgggcacaatcgcctccttcctgtctaagtaccaggacatcatcatcgaacaccagaaggtggtgaagggcaaccagaagagactggagagcctgcgggagctggccggcaaggaaaacctggaataccctagcgtgaccctgccacctcagcctcacaccaaggagggcgttgatgcctacaacgaagtgatcgcccgggtgcgaatgtgggtgaacctgaacctgtggcagaagctgaagctaagcagagatgatgccaagcctctgctgagactgaagggattcccttcctttcctctggtcgagagacaggccaacgaagtggactggtgggacatggtgtgtaacgtgaagaagctgatcaacgagaaaaaggaggatggcaaggtgttttggcagaatctggctggctacaagagacaggaagccctgagaccatacctgagcagcgaggaagatcggaagaagggaaagaaattcgctcggtaccagctgggcgacctgctgctgcacctggaaaagaagcacggcgaggactggggaaaggtgtacgacgaggcctgggagcggattgacaagaaagtggaaggcctgagcaagcacatcaagctggaagaggaacggagaagcgaggacgcccagagcaaggccgccctgaccgactggctgcgggctaaggccagcttcgtgatcgagggcctgaaggaggccgacaaggacgagttctgcagatgcgagctgaagctgcagaagtggtacggggacctgcggggaaagcccttcgccatcgaagccgagaacagcatcctggacatcagcggcttcagcaagcagtacaactgtgccttcatctggcagaaggacggcgtgaagaagctgaacctgtacctgatcatcaactacttcaagggcggcaagctgcggttcaagaagatcaaacctgaagccttcgaagccaacagattctacaccgtgatcaacaaaaagagcggcgagatcgtgcccatggaggtgaacttcaacttcgacgaccccaacctgatcatcctgcctctggcctttggcaagagacagggcagagaattcatctggaacgacctgctgtccctggaaaccggcagcctgaagctggccaacggaagagtgatcgagaagacactgtacaacagaagaacccggcaggatgagcctgccctgttcgtggccctgaccttcgagcggcgggaggtcctggactcctccaatatcaaaccaatgaacctgatcggcgtggcaagaggcgaaaacatccccgccgtgatcgccctgaccgaccccgagggctgcccactgagccggtttaaggatagcctgggaaacccaacccacatcctgagaatcggcgagagctataaggagaagcagcggaccatccaggccaagaaggaggtggagcagcggagagccggcggctacagccggaagtacgccagcaaagccaagaatctggcagacgatatggtgagaaacaccgctagagatctgctgtactacgccgtgacccaggatgccatgctgatcttcgccaacctgagccggggcttcggccggcagggcaagcggaccttcatggccgagagacagtacacacggatggaggactggctgaccgccaagctggcctacgagggcctgagcaagacctacctgtccaagacactggcccagtacacctccaagacatgcagcaactgtgggtttaccatcaccagcgccgactacgacagggtgctggagaagctgaagaagacagcaacaggctggatgaccacaattaacggcaaggagctgaaggtggagggccagattacctactacaacagatacaagagacagaacgtagtcaaggacctgtccgtcgagctggatagactgagcgaagaatctgtgaacaacgacatctcctcctggacaaagggcagaagcggagaagctctgagcctcctgaagaaaagattctcccatagacccgtgcaggagaagttcgtgtgcctgaactgcggcttcgagacacacgcagccgagcaagccgccctgaacatcgccagatcctggctgttcctgcggagccaggagtacaagaaataccagacaaacaagacaaccggcaacaccgataagagagccttcgtcgagacctggcagtccttttaccggaagaagcttaaggaggtgtggaaacctgccgtgcggtctggcggatctggcggaggctccaccagccccaagaaaaagagaaaagtctaagctgccttctgcggggcttgccttctggccatgcccttcttctctcccttgcacctgtacctcttggtctttgaataaagcctgagtaggaaggctagcaaaaaaaaaaaaaaaaaaaaaaaaaaaaaaaaaaaaaaaaaaaaaaaaaaaaaaaaaaaaaaaaaaaaaaaaaaaaaaaagcccagccggctccccaacctctaccgaggagggcacctctgagtccgccacccccgagagcggccctggcacctccaccgagcccagcgagggcagcgcacccggcagccctgccggcagccccacctccacagaggagggaaccagcaccgagcccagcgaaggcagcgccccaggcaccagcaccgagcctagtgagcaggagattaaacggatcaacaagatcagaagaagacttgtgaaagacagcaacaccaagaaggccggcaagacaggccccatgaaaaccctgctggttagagtgatgacacccgatctgagagagcggctggaaaacctgagaaagaagcctgaaaatatcccccagcccatcagcaatacatctagagccaacctgaataagctgctgaccgattacaccgaaatgaagaaggcgatcctgcatgtgtactgggaagagttccagaaggaccctgtgggcctgatgagccgggtggcccagcctgccagcaagaagatcgatcagaacaagctgaaacctgagatggacgagaagggcaacctgaccaccgccggctttgcctgctctcagtgtggccagcccctgttcgtgtacaagctggagcaggtgtctgagaagggcaaggcttacaccaactacttcggacggtgcaatgtggccgagcacgaaaagctgatcctgctggcccagctgaagcccgagaaggatagcgacgaagccgtgacatatagcctgggaaagtttgggcagagggccctggatttctacagcattcatgtgaccaaggagtccacccaccccgtgaagcccctggcccagatcgccggaaacagatacgcctccggacctgtgggaaaggccctgagcgacgcatgtatgggcacaatcgcctccttcctgtctaagtaccaggacatcatcatcgaacaccagaaggtggtgaagggcaaccagaagagactggagagcctgcgggagctggccggcaaggaaaacctggaataccctagcgtgaccctgccacctcagcctcacaccaaggagggcgttgatgcctacaacgaagtgatcgcccgggtgcgaatgtgggtgaacctgaacctgtggcagaagctgaagctaagcagagatgatgccaagcctctgctgagactgaagggattcccttcctttcctctggtcgagagacaggccaacgaagtggactggtgggacatggtgtgtaacgtgaagaagctgatcaacgagaaaaaggaggatggcaaggtgttttggcagaatctggctggctacaagagacaggaagccctgagaccatacctgagcagcgaggaagatcggaagaagggaaagaaattcgctcggtaccagctgggcgacctgctgctgcacctggaaaagaagcacggcgaggactggggaaaggtgtacgacgaggcctgggagcggattgacaagaaagtggaaggcctgagcaagcacatcaagctggaagaggaacggagaagcgaggacgcccagagcaaggccgccctgaccgactggctgcgggctaaggccagcttcgtgatcgagggcctgaaggaggccgacaaggacgagttctgcagatgcgagctgaagctgcagaagtggtacggggacctgcggggaaagcccttcgccatcgaagccgagaacagcatcctggacatcagcggcttcagcaagcagtacaactgtgccttcatctggcagaaggacggcgtgaagaagctgaacctgtacctgatcatcaactacttcaagggcggcaagctgcggttcaagaagatcaaacctgaagccttcgaagccaacagattctacaccgtgatcaacaaaaagagcggcgagatcgtgcccatggaggtgaacttcaacttcgacgaccccaacctgatcatcctgcctctggcctttggcaagagacagggcagagaattcatctggaacgacctgctgtccctggaaaccggcagcctgaagctggccaacggaagagtgatcgagaagacactgtacaacagaagaacccggcaggatgagcctgccctgttcgtggccctgaccttcgagcggcgggaggtcctggactcctccaatatcaaaccaatgaacctgatcggcgtggcaagaggcgaaaacatccccgccgtgatcgccctgaccgaccccgagggctgcccactgagccggtttaaggatagcctgggaaacccaacccacatcctgagaatcggcgagagctataaggagaagcagcggaccatccaggccaagaaggaggtggagcagcggagagccggcggctacagccggaagtacgccagcaaagccaagaatctggcagacgatatggtgagaaacaccgctagagatctgctgtactacgccgtgacccaggatgccatgctgatcttcgccaacctgagccggggcttcggccggcagggcaagcggaccttcatggccgagagacagtacacacggatggaggactggctgaccgccaagctggcctacgagggcctgagcaagacctacctgtccaagacactggcccagtacacctccaagacatgcagcaactgtgggtttaccatcaccagcgccgactacgacagggtgctggagaagctgaagaagacagcaacaggctggatgaccacaattaacggcaaggagctgaaggtggagggccagattacctactacaacagatacaagagacagaacgtagtcaaggacctgtccgtcgagctggatagactgagcgaagaatctgtgaacaacgacatctcctcctggacaaagggcagaagcggagaagctctgagcctcctgaagaaaagattctcccatagacccgtgcaggagaagttcgtgtgcctgaactgcggcttcgagacacacgcagccgagcaagccgccctgaacatcgccagatcctggctgttcctgcggagccaggagtacaagaaataccagacaaacaagacaaccggcaacaccgataagagagccttcgtcgagacctggcagtccttttaccggaagaagcttaaggaggtgtggaaacctgccgtgcggtctggcggatctggcggaggctccaccagccccaagaaaaagagaaaagtctaagctgccttctgcggggcttgccttctggccatgcccttcttctctcccttgcacctgtacctcttggtctttgaataaagcctgagtaggaaggctagcaaaaaaaaaaaaaaaaaaaaaaaaaaaaaaaaaaaaaaaaaaaaaaaaaaaaaaaaaaaaaaaaaaaaaaaaaaaaaaaa

SEQ ID NO: 8971 - RNA, 8787 nt, synthetic construct
  source 1..8787: mol_type = other RNA
aggaaataagagagaaaagaagagtaagaagaaatataagagccaccatggcccctaagaagaagcgtaaagtgagccggatgaaccacgaccaggagttcgacccccctaaggtgtaccctcccgtccccgccgagaagagaaagcccatccgggtcctgagcctgttcgatggcatcgccaccggtctgctggtgctgaaggacctgggcatccaggtggataggtacattgcctccgaggtgtgcgaggactccatcaccgtgggaatggtgcgtcatcagggcaagatcatgtacgtgggcgacgtgcggagcgtgacacagaagcatatccaggagtggggccctttcgacctggtgatcggcggcagcccttgcaatgacctgagcatcgtgaacccagcccggaagggcctgtacgagggaaccggcagactgttcttcgagttttacagactgctgcacgacgcccggcctaaggaaggcgacgaccggcccttcttttggctgttcgagaatgtggtggccatgggagtcagcgacaagcgggatattagccggttcctggagagcaaccccgtgatgatcgatgccaaggaagtgagcgccgcccaccgggccagatacttctggggcaatctgcctggcatgaacagacccctggccagcaccgtgaacgacaagctggagctgcaggagtgcctggagcacggccggatcgccaagttcagcaaggtgagaaccatcaccacccgaagcaacagcatcaaacaaggcaaggaccagcactttcctgtgttcatgaacgagaaggaggacatcctgtggtgtaccgagatggagagagtgttcgggttcccagtccactacacagatgtcagcaacatgtctagactggccagacagagactgctgggaagaagctggtccgtccctgtgatcagacacctgttcgcccctctgaaggagtacttcgcctgcgtgagcagcggcaacagcaacgccaacagccggggccccagcttctctagcggcctggtgccactgtccctgagagggagccacatgggccccatggagatctacaaaaccgtgagcgcctggaagcggcagcctgtgcgcgtgctgagcctgtttcggaatatcgataaagtcctgaaaagcctgggattcctggagagcggctctggctccggcggtggcaccctgaagtacgtggaggatgtgacaaacgtggtcagacgggatgtggagaagtggggccccttcgatctggtgtacggcagcacccaacccctgggcagctcttgtgaccggtgccctggctggtacatgtttcagttccaccggatcctgcagtacgccctgccgagacaggagtcccagcggccattcttttggattttcatggacaacttgctgctgaccgaggatgaccaggaaactaccactcggttcctgcagaccgaagccgtgaccctgcaggacgtgagaggccgggactaccagaacgccatgcgggtgtggtccaacatccctggactgaaaagcaagcacgcacctctgacccctaaagaagaggagtacctgcaggcccaggtgcggagcagaagcaagctggacgcccctaaggtggatctgctggtgaagaattgcctcctgcccctgagagagtacttcaagtatttcagccagaatagtctgcccctgggaggcagcggcggcggccaggaccccagcgccgagggcctgagcgaggaggtgcccgtggtgttcgaggagctgcccgtggtgttcgaggacgtggccgtgtacttcaccagggaggagtggggcatgctggacaagaggcagaaggagctgtacagggacgtgatgaggatgaactacgagctgctggccagcctgggccccgccgccgccaagcccgacctgatcagcaagctggagaggagggccgccccctggatcggcggcccaagcagcggcgcccctcctcccagcggcggcaggcggcccaagcagcggcgcccctcctcccagcggcggcagcccagccggctccccaacctctaccgaggagggcacctctgagtccgccacccccgagagcggccctggcacctccaccgagcccagcgagggcagcgcacccggcagccctgccggcagccccacctccacagaggagggaaccagcaccgagcccagcgaaggcagcgccccaggcaccagcaccgagcctagtgagcaggagattaaacggatcaacaagatcagaagaagacttgtgaaagacagcaacaccaagaaggccggcaagacaggccccatgaaaaccctgctggttagagtgatgacacccgatctgagagagcggctggaaaacctgagaaagaagcctgaaaatatcccccagcccatcagcaatacatctagagccaacctgaataagctgctgaccgattacaccgaaatgaagaaggcgatcctgcatgtgtactgggaagagttccagaaggaccctgtgggcctgatgagccgggtggcccagcctgccagcaagaagatcgatcagaacaagctgaaacctgagatggacgagaagggcaacctgaccaccgccggctttgcctgctctcagtgtggccagcccctgttcgtgtacaagctggagcaggtgtctgagaagggcaaggcttacaccaactacttcggacggtgcaatgtggccgagcacgaaaagctgatcctgctggcccagctgaagcccgagaaggatagcgacgaagccgtgacatatagcctgggaaagtttgggcagagggccctggatttctacagcattcatgtgaccaaggagtccacccaccccgtgaagcccctggcccagatcgccggaaacagatacgcctccggacctgtgggaaaggccctgagcgacgcatgtatgggcacaatcgcctccttcctgtctaagtaccaggacatcatcatcgaacaccagaaggtggtgaagggcaaccagaagagactggagagcctgcgggagctggccggcaaggaaaacctggaataccctagcgtgaccctgccacctcagcctcacaccaaggagggcgttgatgcctacaacgaagtgatcgcccgggtgcgaatgtgggtgaacctgaacctgtggcagaagctgaagctaagcagagatgatgccaagcctctgctgagactgaagggattcccttcctttcctctggtcgagagacaggccaacgaagtggactggtgggacatggtgtgtaacgtgaagaagctgatcaacgagaaaaaggaggatggcaaggtgttttggcagaatctggctggctacaagagacaggaagccctgagaccatacctgagcagcgaggaagatcggaagaagggaaagaaattcgctcggtaccagctgggcgacctgctgctgcacctggaaaagaagcacggcgaggactggggaaaggtgtacgacgaggcctgggagcggattgacaagaaagtggaaggcctgagcaagcacatcaagctggaagaggaacggagaagcgaggacgcccagagcaaggccgccctgaccgactggctgcgggctaaggccagcttcgtgatcgagggcctgaaggaggccgacaaggacgagttctgcagatgcgagctgaagctgcagaagtggtacggggacctgcggggaaagcccttcgccatcgaagccgagaacagcatcctggacatcagcggcttcagcaagcagtacaactgtgccttcatctggcagaaggacggcgtgaagaagctgaacctgtacctgatcatcaactacttcaagggcggcaagctgcggttcaagaagatcaaacctgaagccttcgaagccaacagattctacaccgtgatcaacaaaaagagcggcgagatcgtgcccatggaggtgaacttcaacttcgacgaccccaacctgatcatcctgcctctggcctttggcaagagacagggcagagaattcatctggaacgacctgctgtccctggaaaccggcagcctgaagctggccaacggaagagtgatcgagaagacactgtacaacagaagaacccggcaggatgagcctgccctgttcgtggccctgaccttcgagcggcgggaggtcctggactcctccaatatcaaaccaatgaacctgatcggcgtggcaagaggcgaaaacatccccgccgtgatcgccctgaccgaccccgagggctgcccactgagccggtttaaggatagcctgggaaacccaacccacatcctgagaatcggcgagagctataaggagaagcagcggaccatccaggccaagaaggaggtggagcagcggagagccggcggctacagccggaagtacgccagcaaagccaagaatctggcagacgatatggtgagaaacaccgctagagatctgctgtactacgccgtgacccaggatgccatgctgatcttcgccaacctgagccggggcttcggccggcagggcaagcggaccttcatggccgagagacagtacacacggatggaggactggctgaccgccaagctggcctacgagggcctgagcaagacctacctgtccaagacactggcccagtacacctccaagacatgcagcaactgtgggtttaccatcaccagcgccgactacgacagggtgctggagaagctgaagaagacagcaacaggctggatgaccacaattaacggcaaggagctgaaggtggagggccagattacctactacaacagatacaagagacagaacgtagtcaaggacctgtccgtcgagctggatagactgagcgaagaatctgtgaacaacgacatctcctcctggacaaagggcagaagcggagaagctctgagcctcctgaagaaaagattctcccatagacccgtgcaggagaagttcgtgtgcctgaactgcggcttcgagacacacgcagccgagcaagccgccctgaacatcgccagatcctggctgttcctgcggagccaggagtacaagaaataccagacaaacaagacaaccggcaacaccgataagagagccttcgtcgagacctggcagtccttttaccggaagaagcttaaggaggtgtggaaacctgccgtgcggtctggcggatctggcggaggctccaccagccccaagaaaaagagaaaagtctaagctgccttctgcggggcttgccttctggccatgcccttcttctctcccttgcacctgtacctcttggtctttgaataaagcctgagtaggaaggctagcaaaaaaaaaaaaaaaaaaaaaaaaaaaaaaaaaaaaaaaaaaaaaaaaaaaaaaaaaaaaaaaaaaaaaaaaaaaaaaaagcccagccggctccccaacctctaccgaggagggcacctctgagtccgccacccccgagagcggccctggcacctccaccgagcccagcgagggcagcgcacccggcagccctgccggcagccccacctccacagaggagggaaccagcaccgagcccagcgaaggcagcgccccaggcaccagcaccgagcctagtgagcaggagattaaacggatcaacaagatcagaagaagacttgtgaaagacagcaacaccaagaaggccggcaagacaggccccatgaaaaccctgctggttagagtgatgacacccgatctgagagagcggctggaaaacctgagaaagaagcctgaaaatatcccccagcccatcagcaatacatctagagccaacctgaataagctgctgaccgattacaccgaaatgaagaaggcgatcctgcatgtgtactgggaagagttccagaaggaccctgtgggcctgatgagccgggtggcccagcctgccagcaagaagatcgatcagaacaagctgaaacctgagatggacgagaagggcaacctgaccaccgccggctttgcctgctctcagtgtggccagcccctgttcgtgtacaagctggagcaggtgtctgagaagggcaaggcttacaccaactacttcggacggtgcaatgtggccgagcacgaaaagctgatcctgctggcccagctgaagcccgagaaggatagcgacgaagccgtgacatatagcctgggaaagtttgggcagagggccctggatttctacagcattcatgtgaccaaggagtccacccaccccgtgaagcccctggcccagatcgccggaaacagatacgcctccggacctgtgggaaaggccctgagcgacgcatgtatgggcacaatcgcctccttcctgtctaagtaccaggacatcatcatcgaacaccagaaggtggtgaagggcaaccagaagagactggagagcctgcgggagctggccggcaaggaaaacctggaataccctagcgtgaccctgccacctcagcctcacaccaaggagggcgttgatgcctacaacgaagtgatcgcccgggtgcgaatgtgggtgaacctgaacctgtggcagaagctgaagctaagcagagatgatgccaagcctctgctgagactgaagggattcccttcctttcctctggtcgagagacaggccaacgaagtggactggtgggacatggtgtgtaacgtgaagaagctgatcaacgagaaaaaggaggatggcaaggtgttttggcagaatctggctggctacaagagacaggaagccctgagaccatacctgagcagcgaggaagatcggaagaagggaaagaaattcgctcggtaccagctgggcgacctgctgctgcacctggaaaagaagcacggcgaggactggggaaaggtgtacgacgaggcctgggagcggattgacaagaaagtggaaggcctgagcaagcacatcaagctggaagaggaacggagaagcgaggacgcccagagcaaggccgccctgaccgactggctgcgggctaaggccagcttcgtgatcgagggcctgaaggaggccgacaaggacgagttctgcagatgcgagctgaagctgcagaagtggtacggggacctgcggggaaagcccttcgccatcgaagccgagaacagcatcctggacatcagcggcttcagcaagcagtacaactgtgccttcatctggcagaaggacggcgtgaagaagctgaacctgtacctgatcatcaactacttcaagggcggcaagctgcggttcaagaagatcaaacctgaagccttcgaagccaacagattctacaccgtgatcaacaaaaagagcggcgagatcgtgcccatggaggtgaacttcaacttcgacgaccccaacctgatcatcctgcctctggcctttggcaagagacagggcagagaattcatctggaacgacctgctgtccctggaaaccggcagcctgaagctggccaacggaagagtgatcgagaagacactgtacaacagaagaacccggcaggatgagcctgccctgttcgtggccctgaccttcgagcggcgggaggtcctggactcctccaatatcaaaccaatgaacctgatcggcgtggcaagaggcgaaaacatccccgccgtgatcgccctgaccgaccccgagggctgcccactgagccggtttaaggatagcctgggaaacccaacccacatcctgagaatcggcgagagctataaggagaagcagcggaccatccaggccaagaaggaggtggagcagcggagagccggcggctacagccggaagtacgccagcaaagccaagaatctggcagacgatatggtgagaaacaccgctagagatctgctgtactacgccgtgacccaggatgccatgctgatcttcgccaacctgagccggggcttcggccggcagggcaagcggaccttcatggccgagagacagtacacacggatggaggactggctgaccgccaagctggcctacgagggcctgagcaagacctacctgtccaagacactggcccagtacacctccaagacatgcagcaactgtgggtttaccatcaccagcgccgactacgacagggtgctggagaagctgaagaagacagcaacaggctggatgaccacaattaacggcaaggagctgaaggtggagggccagattacctactacaacagatacaagagacagaacgtagtcaaggacctgtccgtcgagctggatagactgagcgaagaatctgtgaacaacgacatctcctcctggacaaagggcagaagcggagaagctctgagcctcctgaagaaaagattctcccatagacccgtgcaggagaagttcgtgtgcctgaactgcggcttcgagacacacgcagccgagcaagccgccctgaacatcgccagatcctggctgttcctgcggagccaggagtacaagaaataccagacaaacaagacaaccggcaacaccgataagagagccttcgtcgagacctggcagtccttttaccggaagaagcttaaggaggtgtggaaacctgccgtgcggtctggcggatctggcggaggctccaccagccccaagaaaaagagaaaagtctaagctgccttctgcggggcttgccttctggccatgcccttcttctctcccttgcacctgtacctcttggtctttgaataaagcctgagtaggaaggctagcaaaaaaaaaaaaaaaaaaaaaaaaaaaaaaaaaaaaaaaaaaaaaaaaaaaaaaaaaaaaaaaaaaaaaaaaaaaaaaaa

SEQ ID NO: 8972 - RNA, 8787 nt, synthetic construct
  source 1..8787: mol_type = other RNA
aggaaataagagagaaaagaagagtaagaagaaatataagagccaccatggcccctaagaagaagcgtaaagtgagccggatgaaccacgaccaggagttcgacccccctaaggtgtaccctcccgtccccgccgagaagagaaagcccatccgggtcctgagcctgttcgatggcatcgccaccggtctgctggtgctgaaggacctgggcatccaggtggataggtacattgcctccgaggtgtgcgaggactccatcaccgtgggaatggtgcgtcatcagggcaagatcatgtacgtgggcgacgtgcggagcgtgacacagaagcatatccaggagtggggccctttcgacctggtgatcggcggcagcccttgcaatgacctgagcatcgtgaacccagcccggaagggcctgtacgagggaaccggcagactgttcttcgagttttacagactgctgcacgacgcccggcctaaggaaggcgacgaccggcccttcttttggctgttcgagaatgtggtggccatgggagtcagcgacaagcgggatattagccggttcctggagagcaaccccgtgatgatcgatgccaaggaagtgagcgccgcccaccgggccagatacttctggggcaatctgcctggcatgaacagacccctggccagcaccgtgaacgacaagctggagctgcaggagtgcctggagcacggccggatcgccaagttcagcaaggtgagaaccatcaccacccgaagcaacagcatcaaacaaggcaaggaccagcactttcctgtgttcatgaacgagaaggaggacatcctgtggtgtaccgagatggagagagtgttcgggttcccagtccactacacagatgtcagcaacatgtctagactggccagacagagactgctgggaagaagctggtccgtccctgtgatcagacacctgttcgcccctctgaaggagtacttcgcctgcgtgagcagcggcaacagcaacgccaacagccggggccccagcttctctagcggcctggtgccactgtccctgagagggagccacatgggccccatggagatctacaaaaccgtgagcgcctggaagcggcagcctgtgcgcgtgctgagcctgtttcggaatatcgataaagtcctgaaaagcctgggattcctggagagcggctctggctccggcggtggcaccctgaagtacgtggaggatgtgacaaacgtggtcagacgggatgtggagaagtggggccccttcgatctggtgtacggcagcacccaacccctgggcagctcttgtgaccggtgccctggctggtacatgtttcagttccaccggatcctgcagtacgccctgccgagacaggagtcccagcggccattcttttggattttcatggacaacttgctgctgaccgaggatgaccaggaaactaccactcggttcctgcagaccgaagccgtgaccctgcaggacgtgagaggccgggactaccagaacgccatgcgggtgtggtccaacatccctggactgaaaagcaagcacgcacctctgacccctaaagaagaggagtacctgcaggcccaggtgcggagcagaagcaagctggacgcccctaaggtggatctgctggtgaagaattgcctcctgcccctgagagagtacttcaagtatttcagccagaatagtctgcccctgggaggcagcggcggcggcatccagaacaccgtgacctacgacgacgtgcacatcgacttcacctgggaggagtggaccctgctggaccccagccagaggaacctgtacaaggacgtgatggtggagacctacaccaacctgaccgccgtgggctacagctgggaggaccacaacatggaggagcactgccagagcagccagaggcagaggaggtacaagaggagcaacaccggcgagaagccctgcgagtacacccagtgcggcggcccaagcagcggcgcccctcctcccagcggcggcaggcggcccaagcagcggcgcccctcctcccagcggcggcagcccagccggctccccaacctctaccgaggagggcacctctgagtccgccacccccgagagcggccctggcacctccaccgagcccagcgagggcagcgcacccggcagccctgccggcagccccacctccacagaggagggaaccagcaccgagcccagcgaaggcagcgccccaggcaccagcaccgagcctagtgagcaggagattaaacggatcaacaagatcagaagaagacttgtgaaagacagcaacaccaagaaggccggcaagacaggccccatgaaaaccctgctggttagagtgatgacacccgatctgagagagcggctggaaaacctgagaaagaagcctgaaaatatcccccagcccatcagcaatacatctagagccaacctgaataagctgctgaccgattacaccgaaatgaagaaggcgatcctgcatgtgtactgggaagagttccagaaggaccctgtgggcctgatgagccgggtggcccagcctgccagcaagaagatcgatcagaacaagctgaaacctgagatggacgagaagggcaacctgaccaccgccggctttgcctgctctcagtgtggccagcccctgttcgtgtacaagctggagcaggtgtctgagaagggcaaggcttacaccaactacttcggacggtgcaatgtggccgagcacgaaaagctgatcctgctggcccagctgaagcccgagaaggatagcgacgaagccgtgacatatagcctgggaaagtttgggcagagggccctggatttctacagcattcatgtgaccaaggagtccacccaccccgtgaagcccctggcccagatcgccggaaacagatacgcctccggacctgtgggaaaggccctgagcgacgcatgtatgggcacaatcgcctccttcctgtctaagtaccaggacatcatcatcgaacaccagaaggtggtgaagggcaaccagaagagactggagagcctgcgggagctggccggcaaggaaaacctggaataccctagcgtgaccctgccacctcagcctcacaccaaggagggcgttgatgcctacaacgaagtgatcgcccgggtgcgaatgtgggtgaacctgaacctgtggcagaagctgaagctaagcagagatgatgccaagcctctgctgagactgaagggattcccttcctttcctctggtcgagagacaggccaacgaagtggactggtgggacatggtgtgtaacgtgaagaagctgatcaacgagaaaaaggaggatggcaaggtgttttggcagaatctggctggctacaagagacaggaagccctgagaccatacctgagcagcgaggaagatcggaagaagggaaagaaattcgctcggtaccagctgggcgacctgctgctgcacctggaaaagaagcacggcgaggactggggaaaggtgtacgacgaggcctgggagcggattgacaagaaagtggaaggcctgagcaagcacatcaagctggaagaggaacggagaagcgaggacgcccagagcaaggccgccctgaccgactggctgcgggctaaggccagcttcgtgatcgagggcctgaaggaggccgacaaggacgagttctgcagatgcgagctgaagctgcagaagtggtacggggacctgcggggaaagcccttcgccatcgaagccgagaacagcatcctggacatcagcggcttcagcaagcagtacaactgtgccttcatctggcagaaggacggcgtgaagaagctgaacctgtacctgatcatcaactacttcaagggcggcaagctgcggttcaagaagatcaaacctgaagccttcgaagccaacagattctacaccgtgatcaacaaaaagagcggcgagatcgtgcccatggaggtgaacttcaacttcgacgaccccaacctgatcatcctgcctctggcctttggcaagagacagggcagagaattcatctggaacgacctgctgtccctggaaaccggcagcctgaagctggccaacggaagagtgatcgagaagacactgtacaacagaagaacccggcaggatgagcctgccctgttcgtggccctgaccttcgagcggcgggaggtcctggactcctccaatatcaaaccaatgaacctgatcggcgtggcaagaggcgaaaacatccccgccgtgatcgccctgaccgaccccgagggctgcccactgagccggtttaaggatagcctgggaaacccaacccacatcctgagaatcggcgagagctataaggagaagcagcggaccatccaggccaagaaggaggtggagcagcggagagccggcggctacagccggaagtacgccagcaaagccaagaatctggcagacgatatggtgagaaacaccgctagagatctgctgtactacgccgtgacccaggatgccatgctgatcttcgccaacctgagccggggcttcggccggcagggcaagcggaccttcatggccgagagacagtacacacggatggaggactggctgaccgccaagctggcctacgagggcctgagcaagacctacctgtccaagacactggcccagtacacctccaagacatgcagcaactgtgggtttaccatcaccagcgccgactacgacagggtgctggagaagctgaagaagacagcaacaggctggatgaccacaattaacggcaaggagctgaaggtggagggccagattacctactacaacagatacaagagacagaacgtagtcaaggacctgtccgtcgagctggatagactgagcgaagaatctgtgaacaacgacatctcctcctggacaaagggcagaagcggagaagctctgagcctcctgaagaaaagattctcccatagacccgtgcaggagaagttcgtgtgcctgaactgcggcttcgagacacacgcagccgagcaagccgccctgaacatcgccagatcctggctgttcctgcggagccaggagtacaagaaataccagacaaacaagacaaccggcaacaccgataagagagccttcgtcgagacctggcagtccttttaccggaagaagcttaaggaggtgtggaaacctgccgtgcggtctggcggatctggcggaggctccaccagccccaagaaaaagagaaaagtctaagctgccttctgcggggcttgccttctggccatgcccttcttctctcccttgcacctgtacctcttggtctttgaataaagcctgagtaggaaggctagcaaaaaaaaaaaaaaaaaaaaaaaaaaaaaaaaaaaaaaaaaaaaaaaaaaaaaaaaaaaaaaaaaaaaaaaaaaaaaaaagcccagccggctccccaacctctaccgaggagggcacctctgagtccgccacccccgagagcggccctggcacctccaccgagcccagcgagggcagcgcacccggcagccctgccggcagccccacctccacagaggagggaaccagcaccgagcccagcgaaggcagcgccccaggcaccagcaccgagcctagtgagcaggagattaaacggatcaacaagatcagaagaagacttgtgaaagacagcaacaccaagaaggccggcaagacaggccccatgaaaaccctgctggttagagtgatgacacccgatctgagagagcggctggaaaacctgagaaagaagcctgaaaatatcccccagcccatcagcaatacatctagagccaacctgaataagctgctgaccgattacaccgaaatgaagaaggcgatcctgcatgtgtactgggaagagttccagaaggaccctgtgggcctgatgagccgggtggcccagcctgccagcaagaagatcgatcagaacaagctgaaacctgagatggacgagaagggcaacctgaccaccgccggctttgcctgctctcagtgtggccagcccctgttcgtgtacaagctggagcaggtgtctgagaagggcaaggcttacaccaactacttcggacggtgcaatgtggccgagcacgaaaagctgatcctgctggcccagctgaagcccgagaaggatagcgacgaagccgtgacatatagcctgggaaagtttgggcagagggccctggatttctacagcattcatgtgaccaaggagtccacccaccccgtgaagcccctggcccagatcgccggaaacagatacgcctccggacctgtgggaaaggccctgagcgacgcatgtatgggcacaatcgcctccttcctgtctaagtaccaggacatcatcatcgaacaccagaaggtggtgaagggcaaccagaagagactggagagcctgcgggagctggccggcaaggaaaacctggaataccctagcgtgaccctgccacctcagcctcacaccaaggagggcgttgatgcctacaacgaagtgatcgcccgggtgcgaatgtgggtgaacctgaacctgtggcagaagctgaagctaagcagagatgatgccaagcctctgctgagactgaagggattcccttcctttcctctggtcgagagacaggccaacgaagtggactggtgggacatggtgtgtaacgtgaagaagctgatcaacgagaaaaaggaggatggcaaggtgttttggcagaatctggctggctacaagagacaggaagccctgagaccatacctgagcagcgaggaagatcggaagaagggaaagaaattcgctcggtaccagctgggcgacctgctgctgcacctggaaaagaagcacggcgaggactggggaaaggtgtacgacgaggcctgggagcggattgacaagaaagtggaaggcctgagcaagcacatcaagctggaagaggaacggagaagcgaggacgcccagagcaaggccgccctgaccgactggctgcgggctaaggccagcttcgtgatcgagggcctgaaggaggccgacaaggacgagttctgcagatgcgagctgaagctgcagaagtggtacggggacctgcggggaaagcccttcgccatcgaagccgagaacagcatcctggacatcagcggcttcagcaagcagtacaactgtgccttcatctggcagaaggacggcgtgaagaagctgaacctgtacctgatcatcaactacttcaagggcggcaagctgcggttcaagaagatcaaacctgaagccttcgaagccaacagattctacaccgtgatcaacaaaaagagcggcgagatcgtgcccatggaggtgaacttcaacttcgacgaccccaacctgatcatcctgcctctggcctttggcaagagacagggcagagaattcatctggaacgacctgctgtccctggaaaccggcagcctgaagctggccaacggaagagtgatcgagaagacactgtacaacagaagaacccggcaggatgagcctgccctgttcgtggccctgaccttcgagcggcgggaggtcctggactcctccaatatcaaaccaatgaacctgatcggcgtggcaagaggcgaaaacatccccgccgtgatcgccctgaccgaccccgagggctgcccactgagccggtttaaggatagcctgggaaacccaacccacatcctgagaatcggcgagagctataaggagaagcagcggaccatccaggccaagaaggaggtggagcagcggagagccggcggctacagccggaagtacgccagcaaagccaagaatctggcagacgatatggtgagaaacaccgctagagatctgctgtactacgccgtgacccaggatgccatgctgatcttcgccaacctgagccggggcttcggccggcagggcaagcggaccttcatggccgagagacagtacacacggatggaggactggctgaccgccaagctggcctacgagggcctgagcaagacctacctgtccaagacactggcccagtacacctccaagacatgcagcaactgtgggtttaccatcaccagcgccgactacgacagggtgctggagaagctgaagaagacagcaacaggctggatgaccacaattaacggcaaggagctgaaggtggagggccagattacctactacaacagatacaagagacagaacgtagtcaaggacctgtccgtcgagctggatagactgagcgaagaatctgtgaacaacgacatctcctcctggacaaagggcagaagcggagaagctctgagcctcctgaagaaaagattctcccatagacccgtgcaggagaagttcgtgtgcctgaactgcggcttcgagacacacgcagccgagcaagccgccctgaacatcgccagatcctggctgttcctgcggagccaggagtacaagaaataccagacaaacaagacaaccggcaacaccgataagagagccttcgtcgagacctggcagtccttttaccggaagaagcttaaggaggtgtggaaacctgccgtgcggtctggcggatctggcggaggctccaccagccccaagaaaaagagaaaagtctaagctgccttctgcggggcttgccttctggccatgcccttcttctctcccttgcacctgtacctcttggtctttgaataaagcctgagtaggaaggctagcaaaaaaaaaaaaaaaaaaaaaaaaaaaaaaaaaaaaaaaaaaaaaaaaaaaaaaaaaaaaaaaaaaaaaaaaaaaaaaaa

SEQ ID NO: 8973 - RNA, 8787 nt, synthetic construct
  source 1..8787: mol_type = other RNA
aggaaataagagagaaaagaagagtaagaagaaatataagagccaccatggcccctaagaagaagcgtaaagtgagccggatgaaccacgaccaggagttcgacccccctaaggtgtaccctcccgtccccgccgagaagagaaagcccatccgggtcctgagcctgttcgatggcatcgccaccggtctgctggtgctgaaggacctgggcatccaggtggataggtacattgcctccgaggtgtgcgaggactccatcaccgtgggaatggtgcgtcatcagggcaagatcatgtacgtgggcgacgtgcggagcgtgacacagaagcatatccaggagtggggccctttcgacctggtgatcggcggcagcccttgcaatgacctgagcatcgtgaacccagcccggaagggcctgtacgagggaaccggcagactgttcttcgagttttacagactgctgcacgacgcccggcctaaggaaggcgacgaccggcccttcttttggctgttcgagaatgtggtggccatgggagtcagcgacaagcgggatattagccggttcctggagagcaaccccgtgatgatcgatgccaaggaagtgagcgccgcccaccgggccagatacttctggggcaatctgcctggcatgaacagacccctggccagcaccgtgaacgacaagctggagctgcaggagtgcctggagcacggccggatcgccaagttcagcaaggtgagaaccatcaccacccgaagcaacagcatcaaacaaggcaaggaccagcactttcctgtgttcatgaacgagaaggaggacatcctgtggtgtaccgagatggagagagtgttcgggttcccagtccactacacagatgtcagcaacatgtctagactggccagacagagactgctgggaagaagctggtccgtccctgtgatcagacacctgttcgcccctctgaaggagtacttcgcctgcgtgagcagcggcaacagcaacgccaacagccggggccccagcttctctagcggcctggtgccactgtccctgagagggagccacatgggccccatggagatctacaaaaccgtgagcgcctggaagcggcagcctgtgcgcgtgctgagcctgtttcggaatatcgataaagtcctgaaaagcctgggattcctggagagcggctctggctccggcggtggcaccctgaagtacgtggaggatgtgacaaacgtggtcagacgggatgtggagaagtggggccccttcgatctggtgtacggcagcacccaacccctgggcagctcttgtgaccggtgccctggctggtacatgtttcagttccaccggatcctgcagtacgccctgccgagacaggagtcccagcggccattcttttggattttcatggacaacttgctgctgaccgaggatgaccaggaaactaccactcggttcctgcagaccgaagccgtgaccctgcaggacgtgagaggccgggactaccagaacgccatgcgggtgtggtccaacatccctggactgaaaagcaagcacgcacctctgacccctaaagaagaggagtacctgcaggcccaggtgcggagcagaagcaagctggacgcccctaaggtggatctgctggtgaagaattgcctcctgcccctgagagagtacttcaagtatttcagccagaatagtctgcccctgggaggcagcggcggcggccaggaccccagcgccgagggcctgagcgaggaggtgcccgtggtgttcgaggagctgcccgtggtgttcgaggacgtggccgtgtacttcaccagggaggagtggggcatgctggacaagtggcagaaggagctgtacagggacgtgatgaggatgaactacgagctgctggccagcctgggccccgccgccgccaagcccgacctgatcagcaagctggagaggagggccgccccctggatcggcggcccaagcagcggcgcccctcctcccagcggcggcaggcggcccaagcagcggcgcccctcctcccagcggcggcagcccagccggctccccaacctctaccgaggagggcacctctgagtccgccacccccgagagcggccctggcacctccaccgagcccagcgagggcagcgcacccggcagccctgccggcagccccacctccacagaggagggaaccagcaccgagcccagcgaaggcagcgccccaggcaccagcaccgagcctagtgagcaggagattaaacggatcaacaagatcagaagaagacttgtgaaagacagcaacaccaagaaggccggcaagacaggccccatgaaaaccctgctggttagagtgatgacacccgatctgagagagcggctggaaaacctgagaaagaagcctgaaaatatcccccagcccatcagcaatacatctagagccaacctgaataagctgctgaccgattacaccgaaatgaagaaggcgatcctgcatgtgtactgggaagagttccagaaggaccctgtgggcctgatgagccgggtggcccagcctgccagcaagaagatcgatcagaacaagctgaaacctgagatggacgagaagggcaacctgaccaccgccggctttgcctgctctcagtgtggccagcccctgttcgtgtacaagctggagcaggtgtctgagaagggcaaggcttacaccaactacttcggacggtgcaatgtggccgagcacgaaaagctgatcctgctggcccagctgaagcccgagaaggatagcgacgaagccgtgacatatagcctgggaaagtttgggcagagggccctggatttctacagcattcatgtgaccaaggagtccacccaccccgtgaagcccctggcccagatcgccggaaacagatacgcctccggacctgtgggaaaggccctgagcgacgcatgtatgggcacaatcgcctccttcctgtctaagtaccaggacatcatcatcgaacaccagaaggtggtgaagggcaaccagaagagactggagagcctgcgggagctggccggcaaggaaaacctggaataccctagcgtgaccctgccacctcagcctcacaccaaggagggcgttgatgcctacaacgaagtgatcgcccgggtgcgaatgtgggtgaacctgaacctgtggcagaagctgaagctaagcagagatgatgccaagcctctgctgagactgaagggattcccttcctttcctctggtcgagagacaggccaacgaagtggactggtgggacatggtgtgtaacgtgaagaagctgatcaacgagaaaaaggaggatggcaaggtgttttggcagaatctggctggctacaagagacaggaagccctgagaccatacctgagcagcgaggaagatcggaagaagggaaagaaattcgctcggtaccagctgggcgacctgctgctgcacctggaaaagaagcacggcgaggactggggaaaggtgtacgacgaggcctgggagcggattgacaagaaagtggaaggcctgagcaagcacatcaagctggaagaggaacggagaagcgaggacgcccagagcaaggccgccctgaccgactggctgcgggctaaggccagcttcgtgatcgagggcctgaaggaggccgacaaggacgagttctgcagatgcgagctgaagctgcagaagtggtacggggacctgcggggaaagcccttcgccatcgaagccgagaacagcatcctggacatcagcggcttcagcaagcagtacaactgtgccttcatctggcagaaggacggcgtgaagaagctgaacctgtacctgatcatcaactacttcaagggcggcaagctgcggttcaagaagatcaaacctgaagccttcgaagccaacagattctacaccgtgatcaacaaaaagagcggcgagatcgtgcccatggaggtgaacttcaacttcgacgaccccaacctgatcatcctgcctctggcctttggcaagagacagggcagagaattcatctggaacgacctgctgtccctggaaaccggcagcctgaagctggccaacggaagagtgatcgagaagacactgtacaacagaagaacccggcaggatgagcctgccctgttcgtggccctgaccttcgagcggcgggaggtcctggactcctccaatatcaaaccaatgaacctgatcggcgtggcaagaggcgaaaacatccccgccgtgatcgccctgaccgaccccgagggctgcccactgagccggtttaaggatagcctgggaaacccaacccacatcctgagaatcggcgagagctataaggagaagcagcggaccatccaggccaagaaggaggtggagcagcggagagccggcggctacagccggaagtacgccagcaaagccaagaatctggcagacgatatggtgagaaacaccgctagagatctgctgtactacgccgtgacccaggatgccatgctgatcttcgccaacctgagccggggcttcggccggcagggcaagcggaccttcatggccgagagacagtacacacggatggaggactggctgaccgccaagctggcctacgagggcctgagcaagacctacctgtccaagacactggcccagtacacctccaagacatgcagcaactgtgggtttaccatcaccagcgccgactacgacagggtgctggagaagctgaagaagacagcaacaggctggatgaccacaattaacggcaaggagctgaaggtggagggccagattacctactacaacagatacaagagacagaacgtagtcaaggacctgtccgtcgagctggatagactgagcgaagaatctgtgaacaacgacatctcctcctggacaaagggcagaagcggagaagctctgagcctcctgaagaaaagattctcccatagacccgtgcaggagaagttcgtgtgcctgaactgcggcttcgagacacacgcagccgagcaagccgccctgaacatcgccagatcctggctgttcctgcggagccaggagtacaagaaataccagacaaacaagacaaccggcaacaccgataagagagccttcgtcgagacctggcagtccttttaccggaagaagcttaaggaggtgtggaaacctgccgtgcggtctggcggatctggcggaggctccaccagccccaagaaaaagagaaaagtctaagctgccttctgcggggcttgccttctggccatgcccttcttctctcccttgcacctgtacctcttggtctttgaataaagcctgagtaggaaggctagcaaaaaaaaaaaaaaaaaaaaaaaaaaaaaaaaaaaaaaaaaaaaaaaaaaaaaaaaaaaaaaaaaaaaaaaaaaaaaaaagcccagccggctccccaacctctaccgaggagggcacctctgagtccgccacccccgagagcggccctggcacctccaccgagcccagcgagggcagcgcacccggcagccctgccggcagccccacctccacagaggagggaaccagcaccgagcccagcgaaggcagcgccccaggcaccagcaccgagcctagtgagcaggagattaaacggatcaacaagatcagaagaagacttgtgaaagacagcaacaccaagaaggccggcaagacaggccccatgaaaaccctgctggttagagtgatgacacccgatctgagagagcggctggaaaacctgagaaagaagcctgaaaatatcccccagcccatcagcaatacatctagagccaacctgaataagctgctgaccgattacaccgaaatgaagaaggcgatcctgcatgtgtactgggaagagttccagaaggaccctgtgggcctgatgagccgggtggcccagcctgccagcaagaagatcgatcagaacaagctgaaacctgagatggacgagaagggcaacctgaccaccgccggctttgcctgctctcagtgtggccagcccctgttcgtgtacaagctggagcaggtgtctgagaagggcaaggcttacaccaactacttcggacggtgcaatgtggccgagcacgaaaagctgatcctgctggcccagctgaagcccgagaaggatagcgacgaagccgtgacatatagcctgggaaagtttgggcagagggccctggatttctacagcattcatgtgaccaaggagtccacccaccccgtgaagcccctggcccagatcgccggaaacagatacgcctccggacctgtgggaaaggccctgagcgacgcatgtatgggcacaatcgcctccttcctgtctaagtaccaggacatcatcatcgaacaccagaaggtggtgaagggcaaccagaagagactggagagcctgcgggagctggccggcaaggaaaacctggaataccctagcgtgaccctgccacctcagcctcacaccaaggagggcgttgatgcctacaacgaagtgatcgcccgggtgcgaatgtgggtgaacctgaacctgtggcagaagctgaagctaagcagagatgatgccaagcctctgctgagactgaagggattcccttcctttcctctggtcgagagacaggccaacgaagtggactggtgggacatggtgtgtaacgtgaagaagctgatcaacgagaaaaaggaggatggcaaggtgttttggcagaatctggctggctacaagagacaggaagccctgagaccatacctgagcagcgaggaagatcggaagaagggaaagaaattcgctcggtaccagctgggcgacctgctgctgcacctggaaaagaagcacggcgaggactggggaaaggtgtacgacgaggcctgggagcggattgacaagaaagtggaaggcctgagcaagcacatcaagctggaagaggaacggagaagcgaggacgcccagagcaaggccgccctgaccgactggctgcgggctaaggccagcttcgtgatcgagggcctgaaggaggccgacaaggacgagttctgcagatgcgagctgaagctgcagaagtggtacggggacctgcggggaaagcccttcgccatcgaagccgagaacagcatcctggacatcagcggcttcagcaagcagtacaactgtgccttcatctggcagaaggacggcgtgaagaagctgaacctgtacctgatcatcaactacttcaagggcggcaagctgcggttcaagaagatcaaacctgaagccttcgaagccaacagattctacaccgtgatcaacaaaaagagcggcgagatcgtgcccatggaggtgaacttcaacttcgacgaccccaacctgatcatcctgcctctggcctttggcaagagacagggcagagaattcatctggaacgacctgctgtccctggaaaccggcagcctgaagctggccaacggaagagtgatcgagaagacactgtacaacagaagaacccggcaggatgagcctgccctgttcgtggccctgaccttcgagcggcgggaggtcctggactcctccaatatcaaaccaatgaacctgatcggcgtggcaagaggcgaaaacatccccgccgtgatcgccctgaccgaccccgagggctgcccactgagccggtttaaggatagcctgggaaacccaacccacatcctgagaatcggcgagagctataaggagaagcagcggaccatccaggccaagaaggaggtggagcagcggagagccggcggctacagccggaagtacgccagcaaagccaagaatctggcagacgatatggtgagaaacaccgctagagatctgctgtactacgccgtgacccaggatgccatgctgatcttcgccaacctgagccggggcttcggccggcagggcaagcggaccttcatggccgagagacagtacacacggatggaggactggctgaccgccaagctggcctacgagggcctgagcaagacctacctgtccaagacactggcccagtacacctccaagacatgcagcaactgtgggtttaccatcaccagcgccgactacgacagggtgctggagaagctgaagaagacagcaacaggctggatgaccacaattaacggcaaggagctgaaggtggagggccagattacctactacaacagatacaagagacagaacgtagtcaaggacctgtccgtcgagctggatagactgagcgaagaatctgtgaacaacgacatctcctcctggacaaagggcagaagcggagaagctctgagcctcctgaagaaaagattctcccatagacccgtgcaggagaagttcgtgtgcctgaactgcggcttcgagacacacgcagccgagcaagccgccctgaacatcgccagatcctggctgttcctgcggagccaggagtacaagaaataccagacaaacaagacaaccggcaacaccgataagagagccttcgtcgagacctggcagtccttttaccggaagaagcttaaggaggtgtggaaacctgccgtgcggtctggcggatctggcggaggctccaccagccccaagaaaaagagaaaagtctaagctgccttctgcggggcttgccttctggccatgcccttcttctctcccttgcacctgtacctcttggtctttgaataaagcctgagtaggaaggctagcaaaaaaaaaaaaaaaaaaaaaaaaaaaaaaaaaaaaaaaaaaaaaaaaaaaaaaaaaaaaaaaaaaaaaaaaaaaaaaaa

SEQ ID NO: 8974 - RNA, 8787 nt, synthetic construct
  source 1..8787: mol_type = other RNA
aggaaataagagagaaaagaagagtaagaagaaatataagagccaccatggcccctaagaagaagcgtaaagtgagccggatgaaccacgaccaggagttcgacccccctaaggtgtaccctcccgtccccgccgagaagagaaagcccatccgggtcctgagcctgttcgatggcatcgccaccggtctgctggtgctgaaggacctgggcatccaggtggataggtacattgcctccgaggtgtgcgaggactccatcaccgtgggaatggtgcgtcatcagggcaagatcatgtacgtgggcgacgtgcggagcgtgacacagaagcatatccaggagtggggccctttcgacctggtgatcggcggcagcccttgcaatgacctgagcatcgtgaacccagcccggaagggcctgtacgagggaaccggcagactgttcttcgagttttacagactgctgcacgacgcccggcctaaggaaggcgacgaccggcccttcttttggctgttcgagaatgtggtggccatgggagtcagcgacaagcgggatattagccggttcctggagagcaaccccgtgatgatcgatgccaaggaagtgagcgccgcccaccgggccagatacttctggggcaatctgcctggcatgaacagacccctggccagcaccgtgaacgacaagctggagctgcaggagtgcctggagcacggccggatcgccaagttcagcaaggtgagaaccatcaccacccgaagcaacagcatcaaacaaggcaaggaccagcactttcctgtgttcatgaacgagaaggaggacatcctgtggtgtaccgagatggagagagtgttcgggttcccagtccactacacagatgtcagcaacatgtctagactggccagacagagactgctgggaagaagctggtccgtccctgtgatcagacacctgttcgcccctctgaaggagtacttcgcctgcgtgagcagcggcaacagcaacgccaacagccggggccccagcttctctagcggcctggtgccactgtccctgagagggagccacatgggccccatggagatctacaaaaccgtgagcgcctggaagcggcagcctgtgcgcgtgctgagcctgtttcggaatatcgataaagtcctgaaaagcctgggattcctggagagcggctctggctccggcggtggcaccctgaagtacgtggaggatgtgacaaacgtggtcagacgggatgtggagaagtggggccccttcgatctggtgtacggcagcacccaacccctgggcagctcttgtgaccggtgccctggctggtacatgtttcagttccaccggatcctgcagtacgccctgccgagacaggagtcccagcggccattcttttggattttcatggacaacttgctgctgaccgaggatgaccaggaaactaccactcggttcctgcagaccgaagccgtgaccctgcaggacgtgagaggccgggactaccagaacgccatgcgggtgtggtccaacatccctggactgaaaagcaagcacgcacctctgacccctaaagaagaggagtacctgcaggcccaggtgcggagcagaagcaagctggacgcccctaaggtggatctgctggtgaagaattgcctcctgcccctgagagagtacttcaagtatttcagccagaatagtctgcccctgggaggcagcggcggcggcgcccacgagctggtgatgttcagggacgtggccatcgacttcagcaaggaggagtgggagtgcctggacctggagcagagggacctgtacagggacgtgatgctggagaactacagcaacatggtgctgctgggcctgtgcatccaccagcccgacatgttcagcctgctggagaagggcaaggagccctggaaggtgctgaggtaccagaccaggggcccctgccccgacatgcagagcaggggcggcccaagcagcggcgcccctcctcccagcggcggcaggcggcccaagcagcggcgcccctcctcccagcggcggcagcccagccggctccccaacctctaccgaggagggcacctctgagtccgccacccccgagagcggccctggcacctccaccgagcccagcgagggcagcgcacccggcagccctgccggcagccccacctccacagaggagggaaccagcaccgagcccagcgaaggcagcgccccaggcaccagcaccgagcctagtgagcaggagattaaacggatcaacaagatcagaagaagacttgtgaaagacagcaacaccaagaaggccggcaagacaggccccatgaaaaccctgctggttagagtgatgacacccgatctgagagagcggctggaaaacctgagaaagaagcctgaaaatatcccccagcccatcagcaatacatctagagccaacctgaataagctgctgaccgattacaccgaaatgaagaaggcgatcctgcatgtgtactgggaagagttccagaaggaccctgtgggcctgatgagccgggtggcccagcctgccagcaagaagatcgatcagaacaagctgaaacctgagatggacgagaagggcaacctgaccaccgccggctttgcctgctctcagtgtggccagcccctgttcgtgtacaagctggagcaggtgtctgagaagggcaaggcttacaccaactacttcggacggtgcaatgtggccgagcacgaaaagctgatcctgctggcccagctgaagcccgagaaggatagcgacgaagccgtgacatatagcctgggaaagtttgggcagagggccctggatttctacagcattcatgtgaccaaggagtccacccaccccgtgaagcccctggcccagatcgccggaaacagatacgcctccggacctgtgggaaaggccctgagcgacgcatgtatgggcacaatcgcctccttcctgtctaagtaccaggacatcatcatcgaacaccagaaggtggtgaagggcaaccagaagagactggagagcctgcgggagctggccggcaaggaaaacctggaataccctagcgtgaccctgccacctcagcctcacaccaaggagggcgttgatgcctacaacgaagtgatcgcccgggtgcgaatgtgggtgaacctgaacctgtggcagaagctgaagctaagcagagatgatgccaagcctctgctgagactgaagggattcccttcctttcctctggtcgagagacaggccaacgaagtggactggtgggacatggtgtgtaacgtgaagaagctgatcaacgagaaaaaggaggatggcaaggtgttttggcagaatctggctggctacaagagacaggaagccctgagaccatacctgagcagcgaggaagatcggaagaagggaaagaaattcgctcggtaccagctgggcgacctgctgctgcacctggaaaagaagcacggcgaggactggggaaaggtgtacgacgaggcctgggagcggattgacaagaaagtggaaggcctgagcaagcacatcaagctggaagaggaacggagaagcgaggacgcccagagcaaggccgccctgaccgactggctgcgggctaaggccagcttcgtgatcgagggcctgaaggaggccgacaaggacgagttctgcagatgcgagctgaagctgcagaagtggtacggggacctgcggggaaagcccttcgccatcgaagccgagaacagcatcctggacatcagcggcttcagcaagcagtacaactgtgccttcatctggcagaaggacggcgtgaagaagctgaacctgtacctgatcatcaactacttcaagggcggcaagctgcggttcaagaagatcaaacctgaagccttcgaagccaacagattctacaccgtgatcaacaaaaagagcggcgagatcgtgcccatggaggtgaacttcaacttcgacgaccccaacctgatcatcctgcctctggcctttggcaagagacagggcagagaattcatctggaacgacctgctgtccctggaaaccggcagcctgaagctggccaacggaagagtgatcgagaagacactgtacaacagaagaacccggcaggatgagcctgccctgttcgtggccctgaccttcgagcggcgggaggtcctggactcctccaatatcaaaccaatgaacctgatcggcgtggcaagaggcgaaaacatccccgccgtgatcgccctgaccgaccccgagggctgcccactgagccggtttaaggatagcctgggaaacccaacccacatcctgagaatcggcgagagctataaggagaagcagcggaccatccaggccaagaaggaggtggagcagcggagagccggcggctacagccggaagtacgccagcaaagccaagaatctggcagacgatatggtgagaaacaccgctagagatctgctgtactacgccgtgacccaggatgccatgctgatcttcgccaacctgagccggggcttcggccggcagggcaagcggaccttcatggccgagagacagtacacacggatggaggactggctgaccgccaagctggcctacgagggcctgagcaagacctacctgtccaagacactggcccagtacacctccaagacatgcagcaactgtgggtttaccatcaccagcgccgactacgacagggtgctggagaagctgaagaagacagcaacaggctggatgaccacaattaacggcaaggagctgaaggtggagggccagattacctactacaacagatacaagagacagaacgtagtcaaggacctgtccgtcgagctggatagactgagcgaagaatctgtgaacaacgacatctcctcctggacaaagggcagaagcggagaagctctgagcctcctgaagaaaagattctcccatagacccgtgcaggagaagttcgtgtgcctgaactgcggcttcgagacacacgcagccgagcaagccgccctgaacatcgccagatcctggctgttcctgcggagccaggagtacaagaaataccagacaaacaagacaaccggcaacaccgataagagagccttcgtcgagacctggcagtccttttaccggaagaagcttaaggaggtgtggaaacctgccgtgcggtctggcggatctggcggaggctccaccagccccaagaaaaagagaaaagtctaagctgccttctgcggggcttgccttctggccatgcccttcttctctcccttgcacctgtacctcttggtctttgaataaagcctgagtaggaaggctagcaaaaaaaaaaaaaaaaaaaaaaaaaaaaaaaaaaaaaaaaaaaaaaaaaaaaaaaaaaaaaaaaaaaaaaaaaaaaaaaagcccagccggctccccaacctctaccgaggagggcacctctgagtccgccacccccgagagcggccctggcacctccaccgagcccagcgagggcagcgcacccggcagccctgccggcagccccacctccacagaggagggaaccagcaccgagcccagcgaaggcagcgccccaggcaccagcaccgagcctagtgagcaggagattaaacggatcaacaagatcagaagaagacttgtgaaagacagcaacaccaagaaggccggcaagacaggccccatgaaaaccctgctggttagagtgatgacacccgatctgagagagcggctggaaaacctgagaaagaagcctgaaaatatcccccagcccatcagcaatacatctagagccaacctgaataagctgctgaccgattacaccgaaatgaagaaggcgatcctgcatgtgtactgggaagagttccagaaggaccctgtgggcctgatgagccgggtggcccagcctgccagcaagaagatcgatcagaacaagctgaaacctgagatggacgagaagggcaacctgaccaccgccggctttgcctgctctcagtgtggccagcccctgttcgtgtacaagctggagcaggtgtctgagaagggcaaggcttacaccaactacttcggacggtgcaatgtggccgagcacgaaaagctgatcctgctggcccagctgaagcccgagaaggatagcgacgaagccgtgacatatagcctgggaaagtttgggcagagggccctggatttctacagcattcatgtgaccaaggagtccacccaccccgtgaagcccctggcccagatcgccggaaacagatacgcctccggacctgtgggaaaggccctgagcgacgcatgtatgggcacaatcgcctccttcctgtctaagtaccaggacatcatcatcgaacaccagaaggtggtgaagggcaaccagaagagactggagagcctgcgggagctggccggcaaggaaaacctggaataccctagcgtgaccctgccacctcagcctcacaccaaggagggcgttgatgcctacaacgaagtgatcgcccgggtgcgaatgtgggtgaacctgaacctgtggcagaagctgaagctaagcagagatgatgccaagcctctgctgagactgaagggattcccttcctttcctctggtcgagagacaggccaacgaagtggactggtgggacatggtgtgtaacgtgaagaagctgatcaacgagaaaaaggaggatggcaaggtgttttggcagaatctggctggctacaagagacaggaagccctgagaccatacctgagcagcgaggaagatcggaagaagggaaagaaattcgctcggtaccagctgggcgacctgctgctgcacctggaaaagaagcacggcgaggactggggaaaggtgtacgacgaggcctgggagcggattgacaagaaagtggaaggcctgagcaagcacatcaagctggaagaggaacggagaagcgaggacgcccagagcaaggccgccctgaccgactggctgcgggctaaggccagcttcgtgatcgagggcctgaaggaggccgacaaggacgagttctgcagatgcgagctgaagctgcagaagtggtacggggacctgcggggaaagcccttcgccatcgaagccgagaacagcatcctggacatcagcggcttcagcaagcagtacaactgtgccttcatctggcagaaggacggcgtgaagaagctgaacctgtacctgatcatcaactacttcaagggcggcaagctgcggttcaagaagatcaaacctgaagccttcgaagccaacagattctacaccgtgatcaacaaaaagagcggcgagatcgtgcccatggaggtgaacttcaacttcgacgaccccaacctgatcatcctgcctctggcctttggcaagagacagggcagagaattcatctggaacgacctgctgtccctggaaaccggcagcctgaagctggccaacggaagagtgatcgagaagacactgtacaacagaagaacccggcaggatgagcctgccctgttcgtggccctgaccttcgagcggcgggaggtcctggactcctccaatatcaaaccaatgaacctgatcggcgtggcaagaggcgaaaacatccccgccgtgatcgccctgaccgaccccgagggctgcccactgagccggtttaaggatagcctgggaaacccaacccacatcctgagaatcggcgagagctataaggagaagcagcggaccatccaggccaagaaggaggtggagcagcggagagccggcggctacagccggaagtacgccagcaaagccaagaatctggcagacgatatggtgagaaacaccgctagagatctgctgtactacgccgtgacccaggatgccatgctgatcttcgccaacctgagccggggcttcggccggcagggcaagcggaccttcatggccgagagacagtacacacggatggaggactggctgaccgccaagctggcctacgagggcctgagcaagacctacctgtccaagacactggcccagtacacctccaagacatgcagcaactgtgggtttaccatcaccagcgccgactacgacagggtgctggagaagctgaagaagacagcaacaggctggatgaccacaattaacggcaaggagctgaaggtggagggccagattacctactacaacagatacaagagacagaacgtagtcaaggacctgtccgtcgagctggatagactgagcgaagaatctgtgaacaacgacatctcctcctggacaaagggcagaagcggagaagctctgagcctcctgaagaaaagattctcccatagacccgtgcaggagaagttcgtgtgcctgaactgcggcttcgagacacacgcagccgagcaagccgccctgaacatcgccagatcctggctgttcctgcggagccaggagtacaagaaataccagacaaacaagacaaccggcaacaccgataagagagccttcgtcgagacctggcagtccttttaccggaagaagcttaaggaggtgtggaaacctgccgtgcggtctggcggatctggcggaggctccaccagccccaagaaaaagagaaaagtctaagctgccttctgcggggcttgccttctggccatgcccttcttctctcccttgcacctgtacctcttggtctttgaataaagcctgagtaggaaggctagcaaaaaaaaaaaaaaaaaaaaaaaaaaaaaaaaaaaaaaaaaaaaaaaaaaaaaaaaaaaaaaaaaaaaaaaaaaaaaaaa

SEQ ID NO: 8975 - RNA, 8787 nt, synthetic construct
  source 1..8787: mol_type = other RNA
aggaaataagagagaaaagaagagtaagaagaaatataagagccaccatggcccctaagaagaagcgtaaagtgagccggatgaaccacgaccaggagttcgacccccctaaggtgtaccctcccgtccccgccgagaagagaaagcccatccgggtcctgagcctgttcgatggcatcgccaccggtctgctggtgctgaaggacctgggcatccaggtggataggtacattgcctccgaggtgtgcgaggactccatcaccgtgggaatggtgcgtcatcagggcaagatcatgtacgtgggcgacgtgcggagcgtgacacagaagcatatccaggagtggggccctttcgacctggtgatcggcggcagcccttgcaatgacctgagcatcgtgaacccagcccggaagggcctgtacgagggaaccggcagactgttcttcgagttttacagactgctgcacgacgcccggcctaaggaaggcgacgaccggcccttcttttggctgttcgagaatgtggtggccatgggagtcagcgacaagcgggatattagccggttcctggagagcaaccccgtgatgatcgatgccaaggaagtgagcgccgcccaccgggccagatacttctggggcaatctgcctggcatgaacagacccctggccagcaccgtgaacgacaagctggagctgcaggagtgcctggagcacggccggatcgccaagttcagcaaggtgagaaccatcaccacccgaagcaacagcatcaaacaaggcaaggaccagcactttcctgtgttcatgaacgagaaggaggacatcctgtggtgtaccgagatggagagagtgttcgggttcccagtccactacacagatgtcagcaacatgtctagactggccagacagagactgctgggaagaagctggtccgtccctgtgatcagacacctgttcgcccctctgaaggagtacttcgcctgcgtgagcagcggcaacagcaacgccaacagccggggccccagcttctctagcggcctggtgccactgtccctgagagggagccacatgggccccatggagatctacaaaaccgtgagcgcctggaagcggcagcctgtgcgcgtgctgagcctgtttcggaatatcgataaagtcctgaaaagcctgggattcctggagagcggctctggctccggcggtggcaccctgaagtacgtggaggatgtgacaaacgtggtcagacgggatgtggagaagtggggccccttcgatctggtgtacggcagcacccaacccctgggcagctcttgtgaccggtgccctggctggtacatgtttcagttccaccggatcctgcagtacgccctgccgagacaggagtcccagcggccattcttttggattttcatggacaacttgctgctgaccgaggatgaccaggaaactaccactcggttcctgcagaccgaagccgtgaccctgcaggacgtgagaggccgggactaccagaacgccatgcgggtgtggtccaacatccctggactgaaaagcaagcacgcacctctgacccctaaagaagaggagtacctgcaggcccaggtgcggagcagaagcaagctggacgcccctaaggtggatctgctggtgaagaattgcctcctgcccctgagagagtacttcaagtatttcagccagaatagtctgcccctgggaggcagcggcggcggccaggaccccagcgccgagggcctgagcgaggaggtgcccgtggtgttcgaggagctgcccgtggtgttcgaggacgtggccgtgtacttcaccaggaaggagtggggcatgctggacaagaggcagaaggagctgtacagggacgtgatgaggatgaactacgagctgctggccagcctgggccccgccgccgccaagcccgacctgatcagcaagctggagaggagggccgccccctggatcggcggcccaagcagcggcgcccctcctcccagcggcggcaggcggcccaagcagcggcgcccctcctcccagcggcggcagcccagccggctccccaacctctaccgaggagggcacctctgagtccgccacccccgagagcggccctggcacctccaccgagcccagcgagggcagcgcacccggcagccctgccggcagccccacctccacagaggagggaaccagcaccgagcccagcgaaggcagcgccccaggcaccagcaccgagcctagtgagcaggagattaaacggatcaacaagatcagaagaagacttgtgaaagacagcaacaccaagaaggccggcaagacaggccccatgaaaaccctgctggttagagtgatgacacccgatctgagagagcggctggaaaacctgagaaagaagcctgaaaatatcccccagcccatcagcaatacatctagagccaacctgaataagctgctgaccgattacaccgaaatgaagaaggcgatcctgcatgtgtactgggaagagttccagaaggaccctgtgggcctgatgagccgggtggcccagcctgccagcaagaagatcgatcagaacaagctgaaacctgagatggacgagaagggcaacctgaccaccgccggctttgcctgctctcagtgtggccagcccctgttcgtgtacaagctggagcaggtgtctgagaagggcaaggcttacaccaactacttcggacggtgcaatgtggccgagcacgaaaagctgatcctgctggcccagctgaagcccgagaaggatagcgacgaagccgtgacatatagcctgggaaagtttgggcagagggccctggatttctacagcattcatgtgaccaaggagtccacccaccccgtgaagcccctggcccagatcgccggaaacagatacgcctccggacctgtgggaaaggccctgagcgacgcatgtatgggcacaatcgcctccttcctgtctaagtaccaggacatcatcatcgaacaccagaaggtggtgaagggcaaccagaagagactggagagcctgcgggagctggccggcaaggaaaacctggaataccctagcgtgaccctgccacctcagcctcacaccaaggagggcgttgatgcctacaacgaagtgatcgcccgggtgcgaatgtgggtgaacctgaacctgtggcagaagctgaagctaagcagagatgatgccaagcctctgctgagactgaagggattcccttcctttcctctggtcgagagacaggccaacgaagtggactggtgggacatggtgtgtaacgtgaagaagctgatcaacgagaaaaaggaggatggcaaggtgttttggcagaatctggctggctacaagagacaggaagccctgagaccatacctgagcagcgaggaagatcggaagaagggaaagaaattcgctcggtaccagctgggcgacctgctgctgcacctggaaaagaagcacggcgaggactggggaaaggtgtacgacgaggcctgggagcggattgacaagaaagtggaaggcctgagcaagcacatcaagctggaagaggaacggagaagcgaggacgcccagagcaaggccgccctgaccgactggctgcgggctaaggccagcttcgtgatcgagggcctgaaggaggccgacaaggacgagttctgcagatgcgagctgaagctgcagaagtggtacggggacctgcggggaaagcccttcgccatcgaagccgagaacagcatcctggacatcagcggcttcagcaagcagtacaactgtgccttcatctggcagaaggacggcgtgaagaagctgaacctgtacctgatcatcaactacttcaagggcggcaagctgcggttcaagaagatcaaacctgaagccttcgaagccaacagattctacaccgtgatcaacaaaaagagcggcgagatcgtgcccatggaggtgaacttcaacttcgacgaccccaacctgatcatcctgcctctggcctttggcaagagacagggcagagaattcatctggaacgacctgctgtccctggaaaccggcagcctgaagctggccaacggaagagtgatcgagaagacactgtacaacagaagaacccggcaggatgagcctgccctgttcgtggccctgaccttcgagcggcgggaggtcctggactcctccaatatcaaaccaatgaacctgatcggcgtggcaagaggcgaaaacatccccgccgtgatcgccctgaccgaccccgagggctgcccactgagccggtttaaggatagcctgggaaacccaacccacatcctgagaatcggcgagagctataaggagaagcagcggaccatccaggccaagaaggaggtggagcagcggagagccggcggctacagccggaagtacgccagcaaagccaagaatctggcagacgatatggtgagaaacaccgctagagatctgctgtactacgccgtgacccaggatgccatgctgatcttcgccaacctgagccggggcttcggccggcagggcaagcggaccttcatggccgagagacagtacacacggatggaggactggctgaccgccaagctggcctacgagggcctgagcaagacctacctgtccaagacactggcccagtacacctccaagacatgcagcaactgtgggtttaccatcaccagcgccgactacgacagggtgctggagaagctgaagaagacagcaacaggctggatgaccacaattaacggcaaggagctgaaggtggagggccagattacctactacaacagatacaagagacagaacgtagtcaaggacctgtccgtcgagctggatagactgagcgaagaatctgtgaacaacgacatctcctcctggacaaagggcagaagcggagaagctctgagcctcctgaagaaaagattctcccatagacccgtgcaggagaagttcgtgtgcctgaactgcggcttcgagacacacgcagccgagcaagccgccctgaacatcgccagatcctggctgttcctgcggagccaggagtacaagaaataccagacaaacaagacaaccggcaacaccgataagagagccttcgtcgagacctggcagtccttttaccggaagaagcttaaggaggtgtggaaacctgccgtgcggtctggcggatctggcggaggctccaccagccccaagaaaaagagaaaagtctaagctgccttctgcggggcttgccttctggccatgcccttcttctctcccttgcacctgtacctcttggtctttgaataaagcctgagtaggaaggctagcaaaaaaaaaaaaaaaaaaaaaaaaaaaaaaaaaaaaaaaaaaaaaaaaaaaaaaaaaaaaaaaaaaaaaaaaaaaaaaaagcccagccggctccccaacctctaccgaggagggcacctctgagtccgccacccccgagagcggccctggcacctccaccgagcccagcgagggcagcgcacccggcagccctgccggcagccccacctccacagaggagggaaccagcaccgagcccagcgaaggcagcgccccaggcaccagcaccgagcctagtgagcaggagattaaacggatcaacaagatcagaagaagacttgtgaaagacagcaacaccaagaaggccggcaagacaggccccatgaaaaccctgctggttagagtgatgacacccgatctgagagagcggctggaaaacctgagaaagaagcctgaaaatatcccccagcccatcagcaatacatctagagccaacctgaataagctgctgaccgattacaccgaaatgaagaaggcgatcctgcatgtgtactgggaagagttccagaaggaccctgtgggcctgatgagccgggtggcccagcctgccagcaagaagatcgatcagaacaagctgaaacctgagatggacgagaagggcaacctgaccaccgccggctttgcctgctctcagtgtggccagcccctgttcgtgtacaagctggagcaggtgtctgagaagggcaaggcttacaccaactacttcggacggtgcaatgtggccgagcacgaaaagctgatcctgctggcccagctgaagcccgagaaggatagcgacgaagccgtgacatatagcctgggaaagtttgggcagagggccctggatttctacagcattcatgtgaccaaggagtccacccaccccgtgaagcccctggcccagatcgccggaaacagatacgcctccggacctgtgggaaaggccctgagcgacgcatgtatgggcacaatcgcctccttcctgtctaagtaccaggacatcatcatcgaacaccagaaggtggtgaagggcaaccagaagagactggagagcctgcgggagctggccggcaaggaaaacctggaataccctagcgtgaccctgccacctcagcctcacaccaaggagggcgttgatgcctacaacgaagtgatcgcccgggtgcgaatgtgggtgaacctgaacctgtggcagaagctgaagctaagcagagatgatgccaagcctctgctgagactgaagggattcccttcctttcctctggtcgagagacaggccaacgaagtggactggtgggacatggtgtgtaacgtgaagaagctgatcaacgagaaaaaggaggatggcaaggtgttttggcagaatctggctggctacaagagacaggaagccctgagaccatacctgagcagcgaggaagatcggaagaagggaaagaaattcgctcggtaccagctgggcgacctgctgctgcacctggaaaagaagcacggcgaggactggggaaaggtgtacgacgaggcctgggagcggattgacaagaaagtggaaggcctgagcaagcacatcaagctggaagaggaacggagaagcgaggacgcccagagcaaggccgccctgaccgactggctgcgggctaaggccagcttcgtgatcgagggcctgaaggaggccgacaaggacgagttctgcagatgcgagctgaagctgcagaagtggtacggggacctgcggggaaagcccttcgccatcgaagccgagaacagcatcctggacatcagcggcttcagcaagcagtacaactgtgccttcatctggcagaaggacggcgtgaagaagctgaacctgtacctgatcatcaactacttcaagggcggcaagctgcggttcaagaagatcaaacctgaagccttcgaagccaacagattctacaccgtgatcaacaaaaagagcggcgagatcgtgcccatggaggtgaacttcaacttcgacgaccccaacctgatcatcctgcctctggcctttggcaagagacagggcagagaattcatctggaacgacctgctgtccctggaaaccggcagcctgaagctggccaacggaagagtgatcgagaagacactgtacaacagaagaacccggcaggatgagcctgccctgttcgtggccctgaccttcgagcggcgggaggtcctggactcctccaatatcaaaccaatgaacctgatcggcgtggcaagaggcgaaaacatccccgccgtgatcgccctgaccgaccccgagggctgcccactgagccggtttaaggatagcctgggaaacccaacccacatcctgagaatcggcgagagctataaggagaagcagcggaccatccaggccaagaaggaggtggagcagcggagagccggcggctacagccggaagtacgccagcaaagccaagaatctggcagacgatatggtgagaaacaccgctagagatctgctgtactacgccgtgacccaggatgccatgctgatcttcgccaacctgagccggggcttcggccggcagggcaagcggaccttcatggccgagagacagtacacacggatggaggactggctgaccgccaagctggcctacgagggcctgagcaagacctacctgtccaagacactggcccagtacacctccaagacatgcagcaactgtgggtttaccatcaccagcgccgactacgacagggtgctggagaagctgaagaagacagcaacaggctggatgaccacaattaacggcaaggagctgaaggtggagggccagattacctactacaacagatacaagagacagaacgtagtcaaggacctgtccgtcgagctggatagactgagcgaagaatctgtgaacaacgacatctcctcctggacaaagggcagaagcggagaagctctgagcctcctgaagaaaagattctcccatagacccgtgcaggagaagttcgtgtgcctgaactgcggcttcgagacacacgcagccgagcaagccgccctgaacatcgccagatcctggctgttcctgcggagccaggagtacaagaaataccagacaaacaagacaaccggcaacaccgataagagagccttcgtcgagacctggcagtccttttaccggaagaagcttaaggaggtgtggaaacctgccgtgcggtctggcggatctggcggaggctccaccagccccaagaaaaagagaaaagtctaagctgccttctgcggggcttgccttctggccatgcccttcttctctcccttgcacctgtacctcttggtctttgaataaagcctgagtaggaaggctagcaaaaaaaaaaaaaaaaaaaaaaaaaaaaaaaaaaaaaaaaaaaaaaaaaaaaaaaaaaaaaaaaaaaaaaaaaaaaaaaa

SEQ ID NO: 8976 - RNA, 8787 nt, synthetic construct
  source 1..8787: mol_type = other RNA
aggaaataagagagaaaagaagagtaagaagaaatataagagccaccatggcccctaagaagaagcgtaaagtgagccggatgaaccacgaccaggagttcgacccccctaaggtgtaccctcccgtccccgccgagaagagaaagcccatccgggtcctgagcctgttcgatggcatcgccaccggtctgctggtgctgaaggacctgggcatccaggtggataggtacattgcctccgaggtgtgcgaggactccatcaccgtgggaatggtgcgtcatcagggcaagatcatgtacgtgggcgacgtgcggagcgtgacacagaagcatatccaggagtggggccctttcgacctggtgatcggcggcagcccttgcaatgacctgagcatcgtgaacccagcccggaagggcctgtacgagggaaccggcagactgttcttcgagttttacagactgctgcacgacgcccggcctaaggaaggcgacgaccggcccttcttttggctgttcgagaatgtggtggccatgggagtcagcgacaagcgggatattagccggttcctggagagcaaccccgtgatgatcgatgccaaggaagtgagcgccgcccaccgggccagatacttctggggcaatctgcctggcatgaacagacccctggccagcaccgtgaacgacaagctggagctgcaggagtgcctggagcacggccggatcgccaagttcagcaaggtgagaaccatcaccacccgaagcaacagcatcaaacaaggcaaggaccagcactttcctgtgttcatgaacgagaaggaggacatcctgtggtgtaccgagatggagagagtgttcgggttcccagtccactacacagatgtcagcaacatgtctagactggccagacagagactgctgggaagaagctggtccgtccctgtgatcagacacctgttcgcccctctgaaggagtacttcgcctgcgtgagcagcggcaacagcaacgccaacagccggggccccagcttctctagcggcctggtgccactgtccctgagagggagccacatgggccccatggagatctacaaaaccgtgagcgcctggaagcggcagcctgtgcgcgtgctgagcctgtttcggaatatcgataaagtcctgaaaagcctgggattcctggagagcggctctggctccggcggtggcaccctgaagtacgtggaggatgtgacaaacgtggtcagacgggatgtggagaagtggggccccttcgatctggtgtacggcagcacccaacccctgggcagctcttgtgaccggtgccctggctggtacatgtttcagttccaccggatcctgcagtacgccctgccgagacaggagtcccagcggccattcttttggattttcatggacaacttgctgctgaccgaggatgaccaggaaactaccactcggttcctgcagaccgaagccgtgaccctgcaggacgtgagaggccgggactaccagaacgccatgcgggtgtggtccaacatccctggactgaaaagcaagcacgcacctctgacccctaaagaagaggagtacctgcaggcccaggtgcggagcagaagcaagctggacgcccctaaggtggatctgctggtgaagaattgcctcctgcccctgagagagtacttcaagtatttcagccagaatagtctgcccctgggaggcagcggcggcggcgccgtgaccatggaggacgtgaccgtgaccttcaccaacgaggagtgggccctgctgaaccccgcccagaagaggctgtacggcgacgtgatgtgggagaccttcaggaccatcagcgccatcggcaggacctgggacagccagcagatggaggaggagtacaagaactacctgaggaacctgagcaacgaggaggtggccaagtgctgcaggtacaccaccttcaaccagcacgagaacatcggcggcccaagcagcggcgcccctcctcccagcggcggcaggcggcccaagcagcggcgcccctcctcccagcggcggcagcccagccggctccccaacctctaccgaggagggcacctctgagtccgccacccccgagagcggccctggcacctccaccgagcccagcgagggcagcgcacccggcagccctgccggcagccccacctccacagaggagggaaccagcaccgagcccagcgaaggcagcgccccaggcaccagcaccgagcctagtgagcaggagattaaacggatcaacaagatcagaagaagacttgtgaaagacagcaacaccaagaaggccggcaagacaggccccatgaaaaccctgctggttagagtgatgacacccgatctgagagagcggctggaaaacctgagaaagaagcctgaaaatatcccccagcccatcagcaatacatctagagccaacctgaataagctgctgaccgattacaccgaaatgaagaaggcgatcctgcatgtgtactgggaagagttccagaaggaccctgtgggcctgatgagccgggtggcccagcctgccagcaagaagatcgatcagaacaagctgaaacctgagatggacgagaagggcaacctgaccaccgccggctttgcctgctctcagtgtggccagcccctgttcgtgtacaagctggagcaggtgtctgagaagggcaaggcttacaccaactacttcggacggtgcaatgtggccgagcacgaaaagctgatcctgctggcccagctgaagcccgagaaggatagcgacgaagccgtgacatatagcctgggaaagtttgggcagagggccctggatttctacagcattcatgtgaccaaggagtccacccaccccgtgaagcccctggcccagatcgccggaaacagatacgcctccggacctgtgggaaaggccctgagcgacgcatgtatgggcacaatcgcctccttcctgtctaagtaccaggacatcatcatcgaacaccagaaggtggtgaagggcaaccagaagagactggagagcctgcgggagctggccggcaaggaaaacctggaataccctagcgtgaccctgccacctcagcctcacaccaaggagggcgttgatgcctacaacgaagtgatcgcccgggtgcgaatgtgggtgaacctgaacctgtggcagaagctgaagctaagcagagatgatgccaagcctctgctgagactgaagggattcccttcctttcctctggtcgagagacaggccaacgaagtggactggtgggacatggtgtgtaacgtgaagaagctgatcaacgagaaaaaggaggatggcaaggtgttttggcagaatctggctggctacaagagacaggaagccctgagaccatacctgagcagcgaggaagatcggaagaagggaaagaaattcgctcggtaccagctgggcgacctgctgctgcacctggaaaagaagcacggcgaggactggggaaaggtgtacgacgaggcctgggagcggattgacaagaaagtggaaggcctgagcaagcacatcaagctggaagaggaacggagaagcgaggacgcccagagcaaggccgccctgaccgactggctgcgggctaaggccagcttcgtgatcgagggcctgaaggaggccgacaaggacgagttctgcagatgcgagctgaagctgcagaagtggtacggggacctgcggggaaagcccttcgccatcgaagccgagaacagcatcctggacatcagcggcttcagcaagcagtacaactgtgccttcatctggcagaaggacggcgtgaagaagctgaacctgtacctgatcatcaactacttcaagggcggcaagctgcggttcaagaagatcaaacctgaagccttcgaagccaacagattctacaccgtgatcaacaaaaagagcggcgagatcgtgcccatggaggtgaacttcaacttcgacgaccccaacctgatcatcctgcctctggcctttggcaagagacagggcagagaattcatctggaacgacctgctgtccctggaaaccggcagcctgaagctggccaacggaagagtgatcgagaagacactgtacaacagaagaacccggcaggatgagcctgccctgttcgtggccctgaccttcgagcggcgggaggtcctggactcctccaatatcaaaccaatgaacctgatcggcgtggcaagaggcgaaaacatccccgccgtgatcgccctgaccgaccccgagggctgcccactgagccggtttaaggatagcctgggaaacccaacccacatcctgagaatcggcgagagctataaggagaagcagcggaccatccaggccaagaaggaggtggagcagcggagagccggcggctacagccggaagtacgccagcaaagccaagaatctggcagacgatatggtgagaaacaccgctagagatctgctgtactacgccgtgacccaggatgccatgctgatcttcgccaacctgagccggggcttcggccggcagggcaagcggaccttcatggccgagagacagtacacacggatggaggactggctgaccgccaagctggcctacgagggcctgagcaagacctacctgtccaagacactggcccagtacacctccaagacatgcagcaactgtgggtttaccatcaccagcgccgactacgacagggtgctggagaagctgaagaagacagcaacaggctggatgaccacaattaacggcaaggagctgaaggtggagggccagattacctactacaacagatacaagagacagaacgtagtcaaggacctgtccgtcgagctggatagactgagcgaagaatctgtgaacaacgacatctcctcctggacaaagggcagaagcggagaagctctgagcctcctgaagaaaagattctcccatagacccgtgcaggagaagttcgtgtgcctgaactgcggcttcgagacacacgcagccgagcaagccgccctgaacatcgccagatcctggctgttcctgcggagccaggagtacaagaaataccagacaaacaagacaaccggcaacaccgataagagagccttcgtcgagacctggcagtccttttaccggaagaagcttaaggaggtgtggaaacctgccgtgcggtctggcggatctggcggaggctccaccagccccaagaaaaagagaaaagtctaagctgccttctgcggggcttgccttctggccatgcccttcttctctcccttgcacctgtacctcttggtctttgaataaagcctgagtaggaaggctagcaaaaaaaaaaaaaaaaaaaaaaaaaaaaaaaaaaaaaaaaaaaaaaaaaaaaaaaaaaaaaaaaaaaaaaaaaaaaaaaagcccagccggctccccaacctctaccgaggagggcacctctgagtccgccacccccgagagcggccctggcacctccaccgagcccagcgagggcagcgcacccggcagccctgccggcagccccacctccacagaggagggaaccagcaccgagcccagcgaaggcagcgccccaggcaccagcaccgagcctagtgagcaggagattaaacggatcaacaagatcagaagaagacttgtgaaagacagcaacaccaagaaggccggcaagacaggccccatgaaaaccctgctggttagagtgatgacacccgatctgagagagcggctggaaaacctgagaaagaagcctgaaaatatcccccagcccatcagcaatacatctagagccaacctgaataagctgctgaccgattacaccgaaatgaagaaggcgatcctgcatgtgtactgggaagagttccagaaggaccctgtgggcctgatgagccgggtggcccagcctgccagcaagaagatcgatcagaacaagctgaaacctgagatggacgagaagggcaacctgaccaccgccggctttgcctgctctcagtgtggccagcccctgttcgtgtacaagctggagcaggtgtctgagaagggcaaggcttacaccaactacttcggacggtgcaatgtggccgagcacgaaaagctgatcctgctggcccagctgaagcccgagaaggatagcgacgaagccgtgacatatagcctgggaaagtttgggcagagggccctggatttctacagcattcatgtgaccaaggagtccacccaccccgtgaagcccctggcccagatcgccggaaacagatacgcctccggacctgtgggaaaggccctgagcgacgcatgtatgggcacaatcgcctccttcctgtctaagtaccaggacatcatcatcgaacaccagaaggtggtgaagggcaaccagaagagactggagagcctgcgggagctggccggcaaggaaaacctggaataccctagcgtgaccctgccacctcagcctcacaccaaggagggcgttgatgcctacaacgaagtgatcgcccgggtgcgaatgtgggtgaacctgaacctgtggcagaagctgaagctaagcagagatgatgccaagcctctgctgagactgaagggattcccttcctttcctctggtcgagagacaggccaacgaagtggactggtgggacatggtgtgtaacgtgaagaagctgatcaacgagaaaaaggaggatggcaaggtgttttggcagaatctggctggctacaagagacaggaagccctgagaccatacctgagcagcgaggaagatcggaagaagggaaagaaattcgctcggtaccagctgggcgacctgctgctgcacctggaaaagaagcacggcgaggactggggaaaggtgtacgacgaggcctgggagcggattgacaagaaagtggaaggcctgagcaagcacatcaagctggaagaggaacggagaagcgaggacgcccagagcaaggccgccctgaccgactggctgcgggctaaggccagcttcgtgatcgagggcctgaaggaggccgacaaggacgagttctgcagatgcgagctgaagctgcagaagtggtacggggacctgcggggaaagcccttcgccatcgaagccgagaacagcatcctggacatcagcggcttcagcaagcagtacaactgtgccttcatctggcagaaggacggcgtgaagaagctgaacctgtacctgatcatcaactacttcaagggcggcaagctgcggttcaagaagatcaaacctgaagccttcgaagccaacagattctacaccgtgatcaacaaaaagagcggcgagatcgtgcccatggaggtgaacttcaacttcgacgaccccaacctgatcatcctgcctctggcctttggcaagagacagggcagagaattcatctggaacgacctgctgtccctggaaaccggcagcctgaagctggccaacggaagagtgatcgagaagacactgtacaacagaagaacccggcaggatgagcctgccctgttcgtggccctgaccttcgagcggcgggaggtcctggactcctccaatatcaaaccaatgaacctgatcggcgtggcaagaggcgaaaacatccccgccgtgatcgccctgaccgaccccgagggctgcccactgagccggtttaaggatagcctgggaaacccaacccacatcctgagaatcggcgagagctataaggagaagcagcggaccatccaggccaagaaggaggtggagcagcggagagccggcggctacagccggaagtacgccagcaaagccaagaatctggcagacgatatggtgagaaacaccgctagagatctgctgtactacgccgtgacccaggatgccatgctgatcttcgccaacctgagccggggcttcggccggcagggcaagcggaccttcatggccgagagacagtacacacggatggaggactggctgaccgccaagctggcctacgagggcctgagcaagacctacctgtccaagacactggcccagtacacctccaagacatgcagcaactgtgggtttaccatcaccagcgccgactacgacagggtgctggagaagctgaagaagacagcaacaggctggatgaccacaattaacggcaaggagctgaaggtggagggccagattacctactacaacagatacaagagacagaacgtagtcaaggacctgtccgtcgagctggatagactgagcgaagaatctgtgaacaacgacatctcctcctggacaaagggcagaagcggagaagctctgagcctcctgaagaaaagattctcccatagacccgtgcaggagaagttcgtgtgcctgaactgcggcttcgagacacacgcagccgagcaagccgccctgaacatcgccagatcctggctgttcctgcggagccaggagtacaagaaataccagacaaacaagacaaccggcaacaccgataagagagccttcgtcgagacctggcagtccttttaccggaagaagcttaaggaggtgtggaaacctgccgtgcggtctggcggatctggcggaggctccaccagccccaagaaaaagagaaaagtctaagctgccttctgcggggcttgccttctggccatgcccttcttctctcccttgcacctgtacctcttggtctttgaataaagcctgagtaggaaggctagcaaaaaaaaaaaaaaaaaaaaaaaaaaaaaaaaaaaaaaaaaaaaaaaaaaaaaaaaaaaaaaaaaaaaaaaaaaaaaaaa

SEQ ID NO: 8977 - RNA, 8787 nt, synthetic construct
  source 1..8787: mol_type = other RNA
aggaaataagagagaaaagaagagtaagaagaaatataagagccaccatggcccctaagaagaagcgtaaagtgagccggatgaaccacgaccaggagttcgacccccctaaggtgtaccctcccgtccccgccgagaagagaaagcccatccgggtcctgagcctgttcgatggcatcgccaccggtctgctggtgctgaaggacctgggcatccaggtggataggtacattgcctccgaggtgtgcgaggactccatcaccgtgggaatggtgcgtcatcagggcaagatcatgtacgtgggcgacgtgcggagcgtgacacagaagcatatccaggagtggggccctttcgacctggtgatcggcggcagcccttgcaatgacctgagcatcgtgaacccagcccggaagggcctgtacgagggaaccggcagactgttcttcgagttttacagactgctgcacgacgcccggcctaaggaaggcgacgaccggcccttcttttggctgttcgagaatgtggtggccatgggagtcagcgacaagcgggatattagccggttcctggagagcaaccccgtgatgatcgatgccaaggaagtgagcgccgcccaccgggccagatacttctggggcaatctgcctggcatgaacagacccctggccagcaccgtgaacgacaagctggagctgcaggagtgcctggagcacggccggatcgccaagttcagcaaggtgagaaccatcaccacccgaagcaacagcatcaaacaaggcaaggaccagcactttcctgtgttcatgaacgagaaggaggacatcctgtggtgtaccgagatggagagagtgttcgggttcccagtccactacacagatgtcagcaacatgtctagactggccagacagagactgctgggaagaagctggtccgtccctgtgatcagacacctgttcgcccctctgaaggagtacttcgcctgcgtgagcagcggcaacagcaacgccaacagccggggccccagcttctctagcggcctggtgccactgtccctgagagggagccacatgggccccatggagatctacaaaaccgtgagcgcctggaagcggcagcctgtgcgcgtgctgagcctgtttcggaatatcgataaagtcctgaaaagcctgggattcctggagagcggctctggctccggcggtggcaccctgaagtacgtggaggatgtgacaaacgtggtcagacgggatgtggagaagtggggccccttcgatctggtgtacggcagcacccaacccctgggcagctcttgtgaccggtgccctggctggtacatgtttcagttccaccggatcctgcagtacgccctgccgagacaggagtcccagcggccattcttttggattttcatggacaacttgctgctgaccgaggatgaccaggaaactaccactcggttcctgcagaccgaagccgtgaccctgcaggacgtgagaggccgggactaccagaacgccatgcgggtgtggtccaacatccctggactgaaaagcaagcacgcacctctgacccctaaagaagaggagtacctgcaggcccaggtgcggagcagaagcaagctggacgcccctaaggtggatctgctggtgaagaattgcctcctgcccctgagagagtacttcaagtatttcagccagaatagtctgcccctgggaggcagcggcggcggcatgaacaccgtgacctacgacgacgtgcacatcggcttcacctgggaggagtggaccctgctggaccccagccagaagaacctgtacaaggacgtgatgctggagacctacaggaacctggccatcatcggctacagctgggaggaccacaacatcgaggagcactaccagaacagcaggaggcacgagaggcacgagaggagccagaccggcatgaagaccagcgtgcacacccagtgcagcggcggcccaagcagcggcgcccctcctcccagcggcggcaggcggcccaagcagcggcgcccctcctcccagcggcggcagcccagccggctccccaacctctaccgaggagggcacctctgagtccgccacccccgagagcggccctggcacctccaccgagcccagcgagggcagcgcacccggcagccctgccggcagccccacctccacagaggagggaaccagcaccgagcccagcgaaggcagcgccccaggcaccagcaccgagcctagtgagcaggagattaaacggatcaacaagatcagaagaagacttgtgaaagacagcaacaccaagaaggccggcaagacaggccccatgaaaaccctgctggttagagtgatgacacccgatctgagagagcggctggaaaacctgagaaagaagcctgaaaatatcccccagcccatcagcaatacatctagagccaacctgaataagctgctgaccgattacaccgaaatgaagaaggcgatcctgcatgtgtactgggaagagttccagaaggaccctgtgggcctgatgagccgggtggcccagcctgccagcaagaagatcgatcagaacaagctgaaacctgagatggacgagaagggcaacctgaccaccgccggctttgcctgctctcagtgtggccagcccctgttcgtgtacaagctggagcaggtgtctgagaagggcaaggcttacaccaactacttcggacggtgcaatgtggccgagcacgaaaagctgatcctgctggcccagctgaagcccgagaaggatagcgacgaagccgtgacatatagcctgggaaagtttgggcagagggccctggatttctacagcattcatgtgaccaaggagtccacccaccccgtgaagcccctggcccagatcgccggaaacagatacgcctccggacctgtgggaaaggccctgagcgacgcatgtatgggcacaatcgcctccttcctgtctaagtaccaggacatcatcatcgaacaccagaaggtggtgaagggcaaccagaagagactggagagcctgcgggagctggccggcaaggaaaacctggaataccctagcgtgaccctgccacctcagcctcacaccaaggagggcgttgatgcctacaacgaagtgatcgcccgggtgcgaatgtgggtgaacctgaacctgtggcagaagctgaagctaagcagagatgatgccaagcctctgctgagactgaagggattcccttcctttcctctggtcgagagacaggccaacgaagtggactggtgggacatggtgtgtaacgtgaagaagctgatcaacgagaaaaaggaggatggcaaggtgttttggcagaatctggctggctacaagagacaggaagccctgagaccatacctgagcagcgaggaagatcggaagaagggaaagaaattcgctcggtaccagctgggcgacctgctgctgcacctggaaaagaagcacggcgaggactggggaaaggtgtacgacgaggcctgggagcggattgacaagaaagtggaaggcctgagcaagcacatcaagctggaagaggaacggagaagcgaggacgcccagagcaaggccgccctgaccgactggctgcgggctaaggccagcttcgtgatcgagggcctgaaggaggccgacaaggacgagttctgcagatgcgagctgaagctgcagaagtggtacggggacctgcggggaaagcccttcgccatcgaagccgagaacagcatcctggacatcagcggcttcagcaagcagtacaactgtgccttcatctggcagaaggacggcgtgaagaagctgaacctgtacctgatcatcaactacttcaagggcggcaagctgcggttcaagaagatcaaacctgaagccttcgaagccaacagattctacaccgtgatcaacaaaaagagcggcgagatcgtgcccatggaggtgaacttcaacttcgacgaccccaacctgatcatcctgcctctggcctttggcaagagacagggcagagaattcatctggaacgacctgctgtccctggaaaccggcagcctgaagctggccaacggaagagtgatcgagaagacactgtacaacagaagaacccggcaggatgagcctgccctgttcgtggccctgaccttcgagcggcgggaggtcctggactcctccaatatcaaaccaatgaacctgatcggcgtggcaagaggcgaaaacatccccgccgtgatcgccctgaccgaccccgagggctgcccactgagccggtttaaggatagcctgggaaacccaacccacatcctgagaatcggcgagagctataaggagaagcagcggaccatccaggccaagaaggaggtggagcagcggagagccggcggctacagccggaagtacgccagcaaagccaagaatctggcagacgatatggtgagaaacaccgctagagatctgctgtactacgccgtgacccaggatgccatgctgatcttcgccaacctgagccggggcttcggccggcagggcaagcggaccttcatggccgagagacagtacacacggatggaggactggctgaccgccaagctggcctacgagggcctgagcaagacctacctgtccaagacactggcccagtacacctccaagacatgcagcaactgtgggtttaccatcaccagcgccgactacgacagggtgctggagaagctgaagaagacagcaacaggctggatgaccacaattaacggcaaggagctgaaggtggagggccagattacctactacaacagatacaagagacagaacgtagtcaaggacctgtccgtcgagctggatagactgagcgaagaatctgtgaacaacgacatctcctcctggacaaagggcagaagcggagaagctctgagcctcctgaagaaaagattctcccatagacccgtgcaggagaagttcgtgtgcctgaactgcggcttcgagacacacgcagccgagcaagccgccctgaacatcgccagatcctggctgttcctgcggagccaggagtacaagaaataccagacaaacaagacaaccggcaacaccgataagagagccttcgtcgagacctggcagtccttttaccggaagaagcttaaggaggtgtggaaacctgccgtgcggtctggcggatctggcggaggctccaccagccccaagaaaaagagaaaagtctaagctgccttctgcggggcttgccttctggccatgcccttcttctctcccttgcacctgtacctcttggtctttgaataaagcctgagtaggaaggctagcaaaaaaaaaaaaaaaaaaaaaaaaaaaaaaaaaaaaaaaaaaaaaaaaaaaaaaaaaaaaaaaaaaaaaaaaaaaaaaaagcccagccggctccccaacctctaccgaggagggcacctctgagtccgccacccccgagagcggccctggcacctccaccgagcccagcgagggcagcgcacccggcagccctgccggcagccccacctccacagaggagggaaccagcaccgagcccagcgaaggcagcgccccaggcaccagcaccgagcctagtgagcaggagattaaacggatcaacaagatcagaagaagacttgtgaaagacagcaacaccaagaaggccggcaagacaggccccatgaaaaccctgctggttagagtgatgacacccgatctgagagagcggctggaaaacctgagaaagaagcctgaaaatatcccccagcccatcagcaatacatctagagccaacctgaataagctgctgaccgattacaccgaaatgaagaaggcgatcctgcatgtgtactgggaagagttccagaaggaccctgtgggcctgatgagccgggtggcccagcctgccagcaagaagatcgatcagaacaagctgaaacctgagatggacgagaagggcaacctgaccaccgccggctttgcctgctctcagtgtggccagcccctgttcgtgtacaagctggagcaggtgtctgagaagggcaaggcttacaccaactacttcggacggtgcaatgtggccgagcacgaaaagctgatcctgctggcccagctgaagcccgagaaggatagcgacgaagccgtgacatatagcctgggaaagtttgggcagagggccctggatttctacagcattcatgtgaccaaggagtccacccaccccgtgaagcccctggcccagatcgccggaaacagatacgcctccggacctgtgggaaaggccctgagcgacgcatgtatgggcacaatcgcctccttcctgtctaagtaccaggacatcatcatcgaacaccagaaggtggtgaagggcaaccagaagagactggagagcctgcgggagctggccggcaaggaaaacctggaataccctagcgtgaccctgccacctcagcctcacaccaaggagggcgttgatgcctacaacgaagtgatcgcccgggtgcgaatgtgggtgaacctgaacctgtggcagaagctgaagctaagcagagatgatgccaagcctctgctgagactgaagggattcccttcctttcctctggtcgagagacaggccaacgaagtggactggtgggacatggtgtgtaacgtgaagaagctgatcaacgagaaaaaggaggatggcaaggtgttttggcagaatctggctggctacaagagacaggaagccctgagaccatacctgagcagcgaggaagatcggaagaagggaaagaaattcgctcggtaccagctgggcgacctgctgctgcacctggaaaagaagcacggcgaggactggggaaaggtgtacgacgaggcctgggagcggattgacaagaaagtggaaggcctgagcaagcacatcaagctggaagaggaacggagaagcgaggacgcccagagcaaggccgccctgaccgactggctgcgggctaaggccagcttcgtgatcgagggcctgaaggaggccgacaaggacgagttctgcagatgcgagctgaagctgcagaagtggtacggggacctgcggggaaagcccttcgccatcgaagccgagaacagcatcctggacatcagcggcttcagcaagcagtacaactgtgccttcatctggcagaaggacggcgtgaagaagctgaacctgtacctgatcatcaactacttcaagggcggcaagctgcggttcaagaagatcaaacctgaagccttcgaagccaacagattctacaccgtgatcaacaaaaagagcggcgagatcgtgcccatggaggtgaacttcaacttcgacgaccccaacctgatcatcctgcctctggcctttggcaagagacagggcagagaattcatctggaacgacctgctgtccctggaaaccggcagcctgaagctggccaacggaagagtgatcgagaagacactgtacaacagaagaacccggcaggatgagcctgccctgttcgtggccctgaccttcgagcggcgggaggtcctggactcctccaatatcaaaccaatgaacctgatcggcgtggcaagaggcgaaaacatccccgccgtgatcgccctgaccgaccccgagggctgcccactgagccggtttaaggatagcctgggaaacccaacccacatcctgagaatcggcgagagctataaggagaagcagcggaccatccaggccaagaaggaggtggagcagcggagagccggcggctacagccggaagtacgccagcaaagccaagaatctggcagacgatatggtgagaaacaccgctagagatctgctgtactacgccgtgacccaggatgccatgctgatcttcgccaacctgagccggggcttcggccggcagggcaagcggaccttcatggccgagagacagtacacacggatggaggactggctgaccgccaagctggcctacgagggcctgagcaagacctacctgtccaagacactggcccagtacacctccaagacatgcagcaactgtgggtttaccatcaccagcgccgactacgacagggtgctggagaagctgaagaagacagcaacaggctggatgaccacaattaacggcaaggagctgaaggtggagggccagattacctactacaacagatacaagagacagaacgtagtcaaggacctgtccgtcgagctggatagactgagcgaagaatctgtgaacaacgacatctcctcctggacaaagggcagaagcggagaagctctgagcctcctgaagaaaagattctcccatagacccgtgcaggagaagttcgtgtgcctgaactgcggcttcgagacacacgcagccgagcaagccgccctgaacatcgccagatcctggctgttcctgcggagccaggagtacaagaaataccagacaaacaagacaaccggcaacaccgataagagagccttcgtcgagacctggcagtccttttaccggaagaagcttaaggaggtgtggaaacctgccgtgcggtctggcggatctggcggaggctccaccagccccaagaaaaagagaaaagtctaagctgccttctgcggggcttgccttctggccatgcccttcttctctcccttgcacctgtacctcttggtctttgaataaagcctgagtaggaaggctagcaaaaaaaaaaaaaaaaaaaaaaaaaaaaaaaaaaaaaaaaaaaaaaaaaaaaaaaaaaaaaaaaaaaaaaaaaaaaaaaa

SEQ ID NO: 8978 - RNA, 8787 nt, synthetic construct
  source 1..8787: mol_type = other RNA
aggaaataagagagaaaagaagagtaagaagaaatataagagccaccatggcccctaagaagaagcgtaaagtgagccggatgaaccacgaccaggagttcgacccccctaaggtgtaccctcccgtccccgccgagaagagaaagcccatccgggtcctgagcctgttcgatggcatcgccaccggtctgctggtgctgaaggacctgggcatccaggtggataggtacattgcctccgaggtgtgcgaggactccatcaccgtgggaatggtgcgtcatcagggcaagatcatgtacgtgggcgacgtgcggagcgtgacacagaagcatatccaggagtggggccctttcgacctggtgatcggcggcagcccttgcaatgacctgagcatcgtgaacccagcccggaagggcctgtacgagggaaccggcagactgttcttcgagttttacagactgctgcacgacgcccggcctaaggaaggcgacgaccggcccttcttttggctgttcgagaatgtggtggccatgggagtcagcgacaagcgggatattagccggttcctggagagcaaccccgtgatgatcgatgccaaggaagtgagcgccgcccaccgggccagatacttctggggcaatctgcctggcatgaacagacccctggccagcaccgtgaacgacaagctggagctgcaggagtgcctggagcacggccggatcgccaagttcagcaaggtgagaaccatcaccacccgaagcaacagcatcaaacaaggcaaggaccagcactttcctgtgttcatgaacgagaaggaggacatcctgtggtgtaccgagatggagagagtgttcgggttcccagtccactacacagatgtcagcaacatgtctagactggccagacagagactgctgggaagaagctggtccgtccctgtgatcagacacctgttcgcccctctgaaggagtacttcgcctgcgtgagcagcggcaacagcaacgccaacagccggggccccagcttctctagcggcctggtgccactgtccctgagagggagccacatgggccccatggagatctacaaaaccgtgagcgcctggaagcggcagcctgtgcgcgtgctgagcctgtttcggaatatcgataaagtcctgaaaagcctgggattcctggagagcggctctggctccggcggtggcaccctgaagtacgtggaggatgtgacaaacgtggtcagacgggatgtggagaagtggggccccttcgatctggtgtacggcagcacccaacccctgggcagctcttgtgaccggtgccctggctggtacatgtttcagttccaccggatcctgcagtacgccctgccgagacaggagtcccagcggccattcttttggattttcatggacaacttgctgctgaccgaggatgaccaggaaactaccactcggttcctgcagaccgaagccgtgaccctgcaggacgtgagaggccgggactaccagaacgccatgcgggtgtggtccaacatccctggactgaaaagcaagcacgcacctctgacccctaaagaagaggagtacctgcaggcccaggtgcggagcagaagcaagctggacgcccctaaggtggatctgctggtgaagaattgcctcctgcccctgagagagtacttcaagtatttcagccagaatagtctgcccctgggaggcagcggcggcggcttccagaacagcctgacctacgacgacgtgcacatcaacttcacctgcgaggagtgggccctgctggacgccagccagaagaggctgtacaaggacgtgatgctggagacctacagcaacctgaccgccatcggctacaagtgggaggaccacaacatcgaggagcactgccagaggttcaggaggaggggcaggcacaagaggagcaggaccgaggagaggccctacgagtgcaagcagtgcggcggcccaagcagcggcgcccctcctcccagcggcggcaggcggcccaagcagcggcgcccctcctcccagcggcggcagcccagccggctccccaacctctaccgaggagggcacctctgagtccgccacccccgagagcggccctggcacctccaccgagcccagcgagggcagcgcacccggcagccctgccggcagccccacctccacagaggagggaaccagcaccgagcccagcgaaggcagcgccccaggcaccagcaccgagcctagtgagcaggagattaaacggatcaacaagatcagaagaagacttgtgaaagacagcaacaccaagaaggccggcaagacaggccccatgaaaaccctgctggttagagtgatgacacccgatctgagagagcggctggaaaacctgagaaagaagcctgaaaatatcccccagcccatcagcaatacatctagagccaacctgaataagctgctgaccgattacaccgaaatgaagaaggcgatcctgcatgtgtactgggaagagttccagaaggaccctgtgggcctgatgagccgggtggcccagcctgccagcaagaagatcgatcagaacaagctgaaacctgagatggacgagaagggcaacctgaccaccgccggctttgcctgctctcagtgtggccagcccctgttcgtgtacaagctggagcaggtgtctgagaagggcaaggcttacaccaactacttcggacggtgcaatgtggccgagcacgaaaagctgatcctgctggcccagctgaagcccgagaaggatagcgacgaagccgtgacatatagcctgggaaagtttgggcagagggccctggatttctacagcattcatgtgaccaaggagtccacccaccccgtgaagcccctggcccagatcgccggaaacagatacgcctccggacctgtgggaaaggccctgagcgacgcatgtatgggcacaatcgcctccttcctgtctaagtaccaggacatcatcatcgaacaccagaaggtggtgaagggcaaccagaagagactggagagcctgcgggagctggccggcaaggaaaacctggaataccctagcgtgaccctgccacctcagcctcacaccaaggagggcgttgatgcctacaacgaagtgatcgcccgggtgcgaatgtgggtgaacctgaacctgtggcagaagctgaagctaagcagagatgatgccaagcctctgctgagactgaagggattcccttcctttcctctggtcgagagacaggccaacgaagtggactggtgggacatggtgtgtaacgtgaagaagctgatcaacgagaaaaaggaggatggcaaggtgttttggcagaatctggctggctacaagagacaggaagccctgagaccatacctgagcagcgaggaagatcggaagaagggaaagaaattcgctcggtaccagctgggcgacctgctgctgcacctggaaaagaagcacggcgaggactggggaaaggtgtacgacgaggcctgggagcggattgacaagaaagtggaaggcctgagcaagcacatcaagctggaagaggaacggagaagcgaggacgcccagagcaaggccgccctgaccgactggctgcgggctaaggccagcttcgtgatcgagggcctgaaggaggccgacaaggacgagttctgcagatgcgagctgaagctgcagaagtggtacggggacctgcggggaaagcccttcgccatcgaagccgagaacagcatcctggacatcagcggcttcagcaagcagtacaactgtgccttcatctggcagaaggacggcgtgaagaagctgaacctgtacctgatcatcaactacttcaagggcggcaagctgcggttcaagaagatcaaacctgaagccttcgaagccaacagattctacaccgtgatcaacaaaaagagcggcgagatcgtgcccatggaggtgaacttcaacttcgacgaccccaacctgatcatcctgcctctggcctttggcaagagacagggcagagaattcatctggaacgacctgctgtccctggaaaccggcagcctgaagctggccaacggaagagtgatcgagaagacactgtacaacagaagaacccggcaggatgagcctgccctgttcgtggccctgaccttcgagcggcgggaggtcctggactcctccaatatcaaaccaatgaacctgatcggcgtggcaagaggcgaaaacatccccgccgtgatcgccctgaccgaccccgagggctgcccactgagccggtttaaggatagcctgggaaacccaacccacatcctgagaatcggcgagagctataaggagaagcagcggaccatccaggccaagaaggaggtggagcagcggagagccggcggctacagccggaagtacgccagcaaagccaagaatctggcagacgatatggtgagaaacaccgctagagatctgctgtactacgccgtgacccaggatgccatgctgatcttcgccaacctgagccggggcttcggccggcagggcaagcggaccttcatggccgagagacagtacacacggatggaggactggctgaccgccaagctggcctacgagggcctgagcaagacctacctgtccaagacactggcccagtacacctccaagacatgcagcaactgtgggtttaccatcaccagcgccgactacgacagggtgctggagaagctgaagaagacagcaacaggctggatgaccacaattaacggcaaggagctgaaggtggagggccagattacctactacaacagatacaagagacagaacgtagtcaaggacctgtccgtcgagctggatagactgagcgaagaatctgtgaacaacgacatctcctcctggacaaagggcagaagcggagaagctctgagcctcctgaagaaaagattctcccatagacccgtgcaggagaagttcgtgtgcctgaactgcggcttcgagacacacgcagccgagcaagccgccctgaacatcgccagatcctggctgttcctgcggagccaggagtacaagaaataccagacaaacaagacaaccggcaacaccgataagagagccttcgtcgagacctggcagtccttttaccggaagaagcttaaggaggtgtggaaacctgccgtgcggtctggcggatctggcggaggctccaccagccccaagaaaaagagaaaagtctaagctgccttctgcggggcttgccttctggccatgcccttcttctctcccttgcacctgtacctcttggtctttgaataaagcctgagtaggaaggctagcaaaaaaaaaaaaaaaaaaaaaaaaaaaaaaaaaaaaaaaaaaaaaaaaaaaaaaaaaaaaaaaaaaaaaaaaaaaaaaaagcccagccggctccccaacctctaccgaggagggcacctctgagtccgccacccccgagagcggccctggcacctccaccgagcccagcgagggcagcgcacccggcagccctgccggcagccccacctccacagaggagggaaccagcaccgagcccagcgaaggcagcgccccaggcaccagcaccgagcctagtgagcaggagattaaacggatcaacaagatcagaagaagacttgtgaaagacagcaacaccaagaaggccggcaagacaggccccatgaaaaccctgctggttagagtgatgacacccgatctgagagagcggctggaaaacctgagaaagaagcctgaaaatatcccccagcccatcagcaatacatctagagccaacctgaataagctgctgaccgattacaccgaaatgaagaaggcgatcctgcatgtgtactgggaagagttccagaaggaccctgtgggcctgatgagccgggtggcccagcctgccagcaagaagatcgatcagaacaagctgaaacctgagatggacgagaagggcaacctgaccaccgccggctttgcctgctctcagtgtggccagcccctgttcgtgtacaagctggagcaggtgtctgagaagggcaaggcttacaccaactacttcggacggtgcaatgtggccgagcacgaaaagctgatcctgctggcccagctgaagcccgagaaggatagcgacgaagccgtgacatatagcctgggaaagtttgggcagagggccctggatttctacagcattcatgtgaccaaggagtccacccaccccgtgaagcccctggcccagatcgccggaaacagatacgcctccggacctgtgggaaaggccctgagcgacgcatgtatgggcacaatcgcctccttcctgtctaagtaccaggacatcatcatcgaacaccagaaggtggtgaagggcaaccagaagagactggagagcctgcgggagctggccggcaaggaaaacctggaataccctagcgtgaccctgccacctcagcctcacaccaaggagggcgttgatgcctacaacgaagtgatcgcccgggtgcgaatgtgggtgaacctgaacctgtggcagaagctgaagctaagcagagatgatgccaagcctctgctgagactgaagggattcccttcctttcctctggtcgagagacaggccaacgaagtggactggtgggacatggtgtgtaacgtgaagaagctgatcaacgagaaaaaggaggatggcaaggtgttttggcagaatctggctggctacaagagacaggaagccctgagaccatacctgagcagcgaggaagatcggaagaagggaaagaaattcgctcggtaccagctgggcgacctgctgctgcacctggaaaagaagcacggcgaggactggggaaaggtgtacgacgaggcctgggagcggattgacaagaaagtggaaggcctgagcaagcacatcaagctggaagaggaacggagaagcgaggacgcccagagcaaggccgccctgaccgactggctgcgggctaaggccagcttcgtgatcgagggcctgaaggaggccgacaaggacgagttctgcagatgcgagctgaagctgcagaagtggtacggggacctgcggggaaagcccttcgccatcgaagccgagaacagcatcctggacatcagcggcttcagcaagcagtacaactgtgccttcatctggcagaaggacggcgtgaagaagctgaacctgtacctgatcatcaactacttcaagggcggcaagctgcggttcaagaagatcaaacctgaagccttcgaagccaacagattctacaccgtgatcaacaaaaagagcggcgagatcgtgcccatggaggtgaacttcaacttcgacgaccccaacctgatcatcctgcctctggcctttggcaagagacagggcagagaattcatctggaacgacctgctgtccctggaaaccggcagcctgaagctggccaacggaagagtgatcgagaagacactgtacaacagaagaacccggcaggatgagcctgccctgttcgtggccctgaccttcgagcggcgggaggtcctggactcctccaatatcaaaccaatgaacctgatcggcgtggcaagaggcgaaaacatccccgccgtgatcgccctgaccgaccccgagggctgcccactgagccggtttaaggatagcctgggaaacccaacccacatcctgagaatcggcgagagctataaggagaagcagcggaccatccaggccaagaaggaggtggagcagcggagagccggcggctacagccggaagtacgccagcaaagccaagaatctggcagacgatatggtgagaaacaccgctagagatctgctgtactacgccgtgacccaggatgccatgctgatcttcgccaacctgagccggggcttcggccggcagggcaagcggaccttcatggccgagagacagtacacacggatggaggactggctgaccgccaagctggcctacgagggcctgagcaagacctacctgtccaagacactggcccagtacacctccaagacatgcagcaactgtgggtttaccatcaccagcgccgactacgacagggtgctggagaagctgaagaagacagcaacaggctggatgaccacaattaacggcaaggagctgaaggtggagggccagattacctactacaacagatacaagagacagaacgtagtcaaggacctgtccgtcgagctggatagactgagcgaagaatctgtgaacaacgacatctcctcctggacaaagggcagaagcggagaagctctgagcctcctgaagaaaagattctcccatagacccgtgcaggagaagttcgtgtgcctgaactgcggcttcgagacacacgcagccgagcaagccgccctgaacatcgccagatcctggctgttcctgcggagccaggagtacaagaaataccagacaaacaagacaaccggcaacaccgataagagagccttcgtcgagacctggcagtccttttaccggaagaagcttaaggaggtgtggaaacctgccgtgcggtctggcggatctggcggaggctccaccagccccaagaaaaagagaaaagtctaagctgccttctgcggggcttgccttctggccatgcccttcttctctcccttgcacctgtacctcttggtctttgaataaagcctgagtaggaaggctagcaaaaaaaaaaaaaaaaaaaaaaaaaaaaaaaaaaaaaaaaaaaaaaaaaaaaaaaaaaaaaaaaaaaaaaaaaaaaaaaa

SEQ ID NO: 8979 - RNA, 8787 nt, synthetic construct
  source 1..8787: mol_type = other RNA
aggaaataagagagaaaagaagagtaagaagaaatataagagccaccatggcccctaagaagaagcgtaaagtgagccggatgaaccacgaccaggagttcgacccccctaaggtgtaccctcccgtccccgccgagaagagaaagcccatccgggtcctgagcctgttcgatggcatcgccaccggtctgctggtgctgaaggacctgggcatccaggtggataggtacattgcctccgaggtgtgcgaggactccatcaccgtgggaatggtgcgtcatcagggcaagatcatgtacgtgggcgacgtgcggagcgtgacacagaagcatatccaggagtggggccctttcgacctggtgatcggcggcagcccttgcaatgacctgagcatcgtgaacccagcccggaagggcctgtacgagggaaccggcagactgttcttcgagttttacagactgctgcacgacgcccggcctaaggaaggcgacgaccggcccttcttttggctgttcgagaatgtggtggccatgggagtcagcgacaagcgggatattagccggttcctggagagcaaccccgtgatgatcgatgccaaggaagtgagcgccgcccaccgggccagatacttctggggcaatctgcctggcatgaacagacccctggccagcaccgtgaacgacaagctggagctgcaggagtgcctggagcacggccggatcgccaagttcagcaaggtgagaaccatcaccacccgaagcaacagcatcaaacaaggcaaggaccagcactttcctgtgttcatgaacgagaaggaggacatcctgtggtgtaccgagatggagagagtgttcgggttcccagtccactacacagatgtcagcaacatgtctagactggccagacagagactgctgggaagaagctggtccgtccctgtgatcagacacctgttcgcccctctgaaggagtacttcgcctgcgtgagcagcggcaacagcaacgccaacagccggggccccagcttctctagcggcctggtgccactgtccctgagagggagccacatgggccccatggagatctacaaaaccgtgagcgcctggaagcggcagcctgtgcgcgtgctgagcctgtttcggaatatcgataaagtcctgaaaagcctgggattcctggagagcggctctggctccggcggtggcaccctgaagtacgtggaggatgtgacaaacgtggtcagacgggatgtggagaagtggggccccttcgatctggtgtacggcagcacccaacccctgggcagctcttgtgaccggtgccctggctggtacatgtttcagttccaccggatcctgcagtacgccctgccgagacaggagtcccagcggccattcttttggattttcatggacaacttgctgctgaccgaggatgaccaggaaactaccactcggttcctgcagaccgaagccgtgaccctgcaggacgtgagaggccgggactaccagaacgccatgcgggtgtggtccaacatccctggactgaaaagcaagcacgcacctctgacccctaaagaagaggagtacctgcaggcccaggtgcggagcagaagcaagctggacgcccctaaggtggatctgctggtgaagaattgcctcctgcccctgagagagtacttcaagtatttcagccagaatagtctgcccctgggaggcagcggcggcggcagcaaggcccccatcaccttcggcgacctggccatctacttcagccaggaggagtgggagtggctgagccccatccagaaggacctgtacgaggacgtgatgctggagaactacaggaacctggtgagcctgggcctgagcttcaggaggcccaacgtgatcaccctgctggagaagggcaaggccccctggatggtggagcccgtgaggaggaggagggcccccgagctggtgaccgtggccggcggcccaagcagcggcgcccctcctcccagcggcggcaggcggcccaagcagcggcgcccctcctcccagcggcggcagcccagccggctccccaacctctaccgaggagggcacctctgagtccgccacccccgagagcggccctggcacctccaccgagcccagcgagggcagcgcacccggcagccctgccggcagccccacctccacagaggagggaaccagcaccgagcccagcgaaggcagcgccccaggcaccagcaccgagcctagtgagcaggagattaaacggatcaacaagatcagaagaagacttgtgaaagacagcaacaccaagaaggccggcaagacaggccccatgaaaaccctgctggttagagtgatgacacccgatctgagagagcggctggaaaacctgagaaagaagcctgaaaatatcccccagcccatcagcaatacatctagagccaacctgaataagctgctgaccgattacaccgaaatgaagaaggcgatcctgcatgtgtactgggaagagttccagaaggaccctgtgggcctgatgagccgggtggcccagcctgccagcaagaagatcgatcagaacaagctgaaacctgagatggacgagaagggcaacctgaccaccgccggctttgcctgctctcagtgtggccagcccctgttcgtgtacaagctggagcaggtgtctgagaagggcaaggcttacaccaactacttcggacggtgcaatgtggccgagcacgaaaagctgatcctgctggcccagctgaagcccgagaaggatagcgacgaagccgtgacatatagcctgggaaagtttgggcagagggccctggatttctacagcattcatgtgaccaaggagtccacccaccccgtgaagcccctggcccagatcgccggaaacagatacgcctccggacctgtgggaaaggccctgagcgacgcatgtatgggcacaatcgcctccttcctgtctaagtaccaggacatcatcatcgaacaccagaaggtggtgaagggcaaccagaagagactggagagcctgcgggagctggccggcaaggaaaacctggaataccctagcgtgaccctgccacctcagcctcacaccaaggagggcgttgatgcctacaacgaagtgatcgcccgggtgcgaatgtgggtgaacctgaacctgtggcagaagctgaagctaagcagagatgatgccaagcctctgctgagactgaagggattcccttcctttcctctggtcgagagacaggccaacgaagtggactggtgggacatggtgtgtaacgtgaagaagctgatcaacgagaaaaaggaggatggcaaggtgttttggcagaatctggctggctacaagagacaggaagccctgagaccatacctgagcagcgaggaagatcggaagaagggaaagaaattcgctcggtaccagctgggcgacctgctgctgcacctggaaaagaagcacggcgaggactggggaaaggtgtacgacgaggcctgggagcggattgacaagaaagtggaaggcctgagcaagcacatcaagctggaagaggaacggagaagcgaggacgcccagagcaaggccgccctgaccgactggctgcgggctaaggccagcttcgtgatcgagggcctgaaggaggccgacaaggacgagttctgcagatgcgagctgaagctgcagaagtggtacggggacctgcggggaaagcccttcgccatcgaagccgagaacagcatcctggacatcagcggcttcagcaagcagtacaactgtgccttcatctggcagaaggacggcgtgaagaagctgaacctgtacctgatcatcaactacttcaagggcggcaagctgcggttcaagaagatcaaacctgaagccttcgaagccaacagattctacaccgtgatcaacaaaaagagcggcgagatcgtgcccatggaggtgaacttcaacttcgacgaccccaacctgatcatcctgcctctggcctttggcaagagacagggcagagaattcatctggaacgacctgctgtccctggaaaccggcagcctgaagctggccaacggaagagtgatcgagaagacactgtacaacagaagaacccggcaggatgagcctgccctgttcgtggccctgaccttcgagcggcgggaggtcctggactcctccaatatcaaaccaatgaacctgatcggcgtggcaagaggcgaaaacatccccgccgtgatcgccctgaccgaccccgagggctgcccactgagccggtttaaggatagcctgggaaacccaacccacatcctgagaatcggcgagagctataaggagaagcagcggaccatccaggccaagaaggaggtggagcagcggagagccggcggctacagccggaagtacgccagcaaagccaagaatctggcagacgatatggtgagaaacaccgctagagatctgctgtactacgccgtgacccaggatgccatgctgatcttcgccaacctgagccggggcttcggccggcagggcaagcggaccttcatggccgagagacagtacacacggatggaggactggctgaccgccaagctggcctacgagggcctgagcaagacctacctgtccaagacactggcccagtacacctccaagacatgcagcaactgtgggtttaccatcaccagcgccgactacgacagggtgctggagaagctgaagaagacagcaacaggctggatgaccacaattaacggcaaggagctgaaggtggagggccagattacctactacaacagatacaagagacagaacgtagtcaaggacctgtccgtcgagctggatagactgagcgaagaatctgtgaacaacgacatctcctcctggacaaagggcagaagcggagaagctctgagcctcctgaagaaaagattctcccatagacccgtgcaggagaagttcgtgtgcctgaactgcggcttcgagacacacgcagccgagcaagccgccctgaacatcgccagatcctggctgttcctgcggagccaggagtacaagaaataccagacaaacaagacaaccggcaacaccgataagagagccttcgtcgagacctggcagtccttttaccggaagaagcttaaggaggtgtggaaacctgccgtgcggtctggcggatctggcggaggctccaccagccccaagaaaaagagaaaagtctaagctgccttctgcggggcttgccttctggccatgcccttcttctctcccttgcacctgtacctcttggtctttgaataaagcctgagtaggaaggctagcaaaaaaaaaaaaaaaaaaaaaaaaaaaaaaaaaaaaaaaaaaaaaaaaaaaaaaaaaaaaaaaaaaaaaaaaaaaaaaaagcccagccggctccccaacctctaccgaggagggcacctctgagtccgccacccccgagagcggccctggcacctccaccgagcccagcgagggcagcgcacccggcagccctgccggcagccccacctccacagaggagggaaccagcaccgagcccagcgaaggcagcgccccaggcaccagcaccgagcctagtgagcaggagattaaacggatcaacaagatcagaagaagacttgtgaaagacagcaacaccaagaaggccggcaagacaggccccatgaaaaccctgctggttagagtgatgacacccgatctgagagagcggctggaaaacctgagaaagaagcctgaaaatatcccccagcccatcagcaatacatctagagccaacctgaataagctgctgaccgattacaccgaaatgaagaaggcgatcctgcatgtgtactgggaagagttccagaaggaccctgtgggcctgatgagccgggtggcccagcctgccagcaagaagatcgatcagaacaagctgaaacctgagatggacgagaagggcaacctgaccaccgccggctttgcctgctctcagtgtggccagcccctgttcgtgtacaagctggagcaggtgtctgagaagggcaaggcttacaccaactacttcggacggtgcaatgtggccgagcacgaaaagctgatcctgctggcccagctgaagcccgagaaggatagcgacgaagccgtgacatatagcctgggaaagtttgggcagagggccctggatttctacagcattcatgtgaccaaggagtccacccaccccgtgaagcccctggcccagatcgccggaaacagatacgcctccggacctgtgggaaaggccctgagcgacgcatgtatgggcacaatcgcctccttcctgtctaagtaccaggacatcatcatcgaacaccagaaggtggtgaagggcaaccagaagagactggagagcctgcgggagctggccggcaaggaaaacctggaataccctagcgtgaccctgccacctcagcctcacaccaaggagggcgttgatgcctacaacgaagtgatcgcccgggtgcgaatgtgggtgaacctgaacctgtggcagaagctgaagctaagcagagatgatgccaagcctctgctgagactgaagggattcccttcctttcctctggtcgagagacaggccaacgaagtggactggtgggacatggtgtgtaacgtgaagaagctgatcaacgagaaaaaggaggatggcaaggtgttttggcagaatctggctggctacaagagacaggaagccctgagaccatacctgagcagcgaggaagatcggaagaagggaaagaaattcgctcggtaccagctgggcgacctgctgctgcacctggaaaagaagcacggcgaggactggggaaaggtgtacgacgaggcctgggagcggattgacaagaaagtggaaggcctgagcaagcacatcaagctggaagaggaacggagaagcgaggacgcccagagcaaggccgccctgaccgactggctgcgggctaaggccagcttcgtgatcgagggcctgaaggaggccgacaaggacgagttctgcagatgcgagctgaagctgcagaagtggtacggggacctgcggggaaagcccttcgccatcgaagccgagaacagcatcctggacatcagcggcttcagcaagcagtacaactgtgccttcatctggcagaaggacggcgtgaagaagctgaacctgtacctgatcatcaactacttcaagggcggcaagctgcggttcaagaagatcaaacctgaagccttcgaagccaacagattctacaccgtgatcaacaaaaagagcggcgagatcgtgcccatggaggtgaacttcaacttcgacgaccccaacctgatcatcctgcctctggcctttggcaagagacagggcagagaattcatctggaacgacctgctgtccctggaaaccggcagcctgaagctggccaacggaagagtgatcgagaagacactgtacaacagaagaacccggcaggatgagcctgccctgttcgtggccctgaccttcgagcggcgggaggtcctggactcctccaatatcaaaccaatgaacctgatcggcgtggcaagaggcgaaaacatccccgccgtgatcgccctgaccgaccccgagggctgcccactgagccggtttaaggatagcctgggaaacccaacccacatcctgagaatcggcgagagctataaggagaagcagcggaccatccaggccaagaaggaggtggagcagcggagagccggcggctacagccggaagtacgccagcaaagccaagaatctggcagacgatatggtgagaaacaccgctagagatctgctgtactacgccgtgacccaggatgccatgctgatcttcgccaacctgagccggggcttcggccggcagggcaagcggaccttcatggccgagagacagtacacacggatggaggactggctgaccgccaagctggcctacgagggcctgagcaagacctacctgtccaagacactggcccagtacacctccaagacatgcagcaactgtgggtttaccatcaccagcgccgactacgacagggtgctggagaagctgaagaagacagcaacaggctggatgaccacaattaacggcaaggagctgaaggtggagggccagattacctactacaacagatacaagagacagaacgtagtcaaggacctgtccgtcgagctggatagactgagcgaagaatctgtgaacaacgacatctcctcctggacaaagggcagaagcggagaagctctgagcctcctgaagaaaagattctcccatagacccgtgcaggagaagttcgtgtgcctgaactgcggcttcgagacacacgcagccgagcaagccgccctgaacatcgccagatcctggctgttcctgcggagccaggagtacaagaaataccagacaaacaagacaaccggcaacaccgataagagagccttcgtcgagacctggcagtccttttaccggaagaagcttaaggaggtgtggaaacctgccgtgcggtctggcggatctggcggaggctccaccagccccaagaaaaagagaaaagtctaagctgccttctgcggggcttgccttctggccatgcccttcttctctcccttgcacctgtacctcttggtctttgaataaagcctgagtaggaaggctagcaaaaaaaaaaaaaaaaaaaaaaaaaaaaaaaaaaaaaaaaaaaaaaaaaaaaaaaaaaaaaaaaaaaaaaaaaaaaaaaa

SEQ ID NO: 8980 - RNA, 8787 nt, synthetic construct
  source 1..8787: mol_type = other RNA
aggaaataagagagaaaagaagagtaagaagaaatataagagccaccatggcccctaagaagaagcgtaaagtgagccggatgaaccacgaccaggagttcgacccccctaaggtgtaccctcccgtccccgccgagaagagaaagcccatccgggtcctgagcctgttcgatggcatcgccaccggtctgctggtgctgaaggacctgggcatccaggtggataggtacattgcctccgaggtgtgcgaggactccatcaccgtgggaatggtgcgtcatcagggcaagatcatgtacgtgggcgacgtgcggagcgtgacacagaagcatatccaggagtggggccctttcgacctggtgatcggcggcagcccttgcaatgacctgagcatcgtgaacccagcccggaagggcctgtacgagggaaccggcagactgttcttcgagttttacagactgctgcacgacgcccggcctaaggaaggcgacgaccggcccttcttttggctgttcgagaatgtggtggccatgggagtcagcgacaagcgggatattagccggttcctggagagcaaccccgtgatgatcgatgccaaggaagtgagcgccgcccaccgggccagatacttctggggcaatctgcctggcatgaacagacccctggccagcaccgtgaacgacaagctggagctgcaggagtgcctggagcacggccggatcgccaagttcagcaaggtgagaaccatcaccacccgaagcaacagcatcaaacaaggcaaggaccagcactttcctgtgttcatgaacgagaaggaggacatcctgtggtgtaccgagatggagagagtgttcgggttcccagtccactacacagatgtcagcaacatgtctagactggccagacagagactgctgggaagaagctggtccgtccctgtgatcagacacctgttcgcccctctgaaggagtacttcgcctgcgtgagcagcggcaacagcaacgccaacagccggggccccagcttctctagcggcctggtgccactgtccctgagagggagccacatgggccccatggagatctacaaaaccgtgagcgcctggaagcggcagcctgtgcgcgtgctgagcctgtttcggaatatcgataaagtcctgaaaagcctgggattcctggagagcggctctggctccggcggtggcaccctgaagtacgtggaggatgtgacaaacgtggtcagacgggatgtggagaagtggggccccttcgatctggtgtacggcagcacccaacccctgggcagctcttgtgaccggtgccctggctggtacatgtttcagttccaccggatcctgcagtacgccctgccgagacaggagtcccagcggccattcttttggattttcatggacaacttgctgctgaccgaggatgaccaggaaactaccactcggttcctgcagaccgaagccgtgaccctgcaggacgtgagaggccgggactaccagaacgccatgcgggtgtggtccaacatccctggactgaaaagcaagcacgcacctctgacccctaaagaagaggagtacctgcaggcccaggtgcggagcagaagcaagctggacgcccctaaggtggatctgctggtgaagaattgcctcctgcccctgagagagtacttcaagtatttcagccagaatagtctgcccctgggaggcagcggcggcggcggcaaccagttcagcttccagagcctgctgaccttcaaggacgtggccatcaacttcagcaaggaggagtgggagtgcctgcacaccagccagaggaacctgtacagggacgtgatgctggagaactacagcaacctggtgagcgtgggcctgagcgagagcaagcccgagctggtgacctgcctggagcagaacaaggagccctggatggtgaacatcgacgaggccgagggcctgggccagggcggcccaagcagcggcgcccctcctcccagcggcggcaggcggcccaagcagcggcgcccctcctcccagcggcggcagcccagccggctccccaacctctaccgaggagggcacctctgagtccgccacccccgagagcggccctggcacctccaccgagcccagcgagggcagcgcacccggcagccctgccggcagccccacctccacagaggagggaaccagcaccgagcccagcgaaggcagcgccccaggcaccagcaccgagcctagtgagcaggagattaaacggatcaacaagatcagaagaagacttgtgaaagacagcaacaccaagaaggccggcaagacaggccccatgaaaaccctgctggttagagtgatgacacccgatctgagagagcggctggaaaacctgagaaagaagcctgaaaatatcccccagcccatcagcaatacatctagagccaacctgaataagctgctgaccgattacaccgaaatgaagaaggcgatcctgcatgtgtactgggaagagttccagaaggaccctgtgggcctgatgagccgggtggcccagcctgccagcaagaagatcgatcagaacaagctgaaacctgagatggacgagaagggcaacctgaccaccgccggctttgcctgctctcagtgtggccagcccctgttcgtgtacaagctggagcaggtgtctgagaagggcaaggcttacaccaactacttcggacggtgcaatgtggccgagcacgaaaagctgatcctgctggcccagctgaagcccgagaaggatagcgacgaagccgtgacatatagcctgggaaagtttgggcagagggccctggatttctacagcattcatgtgaccaaggagtccacccaccccgtgaagcccctggcccagatcgccggaaacagatacgcctccggacctgtgggaaaggccctgagcgacgcatgtatgggcacaatcgcctccttcctgtctaagtaccaggacatcatcatcgaacaccagaaggtggtgaagggcaaccagaagagactggagagcctgcgggagctggccggcaaggaaaacctggaataccctagcgtgaccctgccacctcagcctcacaccaaggagggcgttgatgcctacaacgaagtgatcgcccgggtgcgaatgtgggtgaacctgaacctgtggcagaagctgaagctaagcagagatgatgccaagcctctgctgagactgaagggattcccttcctttcctctggtcgagagacaggccaacgaagtggactggtgggacatggtgtgtaacgtgaagaagctgatcaacgagaaaaaggaggatggcaaggtgttttggcagaatctggctggctacaagagacaggaagccctgagaccatacctgagcagcgaggaagatcggaagaagggaaagaaattcgctcggtaccagctgggcgacctgctgctgcacctggaaaagaagcacggcgaggactggggaaaggtgtacgacgaggcctgggagcggattgacaagaaagtggaaggcctgagcaagcacatcaagctggaagaggaacggagaagcgaggacgcccagagcaaggccgccctgaccgactggctgcgggctaaggccagcttcgtgatcgagggcctgaaggaggccgacaaggacgagttctgcagatgcgagctgaagctgcagaagtggtacggggacctgcggggaaagcccttcgccatcgaagccgagaacagcatcctggacatcagcggcttcagcaagcagtacaactgtgccttcatctggcagaaggacggcgtgaagaagctgaacctgtacctgatcatcaactacttcaagggcggcaagctgcggttcaagaagatcaaacctgaagccttcgaagccaacagattctacaccgtgatcaacaaaaagagcggcgagatcgtgcccatggaggtgaacttcaacttcgacgaccccaacctgatcatcctgcctctggcctttggcaagagacagggcagagaattcatctggaacgacctgctgtccctggaaaccggcagcctgaagctggccaacggaagagtgatcgagaagacactgtacaacagaagaacccggcaggatgagcctgccctgttcgtggccctgaccttcgagcggcgggaggtcctggactcctccaatatcaaaccaatgaacctgatcggcgtggcaagaggcgaaaacatccccgccgtgatcgccctgaccgaccccgagggctgcccactgagccggtttaaggatagcctgggaaacccaacccacatcctgagaatcggcgagagctataaggagaagcagcggaccatccaggccaagaaggaggtggagcagcggagagccggcggctacagccggaagtacgccagcaaagccaagaatctggcagacgatatggtgagaaacaccgctagagatctgctgtactacgccgtgacccaggatgccatgctgatcttcgccaacctgagccggggcttcggccggcagggcaagcggaccttcatggccgagagacagtacacacggatggaggactggctgaccgccaagctggcctacgagggcctgagcaagacctacctgtccaagacactggcccagtacacctccaagacatgcagcaactgtgggtttaccatcaccagcgccgactacgacagggtgctggagaagctgaagaagacagcaacaggctggatgaccacaattaacggcaaggagctgaaggtggagggccagattacctactacaacagatacaagagacagaacgtagtcaaggacctgtccgtcgagctggatagactgagcgaagaatctgtgaacaacgacatctcctcctggacaaagggcagaagcggagaagctctgagcctcctgaagaaaagattctcccatagacccgtgcaggagaagttcgtgtgcctgaactgcggcttcgagacacacgcagccgagcaagccgccctgaacatcgccagatcctggctgttcctgcggagccaggagtacaagaaataccagacaaacaagacaaccggcaacaccgataagagagccttcgtcgagacctggcagtccttttaccggaagaagcttaaggaggtgtggaaacctgccgtgcggtctggcggatctggcggaggctccaccagccccaagaaaaagagaaaagtctaagctgccttctgcggggcttgccttctggccatgcccttcttctctcccttgcacctgtacctcttggtctttgaataaagcctgagtaggaaggctagcaaaaaaaaaaaaaaaaaaaaaaaaaaaaaaaaaaaaaaaaaaaaaaaaaaaaaaaaaaaaaaaaaaaaaaaaaaaaaaaagcccagccggctccccaacctctaccgaggagggcacctctgagtccgccacccccgagagcggccctggcacctccaccgagcccagcgagggcagcgcacccggcagccctgccggcagccccacctccacagaggagggaaccagcaccgagcccagcgaaggcagcgccccaggcaccagcaccgagcctagtgagcaggagattaaacggatcaacaagatcagaagaagacttgtgaaagacagcaacaccaagaaggccggcaagacaggccccatgaaaaccctgctggttagagtgatgacacccgatctgagagagcggctggaaaacctgagaaagaagcctgaaaatatcccccagcccatcagcaatacatctagagccaacctgaataagctgctgaccgattacaccgaaatgaagaaggcgatcctgcatgtgtactgggaagagttccagaaggaccctgtgggcctgatgagccgggtggcccagcctgccagcaagaagatcgatcagaacaagctgaaacctgagatggacgagaagggcaacctgaccaccgccggctttgcctgctctcagtgtggccagcccctgttcgtgtacaagctggagcaggtgtctgagaagggcaaggcttacaccaactacttcggacggtgcaatgtggccgagcacgaaaagctgatcctgctggcccagctgaagcccgagaaggatagcgacgaagccgtgacatatagcctgggaaagtttgggcagagggccctggatttctacagcattcatgtgaccaaggagtccacccaccccgtgaagcccctggcccagatcgccggaaacagatacgcctccggacctgtgggaaaggccctgagcgacgcatgtatgggcacaatcgcctccttcctgtctaagtaccaggacatcatcatcgaacaccagaaggtggtgaagggcaaccagaagagactggagagcctgcgggagctggccggcaaggaaaacctggaataccctagcgtgaccctgccacctcagcctcacaccaaggagggcgttgatgcctacaacgaagtgatcgcccgggtgcgaatgtgggtgaacctgaacctgtggcagaagctgaagctaagcagagatgatgccaagcctctgctgagactgaagggattcccttcctttcctctggtcgagagacaggccaacgaagtggactggtgggacatggtgtgtaacgtgaagaagctgatcaacgagaaaaaggaggatggcaaggtgttttggcagaatctggctggctacaagagacaggaagccctgagaccatacctgagcagcgaggaagatcggaagaagggaaagaaattcgctcggtaccagctgggcgacctgctgctgcacctggaaaagaagcacggcgaggactggggaaaggtgtacgacgaggcctgggagcggattgacaagaaagtggaaggcctgagcaagcacatcaagctggaagaggaacggagaagcgaggacgcccagagcaaggccgccctgaccgactggctgcgggctaaggccagcttcgtgatcgagggcctgaaggaggccgacaaggacgagttctgcagatgcgagctgaagctgcagaagtggtacggggacctgcggggaaagcccttcgccatcgaagccgagaacagcatcctggacatcagcggcttcagcaagcagtacaactgtgccttcatctggcagaaggacggcgtgaagaagctgaacctgtacctgatcatcaactacttcaagggcggcaagctgcggttcaagaagatcaaacctgaagccttcgaagccaacagattctacaccgtgatcaacaaaaagagcggcgagatcgtgcccatggaggtgaacttcaacttcgacgaccccaacctgatcatcctgcctctggcctttggcaagagacagggcagagaattcatctggaacgacctgctgtccctggaaaccggcagcctgaagctggccaacggaagagtgatcgagaagacactgtacaacagaagaacccggcaggatgagcctgccctgttcgtggccctgaccttcgagcggcgggaggtcctggactcctccaatatcaaaccaatgaacctgatcggcgtggcaagaggcgaaaacatccccgccgtgatcgccctgaccgaccccgagggctgcccactgagccggtttaaggatagcctgggaaacccaacccacatcctgagaatcggcgagagctataaggagaagcagcggaccatccaggccaagaaggaggtggagcagcggagagccggcggctacagccggaagtacgccagcaaagccaagaatctggcagacgatatggtgagaaacaccgctagagatctgctgtactacgccgtgacccaggatgccatgctgatcttcgccaacctgagccggggcttcggccggcagggcaagcggaccttcatggccgagagacagtacacacggatggaggactggctgaccgccaagctggcctacgagggcctgagcaagacctacctgtccaagacactggcccagtacacctccaagacatgcagcaactgtgggtttaccatcaccagcgccgactacgacagggtgctggagaagctgaagaagacagcaacaggctggatgaccacaattaacggcaaggagctgaaggtggagggccagattacctactacaacagatacaagagacagaacgtagtcaaggacctgtccgtcgagctggatagactgagcgaagaatctgtgaacaacgacatctcctcctggacaaagggcagaagcggagaagctctgagcctcctgaagaaaagattctcccatagacccgtgcaggagaagttcgtgtgcctgaactgcggcttcgagacacacgcagccgagcaagccgccctgaacatcgccagatcctggctgttcctgcggagccaggagtacaagaaataccagacaaacaagacaaccggcaacaccgataagagagccttcgtcgagacctggcagtccttttaccggaagaagcttaaggaggtgtggaaacctgccgtgcggtctggcggatctggcggaggctccaccagccccaagaaaaagagaaaagtctaagctgccttctgcggggcttgccttctggccatgcccttcttctctcccttgcacctgtacctcttggtctttgaataaagcctgagtaggaaggctagcaaaaaaaaaaaaaaaaaaaaaaaaaaaaaaaaaaaaaaaaaaaaaaaaaaaaaaaaaaaaaaaaaaaaaaaaaaaaaaaa

SEQ ID NO: 8981 - RNA, 8787 nt, synthetic construct
  source 1..8787: mol_type = other RNA
aggaaataagagagaaaagaagagtaagaagaaatataagagccaccatggcccctaagaagaagcgtaaagtgagccggatgaaccacgaccaggagttcgacccccctaaggtgtaccctcccgtccccgccgagaagagaaagcccatccgggtcctgagcctgttcgatggcatcgccaccggtctgctggtgctgaaggacctgggcatccaggtggataggtacattgcctccgaggtgtgcgaggactccatcaccgtgggaatggtgcgtcatcagggcaagatcatgtacgtgggcgacgtgcggagcgtgacacagaagcatatccaggagtggggccctttcgacctggtgatcggcggcagcccttgcaatgacctgagcatcgtgaacccagcccggaagggcctgtacgagggaaccggcagactgttcttcgagttttacagactgctgcacgacgcccggcctaaggaaggcgacgaccggcccttcttttggctgttcgagaatgtggtggccatgggagtcagcgacaagcgggatattagccggttcctggagagcaaccccgtgatgatcgatgccaaggaagtgagcgccgcccaccgggccagatacttctggggcaatctgcctggcatgaacagacccctggccagcaccgtgaacgacaagctggagctgcaggagtgcctggagcacggccggatcgccaagttcagcaaggtgagaaccatcaccacccgaagcaacagcatcaaacaaggcaaggaccagcactttcctgtgttcatgaacgagaaggaggacatcctgtggtgtaccgagatggagagagtgttcgggttcccagtccactacacagatgtcagcaacatgtctagactggccagacagagactgctgggaagaagctggtccgtccctgtgatcagacacctgttcgcccctctgaaggagtacttcgcctgcgtgagcagcggcaacagcaacgccaacagccggggccccagcttctctagcggcctggtgccactgtccctgagagggagccacatgggccccatggagatctacaaaaccgtgagcgcctggaagcggcagcctgtgcgcgtgctgagcctgtttcggaatatcgataaagtcctgaaaagcctgggattcctggagagcggctctggctccggcggtggcaccctgaagtacgtggaggatgtgacaaacgtggtcagacgggatgtggagaagtggggccccttcgatctggtgtacggcagcacccaacccctgggcagctcttgtgaccggtgccctggctggtacatgtttcagttccaccggatcctgcagtacgccctgccgagacaggagtcccagcggccattcttttggattttcatggacaacttgctgctgaccgaggatgaccaggaaactaccactcggttcctgcagaccgaagccgtgaccctgcaggacgtgagaggccgggactaccagaacgccatgcgggtgtggtccaacatccctggactgaaaagcaagcacgcacctctgacccctaaagaagaggagtacctgcaggcccaggtgcggagcagaagcaagctggacgcccctaaggtggatctgctggtgaagaattgcctcctgcccctgagagagtacttcaagtatttcagccagaatagtctgcccctgggaggcagcggcggcggcatggccttcgaggacgtggccgtgtacttcagccaggaggagtggggcctgctggacaccgcccagagggccctgtacaggagggtgatgctggacaacttcgccctggtggccagcctgggcctgagcaccagcaggcccagggtggtgatccagctggagaggggcgaggagccctgggtgcccagcaggaccgacaccatcctgagcaggaacacctacaggaggaggaaccccggcagcggcggcccaagcagcggcgcccctcctcccagcggcggcaggcggcccaagcagcggcgcccctcctcccagcggcggcagcccagccggctccccaacctctaccgaggagggcacctctgagtccgccacccccgagagcggccctggcacctccaccgagcccagcgagggcagcgcacccggcagccctgccggcagccccacctccacagaggagggaaccagcaccgagcccagcgaaggcagcgccccaggcaccagcaccgagcctagtgagcaggagattaaacggatcaacaagatcagaagaagacttgtgaaagacagcaacaccaagaaggccggcaagacaggccccatgaaaaccctgctggttagagtgatgacacccgatctgagagagcggctggaaaacctgagaaagaagcctgaaaatatcccccagcccatcagcaatacatctagagccaacctgaataagctgctgaccgattacaccgaaatgaagaaggcgatcctgcatgtgtactgggaagagttccagaaggaccctgtgggcctgatgagccgggtggcccagcctgccagcaagaagatcgatcagaacaagctgaaacctgagatggacgagaagggcaacctgaccaccgccggctttgcctgctctcagtgtggccagcccctgttcgtgtacaagctggagcaggtgtctgagaagggcaaggcttacaccaactacttcggacggtgcaatgtggccgagcacgaaaagctgatcctgctggcccagctgaagcccgagaaggatagcgacgaagccgtgacatatagcctgggaaagtttgggcagagggccctggatttctacagcattcatgtgaccaaggagtccacccaccccgtgaagcccctggcccagatcgccggaaacagatacgcctccggacctgtgggaaaggccctgagcgacgcatgtatgggcacaatcgcctccttcctgtctaagtaccaggacatcatcatcgaacaccagaaggtggtgaagggcaaccagaagagactggagagcctgcgggagctggccggcaaggaaaacctggaataccctagcgtgaccctgccacctcagcctcacaccaaggagggcgttgatgcctacaacgaagtgatcgcccgggtgcgaatgtgggtgaacctgaacctgtggcagaagctgaagctaagcagagatgatgccaagcctctgctgagactgaagggattcccttcctttcctctggtcgagagacaggccaacgaagtggactggtgggacatggtgtgtaacgtgaagaagctgatcaacgagaaaaaggaggatggcaaggtgttttggcagaatctggctggctacaagagacaggaagccctgagaccatacctgagcagcgaggaagatcggaagaagggaaagaaattcgctcggtaccagctgggcgacctgctgctgcacctggaaaagaagcacggcgaggactggggaaaggtgtacgacgaggcctgggagcggattgacaagaaagtggaaggcctgagcaagcacatcaagctggaagaggaacggagaagcgaggacgcccagagcaaggccgccctgaccgactggctgcgggctaaggccagcttcgtgatcgagggcctgaaggaggccgacaaggacgagttctgcagatgcgagctgaagctgcagaagtggtacggggacctgcggggaaagcccttcgccatcgaagccgagaacagcatcctggacatcagcggcttcagcaagcagtacaactgtgccttcatctggcagaaggacggcgtgaagaagctgaacctgtacctgatcatcaactacttcaagggcggcaagctgcggttcaagaagatcaaacctgaagccttcgaagccaacagattctacaccgtgatcaacaaaaagagcggcgagatcgtgcccatggaggtgaacttcaacttcgacgaccccaacctgatcatcctgcctctggcctttggcaagagacagggcagagaattcatctggaacgacctgctgtccctggaaaccggcagcctgaagctggccaacggaagagtgatcgagaagacactgtacaacagaagaacccggcaggatgagcctgccctgttcgtggccctgaccttcgagcggcgggaggtcctggactcctccaatatcaaaccaatgaacctgatcggcgtggcaagaggcgaaaacatccccgccgtgatcgccctgaccgaccccgagggctgcccactgagccggtttaaggatagcctgggaaacccaacccacatcctgagaatcggcgagagctataaggagaagcagcggaccatccaggccaagaaggaggtggagcagcggagagccggcggctacagccggaagtacgccagcaaagccaagaatctggcagacgatatggtgagaaacaccgctagagatctgctgtactacgccgtgacccaggatgccatgctgatcttcgccaacctgagccggggcttcggccggcagggcaagcggaccttcatggccgagagacagtacacacggatggaggactggctgaccgccaagctggcctacgagggcctgagcaagacctacctgtccaagacactggcccagtacacctccaagacatgcagcaactgtgggtttaccatcaccagcgccgactacgacagggtgctggagaagctgaagaagacagcaacaggctggatgaccacaattaacggcaaggagctgaaggtggagggccagattacctactacaacagatacaagagacagaacgtagtcaaggacctgtccgtcgagctggatagactgagcgaagaatctgtgaacaacgacatctcctcctggacaaagggcagaagcggagaagctctgagcctcctgaagaaaagattctcccatagacccgtgcaggagaagttcgtgtgcctgaactgcggcttcgagacacacgcagccgagcaagccgccctgaacatcgccagatcctggctgttcctgcggagccaggagtacaagaaataccagacaaacaagacaaccggcaacaccgataagagagccttcgtcgagacctggcagtccttttaccggaagaagcttaaggaggtgtggaaacctgccgtgcggtctggcggatctggcggaggctccaccagccccaagaaaaagagaaaagtctaagctgccttctgcggggcttgccttctggccatgcccttcttctctcccttgcacctgtacctcttggtctttgaataaagcctgagtaggaaggctagcaaaaaaaaaaaaaaaaaaaaaaaaaaaaaaaaaaaaaaaaaaaaaaaaaaaaaaaaaaaaaaaaaaaaaaaaaaaaaaaagcccagccggctccccaacctctaccgaggagggcacctctgagtccgccacccccgagagcggccctggcacctccaccgagcccagcgagggcagcgcacccggcagccctgccggcagccccacctccacagaggagggaaccagcaccgagcccagcgaaggcagcgccccaggcaccagcaccgagcctagtgagcaggagattaaacggatcaacaagatcagaagaagacttgtgaaagacagcaacaccaagaaggccggcaagacaggccccatgaaaaccctgctggttagagtgatgacacccgatctgagagagcggctggaaaacctgagaaagaagcctgaaaatatcccccagcccatcagcaatacatctagagccaacctgaataagctgctgaccgattacaccgaaatgaagaaggcgatcctgcatgtgtactgggaagagttccagaaggaccctgtgggcctgatgagccgggtggcccagcctgccagcaagaagatcgatcagaacaagctgaaacctgagatggacgagaagggcaacctgaccaccgccggctttgcctgctctcagtgtggccagcccctgttcgtgtacaagctggagcaggtgtctgagaagggcaaggcttacaccaactacttcggacggtgcaatgtggccgagcacgaaaagctgatcctgctggcccagctgaagcccgagaaggatagcgacgaagccgtgacatatagcctgggaaagtttgggcagagggccctggatttctacagcattcatgtgaccaaggagtccacccaccccgtgaagcccctggcccagatcgccggaaacagatacgcctccggacctgtgggaaaggccctgagcgacgcatgtatgggcacaatcgcctccttcctgtctaagtaccaggacatcatcatcgaacaccagaaggtggtgaagggcaaccagaagagactggagagcctgcgggagctggccggcaaggaaaacctggaataccctagcgtgaccctgccacctcagcctcacaccaaggagggcgttgatgcctacaacgaagtgatcgcccgggtgcgaatgtgggtgaacctgaacctgtggcagaagctgaagctaagcagagatgatgccaagcctctgctgagactgaagggattcccttcctttcctctggtcgagagacaggccaacgaagtggactggtgggacatggtgtgtaacgtgaagaagctgatcaacgagaaaaaggaggatggcaaggtgttttggcagaatctggctggctacaagagacaggaagccctgagaccatacctgagcagcgaggaagatcggaagaagggaaagaaattcgctcggtaccagctgggcgacctgctgctgcacctggaaaagaagcacggcgaggactggggaaaggtgtacgacgaggcctgggagcggattgacaagaaagtggaaggcctgagcaagcacatcaagctggaagaggaacggagaagcgaggacgcccagagcaaggccgccctgaccgactggctgcgggctaaggccagcttcgtgatcgagggcctgaaggaggccgacaaggacgagttctgcagatgcgagctgaagctgcagaagtggtacggggacctgcggggaaagcccttcgccatcgaagccgagaacagcatcctggacatcagcggcttcagcaagcagtacaactgtgccttcatctggcagaaggacggcgtgaagaagctgaacctgtacctgatcatcaactacttcaagggcggcaagctgcggttcaagaagatcaaacctgaagccttcgaagccaacagattctacaccgtgatcaacaaaaagagcggcgagatcgtgcccatggaggtgaacttcaacttcgacgaccccaacctgatcatcctgcctctggcctttggcaagagacagggcagagaattcatctggaacgacctgctgtccctggaaaccggcagcctgaagctggccaacggaagagtgatcgagaagacactgtacaacagaagaacccggcaggatgagcctgccctgttcgtggccctgaccttcgagcggcgggaggtcctggactcctccaatatcaaaccaatgaacctgatcggcgtggcaagaggcgaaaacatccccgccgtgatcgccctgaccgaccccgagggctgcccactgagccggtttaaggatagcctgggaaacccaacccacatcctgagaatcggcgagagctataaggagaagcagcggaccatccaggccaagaaggaggtggagcagcggagagccggcggctacagccggaagtacgccagcaaagccaagaatctggcagacgatatggtgagaaacaccgctagagatctgctgtactacgccgtgacccaggatgccatgctgatcttcgccaacctgagccggggcttcggccggcagggcaagcggaccttcatggccgagagacagtacacacggatggaggactggctgaccgccaagctggcctacgagggcctgagcaagacctacctgtccaagacactggcccagtacacctccaagacatgcagcaactgtgggtttaccatcaccagcgccgactacgacagggtgctggagaagctgaagaagacagcaacaggctggatgaccacaattaacggcaaggagctgaaggtggagggccagattacctactacaacagatacaagagacagaacgtagtcaaggacctgtccgtcgagctggatagactgagcgaagaatctgtgaacaacgacatctcctcctggacaaagggcagaagcggagaagctctgagcctcctgaagaaaagattctcccatagacccgtgcaggagaagttcgtgtgcctgaactgcggcttcgagacacacgcagccgagcaagccgccctgaacatcgccagatcctggctgttcctgcggagccaggagtacaagaaataccagacaaacaagacaaccggcaacaccgataagagagccttcgtcgagacctggcagtccttttaccggaagaagcttaaggaggtgtggaaacctgccgtgcggtctggcggatctggcggaggctccaccagccccaagaaaaagagaaaagtctaagctgccttctgcggggcttgccttctggccatgcccttcttctctcccttgcacctgtacctcttggtctttgaataaagcctgagtaggaaggctagcaaaaaaaaaaaaaaaaaaaaaaaaaaaaaaaaaaaaaaaaaaaaaaaaaaaaaaaaaaaaaaaaaaaaaaaaaaaaaaaa

SEQ ID NO: 8982 - RNA, 8787 nt, synthetic construct
  source 1..8787: mol_type = other RNA
aggaaataagagagaaaagaagagtaagaagaaatataagagccaccatggcccctaagaagaagcgtaaagtgagccggatgaaccacgaccaggagttcgacccccctaaggtgtaccctcccgtccccgccgagaagagaaagcccatccgggtcctgagcctgttcgatggcatcgccaccggtctgctggtgctgaaggacctgggcatccaggtggataggtacattgcctccgaggtgtgcgaggactccatcaccgtgggaatggtgcgtcatcagggcaagatcatgtacgtgggcgacgtgcggagcgtgacacagaagcatatccaggagtggggccctttcgacctggtgatcggcggcagcccttgcaatgacctgagcatcgtgaacccagcccggaagggcctgtacgagggaaccggcagactgttcttcgagttttacagactgctgcacgacgcccggcctaaggaaggcgacgaccggcccttcttttggctgttcgagaatgtggtggccatgggagtcagcgacaagcgggatattagccggttcctggagagcaaccccgtgatgatcgatgccaaggaagtgagcgccgcccaccgggccagatacttctggggcaatctgcctggcatgaacagacccctggccagcaccgtgaacgacaagctggagctgcaggagtgcctggagcacggccggatcgccaagttcagcaaggtgagaaccatcaccacccgaagcaacagcatcaaacaaggcaaggaccagcactttcctgtgttcatgaacgagaaggaggacatcctgtggtgtaccgagatggagagagtgttcgggttcccagtccactacacagatgtcagcaacatgtctagactggccagacagagactgctgggaagaagctggtccgtccctgtgatcagacacctgttcgcccctctgaaggagtacttcgcctgcgtgagcagcggcaacagcaacgccaacagccggggccccagcttctctagcggcctggtgccactgtccctgagagggagccacatgggccccatggagatctacaaaaccgtgagcgcctggaagcggcagcctgtgcgcgtgctgagcctgtttcggaatatcgataaagtcctgaaaagcctgggattcctggagagcggctctggctccggcggtggcaccctgaagtacgtggaggatgtgacaaacgtggtcagacgggatgtggagaagtggggccccttcgatctggtgtacggcagcacccaacccctgggcagctcttgtgaccggtgccctggctggtacatgtttcagttccaccggatcctgcagtacgccctgccgagacaggagtcccagcggccattcttttggattttcatggacaacttgctgctgaccgaggatgaccaggaaactaccactcggttcctgcagaccgaagccgtgaccctgcaggacgtgagaggccgggactaccagaacgccatgcgggtgtggtccaacatccctggactgaaaagcaagcacgcacctctgacccctaaagaagaggagtacctgcaggcccaggtgcggagcagaagcaagctggacgcccctaaggtggatctgctggtgaagaattgcctcctgcccctgagagagtacttcaagtatttcagccagaatagtctgcccctgggaggcagcggcggcggcatggccttcgaggacgtggccgtgtacttcagccaggaggagtggggcctgctggacaccgcccagagggccctgtacaggagggtgatgctggacaacttcgccctggtggccagcctgggcctgagcaccagcaggcccagggtggtgatccagctggagaggggcgaggagccctgggtgcccagcgagaccgacatgaccatgagcaggaacacccacaggaggaggaaccccggcagcggcggcccaagcagcggcgcccctcctcccagcggcggcaggcggcccaagcagcggcgcccctcctcccagcggcggcagcccagccggctccccaacctctaccgaggagggcacctctgagtccgccacccccgagagcggccctggcacctccaccgagcccagcgagggcagcgcacccggcagccctgccggcagccccacctccacagaggagggaaccagcaccgagcccagcgaaggcagcgccccaggcaccagcaccgagcctagtgagcaggagattaaacggatcaacaagatcagaagaagacttgtgaaagacagcaacaccaagaaggccggcaagacaggccccatgaaaaccctgctggttagagtgatgacacccgatctgagagagcggctggaaaacctgagaaagaagcctgaaaatatcccccagcccatcagcaatacatctagagccaacctgaataagctgctgaccgattacaccgaaatgaagaaggcgatcctgcatgtgtactgggaagagttccagaaggaccctgtgggcctgatgagccgggtggcccagcctgccagcaagaagatcgatcagaacaagctgaaacctgagatggacgagaagggcaacctgaccaccgccggctttgcctgctctcagtgtggccagcccctgttcgtgtacaagctggagcaggtgtctgagaagggcaaggcttacaccaactacttcggacggtgcaatgtggccgagcacgaaaagctgatcctgctggcccagctgaagcccgagaaggatagcgacgaagccgtgacatatagcctgggaaagtttgggcagagggccctggatttctacagcattcatgtgaccaaggagtccacccaccccgtgaagcccctggcccagatcgccggaaacagatacgcctccggacctgtgggaaaggccctgagcgacgcatgtatgggcacaatcgcctccttcctgtctaagtaccaggacatcatcatcgaacaccagaaggtggtgaagggcaaccagaagagactggagagcctgcgggagctggccggcaaggaaaacctggaataccctagcgtgaccctgccacctcagcctcacaccaaggagggcgttgatgcctacaacgaagtgatcgcccgggtgcgaatgtgggtgaacctgaacctgtggcagaagctgaagctaagcagagatgatgccaagcctctgctgagactgaagggattcccttcctttcctctggtcgagagacaggccaacgaagtggactggtgggacatggtgtgtaacgtgaagaagctgatcaacgagaaaaaggaggatggcaaggtgttttggcagaatctggctggctacaagagacaggaagccctgagaccatacctgagcagcgaggaagatcggaagaagggaaagaaattcgctcggtaccagctgggcgacctgctgctgcacctggaaaagaagcacggcgaggactggggaaaggtgtacgacgaggcctgggagcggattgacaagaaagtggaaggcctgagcaagcacatcaagctggaagaggaacggagaagcgaggacgcccagagcaaggccgccctgaccgactggctgcgggctaaggccagcttcgtgatcgagggcctgaaggaggccgacaaggacgagttctgcagatgcgagctgaagctgcagaagtggtacggggacctgcggggaaagcccttcgccatcgaagccgagaacagcatcctggacatcagcggcttcagcaagcagtacaactgtgccttcatctggcagaaggacggcgtgaagaagctgaacctgtacctgatcatcaactacttcaagggcggcaagctgcggttcaagaagatcaaacctgaagccttcgaagccaacagattctacaccgtgatcaacaaaaagagcggcgagatcgtgcccatggaggtgaacttcaacttcgacgaccccaacctgatcatcctgcctctggcctttggcaagagacagggcagagaattcatctggaacgacctgctgtccctggaaaccggcagcctgaagctggccaacggaagagtgatcgagaagacactgtacaacagaagaacccggcaggatgagcctgccctgttcgtggccctgaccttcgagcggcgggaggtcctggactcctccaatatcaaaccaatgaacctgatcggcgtggcaagaggcgaaaacatccccgccgtgatcgccctgaccgaccccgagggctgcccactgagccggtttaaggatagcctgggaaacccaacccacatcctgagaatcggcgagagctataaggagaagcagcggaccatccaggccaagaaggaggtggagcagcggagagccggcggctacagccggaagtacgccagcaaagccaagaatctggcagacgatatggtgagaaacaccgctagagatctgctgtactacgccgtgacccaggatgccatgctgatcttcgccaacctgagccggggcttcggccggcagggcaagcggaccttcatggccgagagacagtacacacggatggaggactggctgaccgccaagctggcctacgagggcctgagcaagacctacctgtccaagacactggcccagtacacctccaagacatgcagcaactgtgggtttaccatcaccagcgccgactacgacagggtgctggagaagctgaagaagacagcaacaggctggatgaccacaattaacggcaaggagctgaaggtggagggccagattacctactacaacagatacaagagacagaacgtagtcaaggacctgtccgtcgagctggatagactgagcgaagaatctgtgaacaacgacatctcctcctggacaaagggcagaagcggagaagctctgagcctcctgaagaaaagattctcccatagacccgtgcaggagaagttcgtgtgcctgaactgcggcttcgagacacacgcagccgagcaagccgccctgaacatcgccagatcctggctgttcctgcggagccaggagtacaagaaataccagacaaacaagacaaccggcaacaccgataagagagccttcgtcgagacctggcagtccttttaccggaagaagcttaaggaggtgtggaaacctgccgtgcggtctggcggatctggcggaggctccaccagccccaagaaaaagagaaaagtctaagctgccttctgcggggcttgccttctggccatgcccttcttctctcccttgcacctgtacctcttggtctttgaataaagcctgagtaggaaggctagcaaaaaaaaaaaaaaaaaaaaaaaaaaaaaaaaaaaaaaaaaaaaaaaaaaaaaaaaaaaaaaaaaaaaaaaaaaaaaaaagcccagccggctccccaacctctaccgaggagggcacctctgagtccgccacccccgagagcggccctggcacctccaccgagcccagcgagggcagcgcacccggcagccctgccggcagccccacctccacagaggagggaaccagcaccgagcccagcgaaggcagcgccccaggcaccagcaccgagcctagtgagcaggagattaaacggatcaacaagatcagaagaagacttgtgaaagacagcaacaccaagaaggccggcaagacaggccccatgaaaaccctgctggttagagtgatgacacccgatctgagagagcggctggaaaacctgagaaagaagcctgaaaatatcccccagcccatcagcaatacatctagagccaacctgaataagctgctgaccgattacaccgaaatgaagaaggcgatcctgcatgtgtactgggaagagttccagaaggaccctgtgggcctgatgagccgggtggcccagcctgccagcaagaagatcgatcagaacaagctgaaacctgagatggacgagaagggcaacctgaccaccgccggctttgcctgctctcagtgtggccagcccctgttcgtgtacaagctggagcaggtgtctgagaagggcaaggcttacaccaactacttcggacggtgcaatgtggccgagcacgaaaagctgatcctgctggcccagctgaagcccgagaaggatagcgacgaagccgtgacatatagcctgggaaagtttgggcagagggccctggatttctacagcattcatgtgaccaaggagtccacccaccccgtgaagcccctggcccagatcgccggaaacagatacgcctccggacctgtgggaaaggccctgagcgacgcatgtatgggcacaatcgcctccttcctgtctaagtaccaggacatcatcatcgaacaccagaaggtggtgaagggcaaccagaagagactggagagcctgcgggagctggccggcaaggaaaacctggaataccctagcgtgaccctgccacctcagcctcacaccaaggagggcgttgatgcctacaacgaagtgatcgcccgggtgcgaatgtgggtgaacctgaacctgtggcagaagctgaagctaagcagagatgatgccaagcctctgctgagactgaagggattcccttcctttcctctggtcgagagacaggccaacgaagtggactggtgggacatggtgtgtaacgtgaagaagctgatcaacgagaaaaaggaggatggcaaggtgttttggcagaatctggctggctacaagagacaggaagccctgagaccatacctgagcagcgaggaagatcggaagaagggaaagaaattcgctcggtaccagctgggcgacctgctgctgcacctggaaaagaagcacggcgaggactggggaaaggtgtacgacgaggcctgggagcggattgacaagaaagtggaaggcctgagcaagcacatcaagctggaagaggaacggagaagcgaggacgcccagagcaaggccgccctgaccgactggctgcgggctaaggccagcttcgtgatcgagggcctgaaggaggccgacaaggacgagttctgcagatgcgagctgaagctgcagaagtggtacggggacctgcggggaaagcccttcgccatcgaagccgagaacagcatcctggacatcagcggcttcagcaagcagtacaactgtgccttcatctggcagaaggacggcgtgaagaagctgaacctgtacctgatcatcaactacttcaagggcggcaagctgcggttcaagaagatcaaacctgaagccttcgaagccaacagattctacaccgtgatcaacaaaaagagcggcgagatcgtgcccatggaggtgaacttcaacttcgacgaccccaacctgatcatcctgcctctggcctttggcaagagacagggcagagaattcatctggaacgacctgctgtccctggaaaccggcagcctgaagctggccaacggaagagtgatcgagaagacactgtacaacagaagaacccggcaggatgagcctgccctgttcgtggccctgaccttcgagcggcgggaggtcctggactcctccaatatcaaaccaatgaacctgatcggcgtggcaagaggcgaaaacatccccgccgtgatcgccctgaccgaccccgagggctgcccactgagccggtttaaggatagcctgggaaacccaacccacatcctgagaatcggcgagagctataaggagaagcagcggaccatccaggccaagaaggaggtggagcagcggagagccggcggctacagccggaagtacgccagcaaagccaagaatctggcagacgatatggtgagaaacaccgctagagatctgctgtactacgccgtgacccaggatgccatgctgatcttcgccaacctgagccggggcttcggccggcagggcaagcggaccttcatggccgagagacagtacacacggatggaggactggctgaccgccaagctggcctacgagggcctgagcaagacctacctgtccaagacactggcccagtacacctccaagacatgcagcaactgtgggtttaccatcaccagcgccgactacgacagggtgctggagaagctgaagaagacagcaacaggctggatgaccacaattaacggcaaggagctgaaggtggagggccagattacctactacaacagatacaagagacagaacgtagtcaaggacctgtccgtcgagctggatagactgagcgaagaatctgtgaacaacgacatctcctcctggacaaagggcagaagcggagaagctctgagcctcctgaagaaaagattctcccatagacccgtgcaggagaagttcgtgtgcctgaactgcggcttcgagacacacgcagccgagcaagccgccctgaacatcgccagatcctggctgttcctgcggagccaggagtacaagaaataccagacaaacaagacaaccggcaacaccgataagagagccttcgtcgagacctggcagtccttttaccggaagaagcttaaggaggtgtggaaacctgccgtgcggtctggcggatctggcggaggctccaccagccccaagaaaaagagaaaagtctaagctgccttctgcggggcttgccttctggccatgcccttcttctctcccttgcacctgtacctcttggtctttgaataaagcctgagtaggaaggctagcaaaaaaaaaaaaaaaaaaaaaaaaaaaaaaaaaaaaaaaaaaaaaaaaaaaaaaaaaaaaaaaaaaaaaaaaaaaaaaaa

SEQ ID NO: 8983 - RNA, 8787 nt, synthetic construct
  source 1..8787: mol_type = other RNA
aggaaataagagagaaaagaagagtaagaagaaatataagagccaccatggcccctaagaagaagcgtaaagtgagccggatgaaccacgaccaggagttcgacccccctaaggtgtaccctcccgtccccgccgagaagagaaagcccatccgggtcctgagcctgttcgatggcatcgccaccggtctgctggtgctgaaggacctgggcatccaggtggataggtacattgcctccgaggtgtgcgaggactccatcaccgtgggaatggtgcgtcatcagggcaagatcatgtacgtgggcgacgtgcggagcgtgacacagaagcatatccaggagtggggccctttcgacctggtgatcggcggcagcccttgcaatgacctgagcatcgtgaacccagcccggaagggcctgtacgagggaaccggcagactgttcttcgagttttacagactgctgcacgacgcccggcctaaggaaggcgacgaccggcccttcttttggctgttcgagaatgtggtggccatgggagtcagcgacaagcgggatattagccggttcctggagagcaaccccgtgatgatcgatgccaaggaagtgagcgccgcccaccgggccagatacttctggggcaatctgcctggcatgaacagacccctggccagcaccgtgaacgacaagctggagctgcaggagtgcctggagcacggccggatcgccaagttcagcaaggtgagaaccatcaccacccgaagcaacagcatcaaacaaggcaaggaccagcactttcctgtgttcatgaacgagaaggaggacatcctgtggtgtaccgagatggagagagtgttcgggttcccagtccactacacagatgtcagcaacatgtctagactggccagacagagactgctgggaagaagctggtccgtccctgtgatcagacacctgttcgcccctctgaaggagtacttcgcctgcgtgagcagcggcaacagcaacgccaacagccggggccccagcttctctagcggcctggtgccactgtccctgagagggagccacatgggccccatggagatctacaaaaccgtgagcgcctggaagcggcagcctgtgcgcgtgctgagcctgtttcggaatatcgataaagtcctgaaaagcctgggattcctggagagcggctctggctccggcggtggcaccctgaagtacgtggaggatgtgacaaacgtggtcagacgggatgtggagaagtggggccccttcgatctggtgtacggcagcacccaacccctgggcagctcttgtgaccggtgccctggctggtacatgtttcagttccaccggatcctgcagtacgccctgccgagacaggagtcccagcggccattcttttggattttcatggacaacttgctgctgaccgaggatgaccaggaaactaccactcggttcctgcagaccgaagccgtgaccctgcaggacgtgagaggccgggactaccagaacgccatgcgggtgtggtccaacatccctggactgaaaagcaagcacgcacctctgacccctaaagaagaggagtacctgcaggcccaggtgcggagcagaagcaagctggacgcccctaaggtggatctgctggtgaagaattgcctcctgcccctgagagagtacttcaagtatttcagccagaatagtctgcccctgggaggcagcggcggcggccaccaggaggtggtgaccttcgaggacgtggccgtgtacttcacccagaccgagtgggccggcctgagccccgcccagagggccctgtacaggagcgtgatgctggagatctacggcaacctgaccagcctgggctaccccgtgcccaagcccgccctggtgagcctgctggagaggggcgacctgccctggggcctggagaccagggacgacaggcccgcccagggcaccaaggacatctgcggcggcccaagcagcggcgcccctcctcccagcggcggcaggcggcccaagcagcggcgcccctcctcccagcggcggcagcccagccggctccccaacctctaccgaggagggcacctctgagtccgccacccccgagagcggccctggcacctccaccgagcccagcgagggcagcgcacccggcagccctgccggcagccccacctccacagaggagggaaccagcaccgagcccagcgaaggcagcgccccaggcaccagcaccgagcctagtgagcaggagattaaacggatcaacaagatcagaagaagacttgtgaaagacagcaacaccaagaaggccggcaagacaggccccatgaaaaccctgctggttagagtgatgacacccgatctgagagagcggctggaaaacctgagaaagaagcctgaaaatatcccccagcccatcagcaatacatctagagccaacctgaataagctgctgaccgattacaccgaaatgaagaaggcgatcctgcatgtgtactgggaagagttccagaaggaccctgtgggcctgatgagccgggtggcccagcctgccagcaagaagatcgatcagaacaagctgaaacctgagatggacgagaagggcaacctgaccaccgccggctttgcctgctctcagtgtggccagcccctgttcgtgtacaagctggagcaggtgtctgagaagggcaaggcttacaccaactacttcggacggtgcaatgtggccgagcacgaaaagctgatcctgctggcccagctgaagcccgagaaggatagcgacgaagccgtgacatatagcctgggaaagtttgggcagagggccctggatttctacagcattcatgtgaccaaggagtccacccaccccgtgaagcccctggcccagatcgccggaaacagatacgcctccggacctgtgggaaaggccctgagcgacgcatgtatgggcacaatcgcctccttcctgtctaagtaccaggacatcatcatcgaacaccagaaggtggtgaagggcaaccagaagagactggagagcctgcgggagctggccggcaaggaaaacctggaataccctagcgtgaccctgccacctcagcctcacaccaaggagggcgttgatgcctacaacgaagtgatcgcccgggtgcgaatgtgggtgaacctgaacctgtggcagaagctgaagctaagcagagatgatgccaagcctctgctgagactgaagggattcccttcctttcctctggtcgagagacaggccaacgaagtggactggtgggacatggtgtgtaacgtgaagaagctgatcaacgagaaaaaggaggatggcaaggtgttttggcagaatctggctggctacaagagacaggaagccctgagaccatacctgagcagcgaggaagatcggaagaagggaaagaaattcgctcggtaccagctgggcgacctgctgctgcacctggaaaagaagcacggcgaggactggggaaaggtgtacgacgaggcctgggagcggattgacaagaaagtggaaggcctgagcaagcacatcaagctggaagaggaacggagaagcgaggacgcccagagcaaggccgccctgaccgactggctgcgggctaaggccagcttcgtgatcgagggcctgaaggaggccgacaaggacgagttctgcagatgcgagctgaagctgcagaagtggtacggggacctgcggggaaagcccttcgccatcgaagccgagaacagcatcctggacatcagcggcttcagcaagcagtacaactgtgccttcatctggcagaaggacggcgtgaagaagctgaacctgtacctgatcatcaactacttcaagggcggcaagctgcggttcaagaagatcaaacctgaagccttcgaagccaacagattctacaccgtgatcaacaaaaagagcggcgagatcgtgcccatggaggtgaacttcaacttcgacgaccccaacctgatcatcctgcctctggcctttggcaagagacagggcagagaattcatctggaacgacctgctgtccctggaaaccggcagcctgaagctggccaacggaagagtgatcgagaagacactgtacaacagaagaacccggcaggatgagcctgccctgttcgtggccctgaccttcgagcggcgggaggtcctggactcctccaatatcaaaccaatgaacctgatcggcgtggcaagaggcgaaaacatccccgccgtgatcgccctgaccgaccccgagggctgcccactgagccggtttaaggatagcctgggaaacccaacccacatcctgagaatcggcgagagctataaggagaagcagcggaccatccaggccaagaaggaggtggagcagcggagagccggcggctacagccggaagtacgccagcaaagccaagaatctggcagacgatatggtgagaaacaccgctagagatctgctgtactacgccgtgacccaggatgccatgctgatcttcgccaacctgagccggggcttcggccggcagggcaagcggaccttcatggccgagagacagtacacacggatggaggactggctgaccgccaagctggcctacgagggcctgagcaagacctacctgtccaagacactggcccagtacacctccaagacatgcagcaactgtgggtttaccatcaccagcgccgactacgacagggtgctggagaagctgaagaagacagcaacaggctggatgaccacaattaacggcaaggagctgaaggtggagggccagattacctactacaacagatacaagagacagaacgtagtcaaggacctgtccgtcgagctggatagactgagcgaagaatctgtgaacaacgacatctcctcctggacaaagggcagaagcggagaagctctgagcctcctgaagaaaagattctcccatagacccgtgcaggagaagttcgtgtgcctgaactgcggcttcgagacacacgcagccgagcaagccgccctgaacatcgccagatcctggctgttcctgcggagccaggagtacaagaaataccagacaaacaagacaaccggcaacaccgataagagagccttcgtcgagacctggcagtccttttaccggaagaagcttaaggaggtgtggaaacctgccgtgcggtctggcggatctggcggaggctccaccagccccaagaaaaagagaaaagtctaagctgccttctgcggggcttgccttctggccatgcccttcttctctcccttgcacctgtacctcttggtctttgaataaagcctgagtaggaaggctagcaaaaaaaaaaaaaaaaaaaaaaaaaaaaaaaaaaaaaaaaaaaaaaaaaaaaaaaaaaaaaaaaaaaaaaaaaaaaaaaagcccagccggctccccaacctctaccgaggagggcacctctgagtccgccacccccgagagcggccctggcacctccaccgagcccagcgagggcagcgcacccggcagccctgccggcagccccacctccacagaggagggaaccagcaccgagcccagcgaaggcagcgccccaggcaccagcaccgagcctagtgagcaggagattaaacggatcaacaagatcagaagaagacttgtgaaagacagcaacaccaagaaggccggcaagacaggccccatgaaaaccctgctggttagagtgatgacacccgatctgagagagcggctggaaaacctgagaaagaagcctgaaaatatcccccagcccatcagcaatacatctagagccaacctgaataagctgctgaccgattacaccgaaatgaagaaggcgatcctgcatgtgtactgggaagagttccagaaggaccctgtgggcctgatgagccgggtggcccagcctgccagcaagaagatcgatcagaacaagctgaaacctgagatggacgagaagggcaacctgaccaccgccggctttgcctgctctcagtgtggccagcccctgttcgtgtacaagctggagcaggtgtctgagaagggcaaggcttacaccaactacttcggacggtgcaatgtggccgagcacgaaaagctgatcctgctggcccagctgaagcccgagaaggatagcgacgaagccgtgacatatagcctgggaaagtttgggcagagggccctggatttctacagcattcatgtgaccaaggagtccacccaccccgtgaagcccctggcccagatcgccggaaacagatacgcctccggacctgtgggaaaggccctgagcgacgcatgtatgggcacaatcgcctccttcctgtctaagtaccaggacatcatcatcgaacaccagaaggtggtgaagggcaaccagaagagactggagagcctgcgggagctggccggcaaggaaaacctggaataccctagcgtgaccctgccacctcagcctcacaccaaggagggcgttgatgcctacaacgaagtgatcgcccgggtgcgaatgtgggtgaacctgaacctgtggcagaagctgaagctaagcagagatgatgccaagcctctgctgagactgaagggattcccttcctttcctctggtcgagagacaggccaacgaagtggactggtgggacatggtgtgtaacgtgaagaagctgatcaacgagaaaaaggaggatggcaaggtgttttggcagaatctggctggctacaagagacaggaagccctgagaccatacctgagcagcgaggaagatcggaagaagggaaagaaattcgctcggtaccagctgggcgacctgctgctgcacctggaaaagaagcacggcgaggactggggaaaggtgtacgacgaggcctgggagcggattgacaagaaagtggaaggcctgagcaagcacatcaagctggaagaggaacggagaagcgaggacgcccagagcaaggccgccctgaccgactggctgcgggctaaggccagcttcgtgatcgagggcctgaaggaggccgacaaggacgagttctgcagatgcgagctgaagctgcagaagtggtacggggacctgcggggaaagcccttcgccatcgaagccgagaacagcatcctggacatcagcggcttcagcaagcagtacaactgtgccttcatctggcagaaggacggcgtgaagaagctgaacctgtacctgatcatcaactacttcaagggcggcaagctgcggttcaagaagatcaaacctgaagccttcgaagccaacagattctacaccgtgatcaacaaaaagagcggcgagatcgtgcccatggaggtgaacttcaacttcgacgaccccaacctgatcatcctgcctctggcctttggcaagagacagggcagagaattcatctggaacgacctgctgtccctggaaaccggcagcctgaagctggccaacggaagagtgatcgagaagacactgtacaacagaagaacccggcaggatgagcctgccctgttcgtggccctgaccttcgagcggcgggaggtcctggactcctccaatatcaaaccaatgaacctgatcggcgtggcaagaggcgaaaacatccccgccgtgatcgccctgaccgaccccgagggctgcccactgagccggtttaaggatagcctgggaaacccaacccacatcctgagaatcggcgagagctataaggagaagcagcggaccatccaggccaagaaggaggtggagcagcggagagccggcggctacagccggaagtacgccagcaaagccaagaatctggcagacgatatggtgagaaacaccgctagagatctgctgtactacgccgtgacccaggatgccatgctgatcttcgccaacctgagccggggcttcggccggcagggcaagcggaccttcatggccgagagacagtacacacggatggaggactggctgaccgccaagctggcctacgagggcctgagcaagacctacctgtccaagacactggcccagtacacctccaagacatgcagcaactgtgggtttaccatcaccagcgccgactacgacagggtgctggagaagctgaagaagacagcaacaggctggatgaccacaattaacggcaaggagctgaaggtggagggccagattacctactacaacagatacaagagacagaacgtagtcaaggacctgtccgtcgagctggatagactgagcgaagaatctgtgaacaacgacatctcctcctggacaaagggcagaagcggagaagctctgagcctcctgaagaaaagattctcccatagacccgtgcaggagaagttcgtgtgcctgaactgcggcttcgagacacacgcagccgagcaagccgccctgaacatcgccagatcctggctgttcctgcggagccaggagtacaagaaataccagacaaacaagacaaccggcaacaccgataagagagccttcgtcgagacctggcagtccttttaccggaagaagcttaaggaggtgtggaaacctgccgtgcggtctggcggatctggcggaggctccaccagccccaagaaaaagagaaaagtctaagctgccttctgcggggcttgccttctggccatgcccttcttctctcccttgcacctgtacctcttggtctttgaataaagcctgagtaggaaggctagcaaaaaaaaaaaaaaaaaaaaaaaaaaaaaaaaaaaaaaaaaaaaaaaaaaaaaaaaaaaaaaaaaaaaaaaaaaaaaaaa

SEQ ID NO: 8984 - RNA, 8787 nt, synthetic construct
  source 1..8787: mol_type = other RNA
aggaaataagagagaaaagaagagtaagaagaaatataagagccaccatggcccctaagaagaagcgtaaagtgagccggatgaaccacgaccaggagttcgacccccctaaggtgtaccctcccgtccccgccgagaagagaaagcccatccgggtcctgagcctgttcgatggcatcgccaccggtctgctggtgctgaaggacctgggcatccaggtggataggtacattgcctccgaggtgtgcgaggactccatcaccgtgggaatggtgcgtcatcagggcaagatcatgtacgtgggcgacgtgcggagcgtgacacagaagcatatccaggagtggggccctttcgacctggtgatcggcggcagcccttgcaatgacctgagcatcgtgaacccagcccggaagggcctgtacgagggaaccggcagactgttcttcgagttttacagactgctgcacgacgcccggcctaaggaaggcgacgaccggcccttcttttggctgttcgagaatgtggtggccatgggagtcagcgacaagcgggatattagccggttcctggagagcaaccccgtgatgatcgatgccaaggaagtgagcgccgcccaccgggccagatacttctggggcaatctgcctggcatgaacagacccctggccagcaccgtgaacgacaagctggagctgcaggagtgcctggagcacggccggatcgccaagttcagcaaggtgagaaccatcaccacccgaagcaacagcatcaaacaaggcaaggaccagcactttcctgtgttcatgaacgagaaggaggacatcctgtggtgtaccgagatggagagagtgttcgggttcccagtccactacacagatgtcagcaacatgtctagactggccagacagagactgctgggaagaagctggtccgtccctgtgatcagacacctgttcgcccctctgaaggagtacttcgcctgcgtgagcagcggcaacagcaacgccaacagccggggccccagcttctctagcggcctggtgccactgtccctgagagggagccacatgggccccatggagatctacaaaaccgtgagcgcctggaagcggcagcctgtgcgcgtgctgagcctgtttcggaatatcgataaagtcctgaaaagcctgggattcctggagagcggctctggctccggcggtggcaccctgaagtacgtggaggatgtgacaaacgtggtcagacgggatgtggagaagtggggccccttcgatctggtgtacggcagcacccaacccctgggcagctcttgtgaccggtgccctggctggtacatgtttcagttccaccggatcctgcagtacgccctgccgagacaggagtcccagcggccattcttttggattttcatggacaacttgctgctgaccgaggatgaccaggaaactaccactcggttcctgcagaccgaagccgtgaccctgcaggacgtgagaggccgggactaccagaacgccatgcgggtgtggtccaacatccctggactgaaaagcaagcacgcacctctgacccctaaagaagaggagtacctgcaggcccaggtgcggagcagaagcaagctggacgcccctaaggtggatctgctggtgaagaattgcctcctgcccctgagagagtacttcaagtatttcagccagaatagtctgcccctgggaggcagcggcggcggcacccaggtgcccgtgaccttcgaggacgtggccgtgtacttctgcgagggcgagtgggagaccctggccgagtggcagaaggagctgtacagggagaccatgaaggagaactacgagaccctgaccagcctgggcttcagcagcaagaagcccagcctgatcagcaagatcgagagggaggaggacccctgcgtgagggacaagcaggacagcagggacaggaggaggctgaggagctgctggggcggcccaagcagcggcgcccctcctcccagcggcggcaggcggcccaagcagcggcgcccctcctcccagcggcggcagcccagccggctccccaacctctaccgaggagggcacctctgagtccgccacccccgagagcggccctggcacctccaccgagcccagcgagggcagcgcacccggcagccctgccggcagccccacctccacagaggagggaaccagcaccgagcccagcgaaggcagcgccccaggcaccagcaccgagcctagtgagcaggagattaaacggatcaacaagatcagaagaagacttgtgaaagacagcaacaccaagaaggccggcaagacaggccccatgaaaaccctgctggttagagtgatgacacccgatctgagagagcggctggaaaacctgagaaagaagcctgaaaatatcccccagcccatcagcaatacatctagagccaacctgaataagctgctgaccgattacaccgaaatgaagaaggcgatcctgcatgtgtactgggaagagttccagaaggaccctgtgggcctgatgagccgggtggcccagcctgccagcaagaagatcgatcagaacaagctgaaacctgagatggacgagaagggcaacctgaccaccgccggctttgcctgctctcagtgtggccagcccctgttcgtgtacaagctggagcaggtgtctgagaagggcaaggcttacaccaactacttcggacggtgcaatgtggccgagcacgaaaagctgatcctgctggcccagctgaagcccgagaaggatagcgacgaagccgtgacatatagcctgggaaagtttgggcagagggccctggatttctacagcattcatgtgaccaaggagtccacccaccccgtgaagcccctggcccagatcgccggaaacagatacgcctccggacctgtgggaaaggccctgagcgacgcatgtatgggcacaatcgcctccttcctgtctaagtaccaggacatcatcatcgaacaccagaaggtggtgaagggcaaccagaagagactggagagcctgcgggagctggccggcaaggaaaacctggaataccctagcgtgaccctgccacctcagcctcacaccaaggagggcgttgatgcctacaacgaagtgatcgcccgggtgcgaatgtgggtgaacctgaacctgtggcagaagctgaagctaagcagagatgatgccaagcctctgctgagactgaagggattcccttcctttcctctggtcgagagacaggccaacgaagtggactggtgggacatggtgtgtaacgtgaagaagctgatcaacgagaaaaaggaggatggcaaggtgttttggcagaatctggctggctacaagagacaggaagccctgagaccatacctgagcagcgaggaagatcggaagaagggaaagaaattcgctcggtaccagctgggcgacctgctgctgcacctggaaaagaagcacggcgaggactggggaaaggtgtacgacgaggcctgggagcggattgacaagaaagtggaaggcctgagcaagcacatcaagctggaagaggaacggagaagcgaggacgcccagagcaaggccgccctgaccgactggctgcgggctaaggccagcttcgtgatcgagggcctgaaggaggccgacaaggacgagttctgcagatgcgagctgaagctgcagaagtggtacggggacctgcggggaaagcccttcgccatcgaagccgagaacagcatcctggacatcagcggcttcagcaagcagtacaactgtgccttcatctggcagaaggacggcgtgaagaagctgaacctgtacctgatcatcaactacttcaagggcggcaagctgcggttcaagaagatcaaacctgaagccttcgaagccaacagattctacaccgtgatcaacaaaaagagcggcgagatcgtgcccatggaggtgaacttcaacttcgacgaccccaacctgatcatcctgcctctggcctttggcaagagacagggcagagaattcatctggaacgacctgctgtccctggaaaccggcagcctgaagctggccaacggaagagtgatcgagaagacactgtacaacagaagaacccggcaggatgagcctgccctgttcgtggccctgaccttcgagcggcgggaggtcctggactcctccaatatcaaaccaatgaacctgatcggcgtggcaagaggcgaaaacatccccgccgtgatcgccctgaccgaccccgagggctgcccactgagccggtttaaggatagcctgggaaacccaacccacatcctgagaatcggcgagagctataaggagaagcagcggaccatccaggccaagaaggaggtggagcagcggagagccggcggctacagccggaagtacgccagcaaagccaagaatctggcagacgatatggtgagaaacaccgctagagatctgctgtactacgccgtgacccaggatgccatgctgatcttcgccaacctgagccggggcttcggccggcagggcaagcggaccttcatggccgagagacagtacacacggatggaggactggctgaccgccaagctggcctacgagggcctgagcaagacctacctgtccaagacactggcccagtacacctccaagacatgcagcaactgtgggtttaccatcaccagcgccgactacgacagggtgctggagaagctgaagaagacagcaacaggctggatgaccacaattaacggcaaggagctgaaggtggagggccagattacctactacaacagatacaagagacagaacgtagtcaaggacctgtccgtcgagctggatagactgagcgaagaatctgtgaacaacgacatctcctcctggacaaagggcagaagcggagaagctctgagcctcctgaagaaaagattctcccatagacccgtgcaggagaagttcgtgtgcctgaactgcggcttcgagacacacgcagccgagcaagccgccctgaacatcgccagatcctggctgttcctgcggagccaggagtacaagaaataccagacaaacaagacaaccggcaacaccgataagagagccttcgtcgagacctggcagtccttttaccggaagaagcttaaggaggtgtggaaacctgccgtgcggtctggcggatctggcggaggctccaccagccccaagaaaaagagaaaagtctaagctgccttctgcggggcttgccttctggccatgcccttcttctctcccttgcacctgtacctcttggtctttgaataaagcctgagtaggaaggctagcaaaaaaaaaaaaaaaaaaaaaaaaaaaaaaaaaaaaaaaaaaaaaaaaaaaaaaaaaaaaaaaaaaaaaaaaaaaaaaaagcccagccggctccccaacctctaccgaggagggcacctctgagtccgccacccccgagagcggccctggcacctccaccgagcccagcgagggcagcgcacccggcagccctgccggcagccccacctccacagaggagggaaccagcaccgagcccagcgaaggcagcgccccaggcaccagcaccgagcctagtgagcaggagattaaacggatcaacaagatcagaagaagacttgtgaaagacagcaacaccaagaaggccggcaagacaggccccatgaaaaccctgctggttagagtgatgacacccgatctgagagagcggctggaaaacctgagaaagaagcctgaaaatatcccccagcccatcagcaatacatctagagccaacctgaataagctgctgaccgattacaccgaaatgaagaaggcgatcctgcatgtgtactgggaagagttccagaaggaccctgtgggcctgatgagccgggtggcccagcctgccagcaagaagatcgatcagaacaagctgaaacctgagatggacgagaagggcaacctgaccaccgccggctttgcctgctctcagtgtggccagcccctgttcgtgtacaagctggagcaggtgtctgagaagggcaaggcttacaccaactacttcggacggtgcaatgtggccgagcacgaaaagctgatcctgctggcccagctgaagcccgagaaggatagcgacgaagccgtgacatatagcctgggaaagtttgggcagagggccctggatttctacagcattcatgtgaccaaggagtccacccaccccgtgaagcccctggcccagatcgccggaaacagatacgcctccggacctgtgggaaaggccctgagcgacgcatgtatgggcacaatcgcctccttcctgtctaagtaccaggacatcatcatcgaacaccagaaggtggtgaagggcaaccagaagagactggagagcctgcgggagctggccggcaaggaaaacctggaataccctagcgtgaccctgccacctcagcctcacaccaaggagggcgttgatgcctacaacgaagtgatcgcccgggtgcgaatgtgggtgaacctgaacctgtggcagaagctgaagctaagcagagatgatgccaagcctctgctgagactgaagggattcccttcctttcctctggtcgagagacaggccaacgaagtggactggtgggacatggtgtgtaacgtgaagaagctgatcaacgagaaaaaggaggatggcaaggtgttttggcagaatctggctggctacaagagacaggaagccctgagaccatacctgagcagcgaggaagatcggaagaagggaaagaaattcgctcggtaccagctgggcgacctgctgctgcacctggaaaagaagcacggcgaggactggggaaaggtgtacgacgaggcctgggagcggattgacaagaaagtggaaggcctgagcaagcacatcaagctggaagaggaacggagaagcgaggacgcccagagcaaggccgccctgaccgactggctgcgggctaaggccagcttcgtgatcgagggcctgaaggaggccgacaaggacgagttctgcagatgcgagctgaagctgcagaagtggtacggggacctgcggggaaagcccttcgccatcgaagccgagaacagcatcctggacatcagcggcttcagcaagcagtacaactgtgccttcatctggcagaaggacggcgtgaagaagctgaacctgtacctgatcatcaactacttcaagggcggcaagctgcggttcaagaagatcaaacctgaagccttcgaagccaacagattctacaccgtgatcaacaaaaagagcggcgagatcgtgcccatggaggtgaacttcaacttcgacgaccccaacctgatcatcctgcctctggcctttggcaagagacagggcagagaattcatctggaacgacctgctgtccctggaaaccggcagcctgaagctggccaacggaagagtgatcgagaagacactgtacaacagaagaacccggcaggatgagcctgccctgttcgtggccctgaccttcgagcggcgggaggtcctggactcctccaatatcaaaccaatgaacctgatcggcgtggcaagaggcgaaaacatccccgccgtgatcgccctgaccgaccccgagggctgcccactgagccggtttaaggatagcctgggaaacccaacccacatcctgagaatcggcgagagctataaggagaagcagcggaccatccaggccaagaaggaggtggagcagcggagagccggcggctacagccggaagtacgccagcaaagccaagaatctggcagacgatatggtgagaaacaccgctagagatctgctgtactacgccgtgacccaggatgccatgctgatcttcgccaacctgagccggggcttcggccggcagggcaagcggaccttcatggccgagagacagtacacacggatggaggactggctgaccgccaagctggcctacgagggcctgagcaagacctacctgtccaagacactggcccagtacacctccaagacatgcagcaactgtgggtttaccatcaccagcgccgactacgacagggtgctggagaagctgaagaagacagcaacaggctggatgaccacaattaacggcaaggagctgaaggtggagggccagattacctactacaacagatacaagagacagaacgtagtcaaggacctgtccgtcgagctggatagactgagcgaagaatctgtgaacaacgacatctcctcctggacaaagggcagaagcggagaagctctgagcctcctgaagaaaagattctcccatagacccgtgcaggagaagttcgtgtgcctgaactgcggcttcgagacacacgcagccgagcaagccgccctgaacatcgccagatcctggctgttcctgcggagccaggagtacaagaaataccagacaaacaagacaaccggcaacaccgataagagagccttcgtcgagacctggcagtccttttaccggaagaagcttaaggaggtgtggaaacctgccgtgcggtctggcggatctggcggaggctccaccagccccaagaaaaagagaaaagtctaagctgccttctgcggggcttgccttctggccatgcccttcttctctcccttgcacctgtacctcttggtctttgaataaagcctgagtaggaaggctagcaaaaaaaaaaaaaaaaaaaaaaaaaaaaaaaaaaaaaaaaaaaaaaaaaaaaaaaaaaaaaaaaaaaaaaaaaaaaaaaa

SEQ ID NO: 8985 - RNA, 8787 nt, synthetic construct
  source 1..8787: mol_type = other RNA
aggaaataagagagaaaagaagagtaagaagaaatataagagccaccatggcccctaagaagaagcgtaaagtgagccggatgaaccacgaccaggagttcgacccccctaaggtgtaccctcccgtccccgccgagaagagaaagcccatccgggtcctgagcctgttcgatggcatcgccaccggtctgctggtgctgaaggacctgggcatccaggtggataggtacattgcctccgaggtgtgcgaggactccatcaccgtgggaatggtgcgtcatcagggcaagatcatgtacgtgggcgacgtgcggagcgtgacacagaagcatatccaggagtggggccctttcgacctggtgatcggcggcagcccttgcaatgacctgagcatcgtgaacccagcccggaagggcctgtacgagggaaccggcagactgttcttcgagttttacagactgctgcacgacgcccggcctaaggaaggcgacgaccggcccttcttttggctgttcgagaatgtggtggccatgggagtcagcgacaagcgggatattagccggttcctggagagcaaccccgtgatgatcgatgccaaggaagtgagcgccgcccaccgggccagatacttctggggcaatctgcctggcatgaacagacccctggccagcaccgtgaacgacaagctggagctgcaggagtgcctggagcacggccggatcgccaagttcagcaaggtgagaaccatcaccacccgaagcaacagcatcaaacaaggcaaggaccagcactttcctgtgttcatgaacgagaaggaggacatcctgtggtgtaccgagatggagagagtgttcgggttcccagtccactacacagatgtcagcaacatgtctagactggccagacagagactgctgggaagaagctggtccgtccctgtgatcagacacctgttcgcccctctgaaggagtacttcgcctgcgtgagcagcggcaacagcaacgccaacagccggggccccagcttctctagcggcctggtgccactgtccctgagagggagccacatgggccccatggagatctacaaaaccgtgagcgcctggaagcggcagcctgtgcgcgtgctgagcctgtttcggaatatcgataaagtcctgaaaagcctgggattcctggagagcggctctggctccggcggtggcaccctgaagtacgtggaggatgtgacaaacgtggtcagacgggatgtggagaagtggggccccttcgatctggtgtacggcagcacccaacccctgggcagctcttgtgaccggtgccctggctggtacatgtttcagttccaccggatcctgcagtacgccctgccgagacaggagtcccagcggccattcttttggattttcatggacaacttgctgctgaccgaggatgaccaggaaactaccactcggttcctgcagaccgaagccgtgaccctgcaggacgtgagaggccgggactaccagaacgccatgcgggtgtggtccaacatccctggactgaaaagcaagcacgcacctctgacccctaaagaagaggagtacctgcaggcccaggtgcggagcagaagcaagctggacgcccctaaggtggatctgctggtgaagaattgcctcctgcccctgagagagtacttcaagtatttcagccagaatagtctgcccctgggaggcagcggcggcggcgcccacggcagcctgatgttcagcgacgtgagcatcgtgttcagccaggaggagtgggagtgcctggacctggagcagagggacctgtacagggacgtgatgctggagaactacaccaacctggtgagcctgggctgcttcatcagcaagcccgacgtgatcagcctgctggagcagggcaaggagccctggaaggtggtgaggaagaggaggggccagtacgccgacctggagaccaggtacggcggcccaagcagcggcgcccctcctcccagcggcggcaggcggcccaagcagcggcgcccctcctcccagcggcggcagcccagccggctccccaacctctaccgaggagggcacctctgagtccgccacccccgagagcggccctggcacctccaccgagcccagcgagggcagcgcacccggcagccctgccggcagccccacctccacagaggagggaaccagcaccgagcccagcgaaggcagcgccccaggcaccagcaccgagcctagtgagcaggagattaaacggatcaacaagatcagaagaagacttgtgaaagacagcaacaccaagaaggccggcaagacaggccccatgaaaaccctgctggttagagtgatgacacccgatctgagagagcggctggaaaacctgagaaagaagcctgaaaatatcccccagcccatcagcaatacatctagagccaacctgaataagctgctgaccgattacaccgaaatgaagaaggcgatcctgcatgtgtactgggaagagttccagaaggaccctgtgggcctgatgagccgggtggcccagcctgccagcaagaagatcgatcagaacaagctgaaacctgagatggacgagaagggcaacctgaccaccgccggctttgcctgctctcagtgtggccagcccctgttcgtgtacaagctggagcaggtgtctgagaagggcaaggcttacaccaactacttcggacggtgcaatgtggccgagcacgaaaagctgatcctgctggcccagctgaagcccgagaaggatagcgacgaagccgtgacatatagcctgggaaagtttgggcagagggccctggatttctacagcattcatgtgaccaaggagtccacccaccccgtgaagcccctggcccagatcgccggaaacagatacgcctccggacctgtgggaaaggccctgagcgacgcatgtatgggcacaatcgcctccttcctgtctaagtaccaggacatcatcatcgaacaccagaaggtggtgaagggcaaccagaagagactggagagcctgcgggagctggccggcaaggaaaacctggaataccctagcgtgaccctgccacctcagcctcacaccaaggagggcgttgatgcctacaacgaagtgatcgcccgggtgcgaatgtgggtgaacctgaacctgtggcagaagctgaagctaagcagagatgatgccaagcctctgctgagactgaagggattcccttcctttcctctggtcgagagacaggccaacgaagtggactggtgggacatggtgtgtaacgtgaagaagctgatcaacgagaaaaaggaggatggcaaggtgttttggcagaatctggctggctacaagagacaggaagccctgagaccatacctgagcagcgaggaagatcggaagaagggaaagaaattcgctcggtaccagctgggcgacctgctgctgcacctggaaaagaagcacggcgaggactggggaaaggtgtacgacgaggcctgggagcggattgacaagaaagtggaaggcctgagcaagcacatcaagctggaagaggaacggagaagcgaggacgcccagagcaaggccgccctgaccgactggctgcgggctaaggccagcttcgtgatcgagggcctgaaggaggccgacaaggacgagttctgcagatgcgagctgaagctgcagaagtggtacggggacctgcggggaaagcccttcgccatcgaagccgagaacagcatcctggacatcagcggcttcagcaagcagtacaactgtgccttcatctggcagaaggacggcgtgaagaagctgaacctgtacctgatcatcaactacttcaagggcggcaagctgcggttcaagaagatcaaacctgaagccttcgaagccaacagattctacaccgtgatcaacaaaaagagcggcgagatcgtgcccatggaggtgaacttcaacttcgacgaccccaacctgatcatcctgcctctggcctttggcaagagacagggcagagaattcatctggaacgacctgctgtccctggaaaccggcagcctgaagctggccaacggaagagtgatcgagaagacactgtacaacagaagaacccggcaggatgagcctgccctgttcgtggccctgaccttcgagcggcgggaggtcctggactcctccaatatcaaaccaatgaacctgatcggcgtggcaagaggcgaaaacatccccgccgtgatcgccctgaccgaccccgagggctgcccactgagccggtttaaggatagcctgggaaacccaacccacatcctgagaatcggcgagagctataaggagaagcagcggaccatccaggccaagaaggaggtggagcagcggagagccggcggctacagccggaagtacgccagcaaagccaagaatctggcagacgatatggtgagaaacaccgctagagatctgctgtactacgccgtgacccaggatgccatgctgatcttcgccaacctgagccggggcttcggccggcagggcaagcggaccttcatggccgagagacagtacacacggatggaggactggctgaccgccaagctggcctacgagggcctgagcaagacctacctgtccaagacactggcccagtacacctccaagacatgcagcaactgtgggtttaccatcaccagcgccgactacgacagggtgctggagaagctgaagaagacagcaacaggctggatgaccacaattaacggcaaggagctgaaggtggagggccagattacctactacaacagatacaagagacagaacgtagtcaaggacctgtccgtcgagctggatagactgagcgaagaatctgtgaacaacgacatctcctcctggacaaagggcagaagcggagaagctctgagcctcctgaagaaaagattctcccatagacccgtgcaggagaagttcgtgtgcctgaactgcggcttcgagacacacgcagccgagcaagccgccctgaacatcgccagatcctggctgttcctgcggagccaggagtacaagaaataccagacaaacaagacaaccggcaacaccgataagagagccttcgtcgagacctggcagtccttttaccggaagaagcttaaggaggtgtggaaacctgccgtgcggtctggcggatctggcggaggctccaccagccccaagaaaaagagaaaagtctaagctgccttctgcggggcttgccttctggccatgcccttcttctctcccttgcacctgtacctcttggtctttgaataaagcctgagtaggaaggctagcaaaaaaaaaaaaaaaaaaaaaaaaaaaaaaaaaaaaaaaaaaaaaaaaaaaaaaaaaaaaaaaaaaaaaaaaaaaaaaaagcccagccggctccccaacctctaccgaggagggcacctctgagtccgccacccccgagagcggccctggcacctccaccgagcccagcgagggcagcgcacccggcagccctgccggcagccccacctccacagaggagggaaccagcaccgagcccagcgaaggcagcgccccaggcaccagcaccgagcctagtgagcaggagattaaacggatcaacaagatcagaagaagacttgtgaaagacagcaacaccaagaaggccggcaagacaggccccatgaaaaccctgctggttagagtgatgacacccgatctgagagagcggctggaaaacctgagaaagaagcctgaaaatatcccccagcccatcagcaatacatctagagccaacctgaataagctgctgaccgattacaccgaaatgaagaaggcgatcctgcatgtgtactgggaagagttccagaaggaccctgtgggcctgatgagccgggtggcccagcctgccagcaagaagatcgatcagaacaagctgaaacctgagatggacgagaagggcaacctgaccaccgccggctttgcctgctctcagtgtggccagcccctgttcgtgtacaagctggagcaggtgtctgagaagggcaaggcttacaccaactacttcggacggtgcaatgtggccgagcacgaaaagctgatcctgctggcccagctgaagcccgagaaggatagcgacgaagccgtgacatatagcctgggaaagtttgggcagagggccctggatttctacagcattcatgtgaccaaggagtccacccaccccgtgaagcccctggcccagatcgccggaaacagatacgcctccggacctgtgggaaaggccctgagcgacgcatgtatgggcacaatcgcctccttcctgtctaagtaccaggacatcatcatcgaacaccagaaggtggtgaagggcaaccagaagagactggagagcctgcgggagctggccggcaaggaaaacctggaataccctagcgtgaccctgccacctcagcctcacaccaaggagggcgttgatgcctacaacgaagtgatcgcccgggtgcgaatgtgggtgaacctgaacctgtggcagaagctgaagctaagcagagatgatgccaagcctctgctgagactgaagggattcccttcctttcctctggtcgagagacaggccaacgaagtggactggtgggacatggtgtgtaacgtgaagaagctgatcaacgagaaaaaggaggatggcaaggtgttttggcagaatctggctggctacaagagacaggaagccctgagaccatacctgagcagcgaggaagatcggaagaagggaaagaaattcgctcggtaccagctgggcgacctgctgctgcacctggaaaagaagcacggcgaggactggggaaaggtgtacgacgaggcctgggagcggattgacaagaaagtggaaggcctgagcaagcacatcaagctggaagaggaacggagaagcgaggacgcccagagcaaggccgccctgaccgactggctgcgggctaaggccagcttcgtgatcgagggcctgaaggaggccgacaaggacgagttctgcagatgcgagctgaagctgcagaagtggtacggggacctgcggggaaagcccttcgccatcgaagccgagaacagcatcctggacatcagcggcttcagcaagcagtacaactgtgccttcatctggcagaaggacggcgtgaagaagctgaacctgtacctgatcatcaactacttcaagggcggcaagctgcggttcaagaagatcaaacctgaagccttcgaagccaacagattctacaccgtgatcaacaaaaagagcggcgagatcgtgcccatggaggtgaacttcaacttcgacgaccccaacctgatcatcctgcctctggcctttggcaagagacagggcagagaattcatctggaacgacctgctgtccctggaaaccggcagcctgaagctggccaacggaagagtgatcgagaagacactgtacaacagaagaacccggcaggatgagcctgccctgttcgtggccctgaccttcgagcggcgggaggtcctggactcctccaatatcaaaccaatgaacctgatcggcgtggcaagaggcgaaaacatccccgccgtgatcgccctgaccgaccccgagggctgcccactgagccggtttaaggatagcctgggaaacccaacccacatcctgagaatcggcgagagctataaggagaagcagcggaccatccaggccaagaaggaggtggagcagcggagagccggcggctacagccggaagtacgccagcaaagccaagaatctggcagacgatatggtgagaaacaccgctagagatctgctgtactacgccgtgacccaggatgccatgctgatcttcgccaacctgagccggggcttcggccggcagggcaagcggaccttcatggccgagagacagtacacacggatggaggactggctgaccgccaagctggcctacgagggcctgagcaagacctacctgtccaagacactggcccagtacacctccaagacatgcagcaactgtgggtttaccatcaccagcgccgactacgacagggtgctggagaagctgaagaagacagcaacaggctggatgaccacaattaacggcaaggagctgaaggtggagggccagattacctactacaacagatacaagagacagaacgtagtcaaggacctgtccgtcgagctggatagactgagcgaagaatctgtgaacaacgacatctcctcctggacaaagggcagaagcggagaagctctgagcctcctgaagaaaagattctcccatagacccgtgcaggagaagttcgtgtgcctgaactgcggcttcgagacacacgcagccgagcaagccgccctgaacatcgccagatcctggctgttcctgcggagccaggagtacaagaaataccagacaaacaagacaaccggcaacaccgataagagagccttcgtcgagacctggcagtccttttaccggaagaagcttaaggaggtgtggaaacctgccgtgcggtctggcggatctggcggaggctccaccagccccaagaaaaagagaaaagtctaagctgccttctgcggggcttgccttctggccatgcccttcttctctcccttgcacctgtacctcttggtctttgaataaagcctgagtaggaaggctagcaaaaaaaaaaaaaaaaaaaaaaaaaaaaaaaaaaaaaaaaaaaaaaaaaaaaaaaaaaaaaaaaaaaaaaaaaaaaaaaa

SEQ ID NO: 8986 - RNA, 8787 nt, synthetic construct
  source 1..8787: mol_type = other RNA
aggaaataagagagaaaagaagagtaagaagaaatataagagccaccatggcccctaagaagaagcgtaaagtgagccggatgaaccacgaccaggagttcgacccccctaaggtgtaccctcccgtccccgccgagaagagaaagcccatccgggtcctgagcctgttcgatggcatcgccaccggtctgctggtgctgaaggacctgggcatccaggtggataggtacattgcctccgaggtgtgcgaggactccatcaccgtgggaatggtgcgtcatcagggcaagatcatgtacgtgggcgacgtgcggagcgtgacacagaagcatatccaggagtggggccctttcgacctggtgatcggcggcagcccttgcaatgacctgagcatcgtgaacccagcccggaagggcctgtacgagggaaccggcagactgttcttcgagttttacagactgctgcacgacgcccggcctaaggaaggcgacgaccggcccttcttttggctgttcgagaatgtggtggccatgggagtcagcgacaagcgggatattagccggttcctggagagcaaccccgtgatgatcgatgccaaggaagtgagcgccgcccaccgggccagatacttctggggcaatctgcctggcatgaacagacccctggccagcaccgtgaacgacaagctggagctgcaggagtgcctggagcacggccggatcgccaagttcagcaaggtgagaaccatcaccacccgaagcaacagcatcaaacaaggcaaggaccagcactttcctgtgttcatgaacgagaaggaggacatcctgtggtgtaccgagatggagagagtgttcgggttcccagtccactacacagatgtcagcaacatgtctagactggccagacagagactgctgggaagaagctggtccgtccctgtgatcagacacctgttcgcccctctgaaggagtacttcgcctgcgtgagcagcggcaacagcaacgccaacagccggggccccagcttctctagcggcctggtgccactgtccctgagagggagccacatgggccccatggagatctacaaaaccgtgagcgcctggaagcggcagcctgtgcgcgtgctgagcctgtttcggaatatcgataaagtcctgaaaagcctgggattcctggagagcggctctggctccggcggtggcaccctgaagtacgtggaggatgtgacaaacgtggtcagacgggatgtggagaagtggggccccttcgatctggtgtacggcagcacccaacccctgggcagctcttgtgaccggtgccctggctggtacatgtttcagttccaccggatcctgcagtacgccctgccgagacaggagtcccagcggccattcttttggattttcatggacaacttgctgctgaccgaggatgaccaggaaactaccactcggttcctgcagaccgaagccgtgaccctgcaggacgtgagaggccgggactaccagaacgccatgcgggtgtggtccaacatccctggactgaaaagcaagcacgcacctctgacccctaaagaagaggagtacctgcaggcccaggtgcggagcagaagcaagctggacgcccctaaggtggatctgctggtgaagaattgcctcctgcccctgagagagtacttcaagtatttcagccagaatagtctgcccctgggaggcagcggcggcggcagcaaggcccccgtgaccttcggcgacctggccatctacttcagccaggaggagtgggagtggctgagccccatccagaaggacctgtacgaggacgtgatgctggagaactacaggaacctggtgagcctgggcctgagcttcaggaggcccaacgtgatcaccctgctggagaagggcaaggccccctggatggtggagcccgtgaggaggaggagggcccccggctggaccaccatgatgggcggcccaagcagcggcgcccctcctcccagcggcggcaggcggcccaagcagcggcgcccctcctcccagcggcggcagcccagccggctccccaacctctaccgaggagggcacctctgagtccgccacccccgagagcggccctggcacctccaccgagcccagcgagggcagcgcacccggcagccctgccggcagccccacctccacagaggagggaaccagcaccgagcccagcgaaggcagcgccccaggcaccagcaccgagcctagtgagcaggagattaaacggatcaacaagatcagaagaagacttgtgaaagacagcaacaccaagaaggccggcaagacaggccccatgaaaaccctgctggttagagtgatgacacccgatctgagagagcggctggaaaacctgagaaagaagcctgaaaatatcccccagcccatcagcaatacatctagagccaacctgaataagctgctgaccgattacaccgaaatgaagaaggcgatcctgcatgtgtactgggaagagttccagaaggaccctgtgggcctgatgagccgggtggcccagcctgccagcaagaagatcgatcagaacaagctgaaacctgagatggacgagaagggcaacctgaccaccgccggctttgcctgctctcagtgtggccagcccctgttcgtgtacaagctggagcaggtgtctgagaagggcaaggcttacaccaactacttcggacggtgcaatgtggccgagcacgaaaagctgatcctgctggcccagctgaagcccgagaaggatagcgacgaagccgtgacatatagcctgggaaagtttgggcagagggccctggatttctacagcattcatgtgaccaaggagtccacccaccccgtgaagcccctggcccagatcgccggaaacagatacgcctccggacctgtgggaaaggccctgagcgacgcatgtatgggcacaatcgcctccttcctgtctaagtaccaggacatcatcatcgaacaccagaaggtggtgaagggcaaccagaagagactggagagcctgcgggagctggccggcaaggaaaacctggaataccctagcgtgaccctgccacctcagcctcacaccaaggagggcgttgatgcctacaacgaagtgatcgcccgggtgcgaatgtgggtgaacctgaacctgtggcagaagctgaagctaagcagagatgatgccaagcctctgctgagactgaagggattcccttcctttcctctggtcgagagacaggccaacgaagtggactggtgggacatggtgtgtaacgtgaagaagctgatcaacgagaaaaaggaggatggcaaggtgttttggcagaatctggctggctacaagagacaggaagccctgagaccatacctgagcagcgaggaagatcggaagaagggaaagaaattcgctcggtaccagctgggcgacctgctgctgcacctggaaaagaagcacggcgaggactggggaaaggtgtacgacgaggcctgggagcggattgacaagaaagtggaaggcctgagcaagcacatcaagctggaagaggaacggagaagcgaggacgcccagagcaaggccgccctgaccgactggctgcgggctaaggccagcttcgtgatcgagggcctgaaggaggccgacaaggacgagttctgcagatgcgagctgaagctgcagaagtggtacggggacctgcggggaaagcccttcgccatcgaagccgagaacagcatcctggacatcagcggcttcagcaagcagtacaactgtgccttcatctggcagaaggacggcgtgaagaagctgaacctgtacctgatcatcaactacttcaagggcggcaagctgcggttcaagaagatcaaacctgaagccttcgaagccaacagattctacaccgtgatcaacaaaaagagcggcgagatcgtgcccatggaggtgaacttcaacttcgacgaccccaacctgatcatcctgcctctggcctttggcaagagacagggcagagaattcatctggaacgacctgctgtccctggaaaccggcagcctgaagctggccaacggaagagtgatcgagaagacactgtacaacagaagaacccggcaggatgagcctgccctgttcgtggccctgaccttcgagcggcgggaggtcctggactcctccaatatcaaaccaatgaacctgatcggcgtggcaagaggcgaaaacatccccgccgtgatcgccctgaccgaccccgagggctgcccactgagccggtttaaggatagcctgggaaacccaacccacatcctgagaatcggcgagagctataaggagaagcagcggaccatccaggccaagaaggaggtggagcagcggagagccggcggctacagccggaagtacgccagcaaagccaagaatctggcagacgatatggtgagaaacaccgctagagatctgctgtactacgccgtgacccaggatgccatgctgatcttcgccaacctgagccggggcttcggccggcagggcaagcggaccttcatggccgagagacagtacacacggatggaggactggctgaccgccaagctggcctacgagggcctgagcaagacctacctgtccaagacactggcccagtacacctccaagacatgcagcaactgtgggtttaccatcaccagcgccgactacgacagggtgctggagaagctgaagaagacagcaacaggctggatgaccacaattaacggcaaggagctgaaggtggagggccagattacctactacaacagatacaagagacagaacgtagtcaaggacctgtccgtcgagctggatagactgagcgaagaatctgtgaacaacgacatctcctcctggacaaagggcagaagcggagaagctctgagcctcctgaagaaaagattctcccatagacccgtgcaggagaagttcgtgtgcctgaactgcggcttcgagacacacgcagccgagcaagccgccctgaacatcgccagatcctggctgttcctgcggagccaggagtacaagaaataccagacaaacaagacaaccggcaacaccgataagagagccttcgtcgagacctggcagtccttttaccggaagaagcttaaggaggtgtggaaacctgccgtgcggtctggcggatctggcggaggctccaccagccccaagaaaaagagaaaagtctaagctgccttctgcggggcttgccttctggccatgcccttcttctctcccttgcacctgtacctcttggtctttgaataaagcctgagtaggaaggctagcaaaaaaaaaaaaaaaaaaaaaaaaaaaaaaaaaaaaaaaaaaaaaaaaaaaaaaaaaaaaaaaaaaaaaaaaaaaaaaaagcccagccggctccccaacctctaccgaggagggcacctctgagtccgccacccccgagagcggccctggcacctccaccgagcccagcgagggcagcgcacccggcagccctgccggcagccccacctccacagaggagggaaccagcaccgagcccagcgaaggcagcgccccaggcaccagcaccgagcctagtgagcaggagattaaacggatcaacaagatcagaagaagacttgtgaaagacagcaacaccaagaaggccggcaagacaggccccatgaaaaccctgctggttagagtgatgacacccgatctgagagagcggctggaaaacctgagaaagaagcctgaaaatatcccccagcccatcagcaatacatctagagccaacctgaataagctgctgaccgattacaccgaaatgaagaaggcgatcctgcatgtgtactgggaagagttccagaaggaccctgtgggcctgatgagccgggtggcccagcctgccagcaagaagatcgatcagaacaagctgaaacctgagatggacgagaagggcaacctgaccaccgccggctttgcctgctctcagtgtggccagcccctgttcgtgtacaagctggagcaggtgtctgagaagggcaaggcttacaccaactacttcggacggtgcaatgtggccgagcacgaaaagctgatcctgctggcccagctgaagcccgagaaggatagcgacgaagccgtgacatatagcctgggaaagtttgggcagagggccctggatttctacagcattcatgtgaccaaggagtccacccaccccgtgaagcccctggcccagatcgccggaaacagatacgcctccggacctgtgggaaaggccctgagcgacgcatgtatgggcacaatcgcctccttcctgtctaagtaccaggacatcatcatcgaacaccagaaggtggtgaagggcaaccagaagagactggagagcctgcgggagctggccggcaaggaaaacctggaataccctagcgtgaccctgccacctcagcctcacaccaaggagggcgttgatgcctacaacgaagtgatcgcccgggtgcgaatgtgggtgaacctgaacctgtggcagaagctgaagctaagcagagatgatgccaagcctctgctgagactgaagggattcccttcctttcctctggtcgagagacaggccaacgaagtggactggtgggacatggtgtgtaacgtgaagaagctgatcaacgagaaaaaggaggatggcaaggtgttttggcagaatctggctggctacaagagacaggaagccctgagaccatacctgagcagcgaggaagatcggaagaagggaaagaaattcgctcggtaccagctgggcgacctgctgctgcacctggaaaagaagcacggcgaggactggggaaaggtgtacgacgaggcctgggagcggattgacaagaaagtggaaggcctgagcaagcacatcaagctggaagaggaacggagaagcgaggacgcccagagcaaggccgccctgaccgactggctgcgggctaaggccagcttcgtgatcgagggcctgaaggaggccgacaaggacgagttctgcagatgcgagctgaagctgcagaagtggtacggggacctgcggggaaagcccttcgccatcgaagccgagaacagcatcctggacatcagcggcttcagcaagcagtacaactgtgccttcatctggcagaaggacggcgtgaagaagctgaacctgtacctgatcatcaactacttcaagggcggcaagctgcggttcaagaagatcaaacctgaagccttcgaagccaacagattctacaccgtgatcaacaaaaagagcggcgagatcgtgcccatggaggtgaacttcaacttcgacgaccccaacctgatcatcctgcctctggcctttggcaagagacagggcagagaattcatctggaacgacctgctgtccctggaaaccggcagcctgaagctggccaacggaagagtgatcgagaagacactgtacaacagaagaacccggcaggatgagcctgccctgttcgtggccctgaccttcgagcggcgggaggtcctggactcctccaatatcaaaccaatgaacctgatcggcgtggcaagaggcgaaaacatccccgccgtgatcgccctgaccgaccccgagggctgcccactgagccggtttaaggatagcctgggaaacccaacccacatcctgagaatcggcgagagctataaggagaagcagcggaccatccaggccaagaaggaggtggagcagcggagagccggcggctacagccggaagtacgccagcaaagccaagaatctggcagacgatatggtgagaaacaccgctagagatctgctgtactacgccgtgacccaggatgccatgctgatcttcgccaacctgagccggggcttcggccggcagggcaagcggaccttcatggccgagagacagtacacacggatggaggactggctgaccgccaagctggcctacgagggcctgagcaagacctacctgtccaagacactggcccagtacacctccaagacatgcagcaactgtgggtttaccatcaccagcgccgactacgacagggtgctggagaagctgaagaagacagcaacaggctggatgaccacaattaacggcaaggagctgaaggtggagggccagattacctactacaacagatacaagagacagaacgtagtcaaggacctgtccgtcgagctggatagactgagcgaagaatctgtgaacaacgacatctcctcctggacaaagggcagaagcggagaagctctgagcctcctgaagaaaagattctcccatagacccgtgcaggagaagttcgtgtgcctgaactgcggcttcgagacacacgcagccgagcaagccgccctgaacatcgccagatcctggctgttcctgcggagccaggagtacaagaaataccagacaaacaagacaaccggcaacaccgataagagagccttcgtcgagacctggcagtccttttaccggaagaagcttaaggaggtgtggaaacctgccgtgcggtctggcggatctggcggaggctccaccagccccaagaaaaagagaaaagtctaagctgccttctgcggggcttgccttctggccatgcccttcttctctcccttgcacctgtacctcttggtctttgaataaagcctgagtaggaaggctagcaaaaaaaaaaaaaaaaaaaaaaaaaaaaaaaaaaaaaaaaaaaaaaaaaaaaaaaaaaaaaaaaaaaaaaaaaaaaaaaa

SEQ ID NO: 8987 - RNA, 8787 nt, synthetic construct
  source 1..8787: mol_type = other RNA
aggaaataagagagaaaagaagagtaagaagaaatataagagccaccatggcccctaagaagaagcgtaaagtgagccggatgaaccacgaccaggagttcgacccccctaaggtgtaccctcccgtccccgccgagaagagaaagcccatccgggtcctgagcctgttcgatggcatcgccaccggtctgctggtgctgaaggacctgggcatccaggtggataggtacattgcctccgaggtgtgcgaggactccatcaccgtgggaatggtgcgtcatcagggcaagatcatgtacgtgggcgacgtgcggagcgtgacacagaagcatatccaggagtggggccctttcgacctggtgatcggcggcagcccttgcaatgacctgagcatcgtgaacccagcccggaagggcctgtacgagggaaccggcagactgttcttcgagttttacagactgctgcacgacgcccggcctaaggaaggcgacgaccggcccttcttttggctgttcgagaatgtggtggccatgggagtcagcgacaagcgggatattagccggttcctggagagcaaccccgtgatgatcgatgccaaggaagtgagcgccgcccaccgggccagatacttctggggcaatctgcctggcatgaacagacccctggccagcaccgtgaacgacaagctggagctgcaggagtgcctggagcacggccggatcgccaagttcagcaaggtgagaaccatcaccacccgaagcaacagcatcaaacaaggcaaggaccagcactttcctgtgttcatgaacgagaaggaggacatcctgtggtgtaccgagatggagagagtgttcgggttcccagtccactacacagatgtcagcaacatgtctagactggccagacagagactgctgggaagaagctggtccgtccctgtgatcagacacctgttcgcccctctgaaggagtacttcgcctgcgtgagcagcggcaacagcaacgccaacagccggggccccagcttctctagcggcctggtgccactgtccctgagagggagccacatgggccccatggagatctacaaaaccgtgagcgcctggaagcggcagcctgtgcgcgtgctgagcctgtttcggaatatcgataaagtcctgaaaagcctgggattcctggagagcggctctggctccggcggtggcaccctgaagtacgtggaggatgtgacaaacgtggtcagacgggatgtggagaagtggggccccttcgatctggtgtacggcagcacccaacccctgggcagctcttgtgaccggtgccctggctggtacatgtttcagttccaccggatcctgcagtacgccctgccgagacaggagtcccagcggccattcttttggattttcatggacaacttgctgctgaccgaggatgaccaggaaactaccactcggttcctgcagaccgaagccgtgaccctgcaggacgtgagaggccgggactaccagaacgccatgcgggtgtggtccaacatccctggactgaaaagcaagcacgcacctctgacccctaaagaagaggagtacctgcaggcccaggtgcggagcagaagcaagctggacgcccctaaggtggatctgctggtgaagaattgcctcctgcccctgagagagtacttcaagtatttcagccagaatagtctgcccctgggaggcagcggcggcggcttccaggaggccgtgaccttcaaggacgtggccgtggtgttcaccgaggaggagctgggcctgctggaccccccccagaggaagctgtacagggaggtgatgctggagaacttcaggaacctggtgagcgtgggccacagcagcagcaagcccgacgtgatcagccagctggagagggaggagaagctgtgcgtgaaggagatccacacccagaggggcaggcacagcggcggcaggaaccagggcggcccaagcagcggcgcccctcctcccagcggcggcaggcggcccaagcagcggcgcccctcctcccagcggcggcagcccagccggctccccaacctctaccgaggagggcacctctgagtccgccacccccgagagcggccctggcacctccaccgagcccagcgagggcagcgcacccggcagccctgccggcagccccacctccacagaggagggaaccagcaccgagcccagcgaaggcagcgccccaggcaccagcaccgagcctagtgagcaggagattaaacggatcaacaagatcagaagaagacttgtgaaagacagcaacaccaagaaggccggcaagacaggccccatgaaaaccctgctggttagagtgatgacacccgatctgagagagcggctggaaaacctgagaaagaagcctgaaaatatcccccagcccatcagcaatacatctagagccaacctgaataagctgctgaccgattacaccgaaatgaagaaggcgatcctgcatgtgtactgggaagagttccagaaggaccctgtgggcctgatgagccgggtggcccagcctgccagcaagaagatcgatcagaacaagctgaaacctgagatggacgagaagggcaacctgaccaccgccggctttgcctgctctcagtgtggccagcccctgttcgtgtacaagctggagcaggtgtctgagaagggcaaggcttacaccaactacttcggacggtgcaatgtggccgagcacgaaaagctgatcctgctggcccagctgaagcccgagaaggatagcgacgaagccgtgacatatagcctgggaaagtttgggcagagggccctggatttctacagcattcatgtgaccaaggagtccacccaccccgtgaagcccctggcccagatcgccggaaacagatacgcctccggacctgtgggaaaggccctgagcgacgcatgtatgggcacaatcgcctccttcctgtctaagtaccaggacatcatcatcgaacaccagaaggtggtgaagggcaaccagaagagactggagagcctgcgggagctggccggcaaggaaaacctggaataccctagcgtgaccctgccacctcagcctcacaccaaggagggcgttgatgcctacaacgaagtgatcgcccgggtgcgaatgtgggtgaacctgaacctgtggcagaagctgaagctaagcagagatgatgccaagcctctgctgagactgaagggattcccttcctttcctctggtcgagagacaggccaacgaagtggactggtgggacatggtgtgtaacgtgaagaagctgatcaacgagaaaaaggaggatggcaaggtgttttggcagaatctggctggctacaagagacaggaagccctgagaccatacctgagcagcgaggaagatcggaagaagggaaagaaattcgctcggtaccagctgggcgacctgctgctgcacctggaaaagaagcacggcgaggactggggaaaggtgtacgacgaggcctgggagcggattgacaagaaagtggaaggcctgagcaagcacatcaagctggaagaggaacggagaagcgaggacgcccagagcaaggccgccctgaccgactggctgcgggctaaggccagcttcgtgatcgagggcctgaaggaggccgacaaggacgagttctgcagatgcgagctgaagctgcagaagtggtacggggacctgcggggaaagcccttcgccatcgaagccgagaacagcatcctggacatcagcggcttcagcaagcagtacaactgtgccttcatctggcagaaggacggcgtgaagaagctgaacctgtacctgatcatcaactacttcaagggcggcaagctgcggttcaagaagatcaaacctgaagccttcgaagccaacagattctacaccgtgatcaacaaaaagagcggcgagatcgtgcccatggaggtgaacttcaacttcgacgaccccaacctgatcatcctgcctctggcctttggcaagagacagggcagagaattcatctggaacgacctgctgtccctggaaaccggcagcctgaagctggccaacggaagagtgatcgagaagacactgtacaacagaagaacccggcaggatgagcctgccctgttcgtggccctgaccttcgagcggcgggaggtcctggactcctccaatatcaaaccaatgaacctgatcggcgtggcaagaggcgaaaacatccccgccgtgatcgccctgaccgaccccgagggctgcccactgagccggtttaaggatagcctgggaaacccaacccacatcctgagaatcggcgagagctataaggagaagcagcggaccatccaggccaagaaggaggtggagcagcggagagccggcggctacagccggaagtacgccagcaaagccaagaatctggcagacgatatggtgagaaacaccgctagagatctgctgtactacgccgtgacccaggatgccatgctgatcttcgccaacctgagccggggcttcggccggcagggcaagcggaccttcatggccgagagacagtacacacggatggaggactggctgaccgccaagctggcctacgagggcctgagcaagacctacctgtccaagacactggcccagtacacctccaagacatgcagcaactgtgggtttaccatcaccagcgccgactacgacagggtgctggagaagctgaagaagacagcaacaggctggatgaccacaattaacggcaaggagctgaaggtggagggccagattacctactacaacagatacaagagacagaacgtagtcaaggacctgtccgtcgagctggatagactgagcgaagaatctgtgaacaacgacatctcctcctggacaaagggcagaagcggagaagctctgagcctcctgaagaaaagattctcccatagacccgtgcaggagaagttcgtgtgcctgaactgcggcttcgagacacacgcagccgagcaagccgccctgaacatcgccagatcctggctgttcctgcggagccaggagtacaagaaataccagacaaacaagacaaccggcaacaccgataagagagccttcgtcgagacctggcagtccttttaccggaagaagcttaaggaggtgtggaaacctgccgtgcggtctggcggatctggcggaggctccaccagccccaagaaaaagagaaaagtctaagctgccttctgcggggcttgccttctggccatgcccttcttctctcccttgcacctgtacctcttggtctttgaataaagcctgagtaggaaggctagcaaaaaaaaaaaaaaaaaaaaaaaaaaaaaaaaaaaaaaaaaaaaaaaaaaaaaaaaaaaaaaaaaaaaaaaaaaaaaaaagcccagccggctccccaacctctaccgaggagggcacctctgagtccgccacccccgagagcggccctggcacctccaccgagcccagcgagggcagcgcacccggcagccctgccggcagccccacctccacagaggagggaaccagcaccgagcccagcgaaggcagcgccccaggcaccagcaccgagcctagtgagcaggagattaaacggatcaacaagatcagaagaagacttgtgaaagacagcaacaccaagaaggccggcaagacaggccccatgaaaaccctgctggttagagtgatgacacccgatctgagagagcggctggaaaacctgagaaagaagcctgaaaatatcccccagcccatcagcaatacatctagagccaacctgaataagctgctgaccgattacaccgaaatgaagaaggcgatcctgcatgtgtactgggaagagttccagaaggaccctgtgggcctgatgagccgggtggcccagcctgccagcaagaagatcgatcagaacaagctgaaacctgagatggacgagaagggcaacctgaccaccgccggctttgcctgctctcagtgtggccagcccctgttcgtgtacaagctggagcaggtgtctgagaagggcaaggcttacaccaactacttcggacggtgcaatgtggccgagcacgaaaagctgatcctgctggcccagctgaagcccgagaaggatagcgacgaagccgtgacatatagcctgggaaagtttgggcagagggccctggatttctacagcattcatgtgaccaaggagtccacccaccccgtgaagcccctggcccagatcgccggaaacagatacgcctccggacctgtgggaaaggccctgagcgacgcatgtatgggcacaatcgcctccttcctgtctaagtaccaggacatcatcatcgaacaccagaaggtggtgaagggcaaccagaagagactggagagcctgcgggagctggccggcaaggaaaacctggaataccctagcgtgaccctgccacctcagcctcacaccaaggagggcgttgatgcctacaacgaagtgatcgcccgggtgcgaatgtgggtgaacctgaacctgtggcagaagctgaagctaagcagagatgatgccaagcctctgctgagactgaagggattcccttcctttcctctggtcgagagacaggccaacgaagtggactggtgggacatggtgtgtaacgtgaagaagctgatcaacgagaaaaaggaggatggcaaggtgttttggcagaatctggctggctacaagagacaggaagccctgagaccatacctgagcagcgaggaagatcggaagaagggaaagaaattcgctcggtaccagctgggcgacctgctgctgcacctggaaaagaagcacggcgaggactggggaaaggtgtacgacgaggcctgggagcggattgacaagaaagtggaaggcctgagcaagcacatcaagctggaagaggaacggagaagcgaggacgcccagagcaaggccgccctgaccgactggctgcgggctaaggccagcttcgtgatcgagggcctgaaggaggccgacaaggacgagttctgcagatgcgagctgaagctgcagaagtggtacggggacctgcggggaaagcccttcgccatcgaagccgagaacagcatcctggacatcagcggcttcagcaagcagtacaactgtgccttcatctggcagaaggacggcgtgaagaagctgaacctgtacctgatcatcaactacttcaagggcggcaagctgcggttcaagaagatcaaacctgaagccttcgaagccaacagattctacaccgtgatcaacaaaaagagcggcgagatcgtgcccatggaggtgaacttcaacttcgacgaccccaacctgatcatcctgcctctggcctttggcaagagacagggcagagaattcatctggaacgacctgctgtccctggaaaccggcagcctgaagctggccaacggaagagtgatcgagaagacactgtacaacagaagaacccggcaggatgagcctgccctgttcgtggccctgaccttcgagcggcgggaggtcctggactcctccaatatcaaaccaatgaacctgatcggcgtggcaagaggcgaaaacatccccgccgtgatcgccctgaccgaccccgagggctgcccactgagccggtttaaggatagcctgggaaacccaacccacatcctgagaatcggcgagagctataaggagaagcagcggaccatccaggccaagaaggaggtggagcagcggagagccggcggctacagccggaagtacgccagcaaagccaagaatctggcagacgatatggtgagaaacaccgctagagatctgctgtactacgccgtgacccaggatgccatgctgatcttcgccaacctgagccggggcttcggccggcagggcaagcggaccttcatggccgagagacagtacacacggatggaggactggctgaccgccaagctggcctacgagggcctgagcaagacctacctgtccaagacactggcccagtacacctccaagacatgcagcaactgtgggtttaccatcaccagcgccgactacgacagggtgctggagaagctgaagaagacagcaacaggctggatgaccacaattaacggcaaggagctgaaggtggagggccagattacctactacaacagatacaagagacagaacgtagtcaaggacctgtccgtcgagctggatagactgagcgaagaatctgtgaacaacgacatctcctcctggacaaagggcagaagcggagaagctctgagcctcctgaagaaaagattctcccatagacccgtgcaggagaagttcgtgtgcctgaactgcggcttcgagacacacgcagccgagcaagccgccctgaacatcgccagatcctggctgttcctgcggagccaggagtacaagaaataccagacaaacaagacaaccggcaacaccgataagagagccttcgtcgagacctggcagtccttttaccggaagaagcttaaggaggtgtggaaacctgccgtgcggtctggcggatctggcggaggctccaccagccccaagaaaaagagaaaagtctaagctgccttctgcggggcttgccttctggccatgcccttcttctctcccttgcacctgtacctcttggtctttgaataaagcctgagtaggaaggctagcaaaaaaaaaaaaaaaaaaaaaaaaaaaaaaaaaaaaaaaaaaaaaaaaaaaaaaaaaaaaaaaaaaaaaaaaaaaaaaaa

SEQ ID NO: 8988 - RNA, 8787 nt, synthetic construct
  source 1..8787: mol_type = other RNA
aggaaataagagagaaaagaagagtaagaagaaatataagagccaccatggcccctaagaagaagcgtaaagtgagccggatgaaccacgaccaggagttcgacccccctaaggtgtaccctcccgtccccgccgagaagagaaagcccatccgggtcctgagcctgttcgatggcatcgccaccggtctgctggtgctgaaggacctgggcatccaggtggataggtacattgcctccgaggtgtgcgaggactccatcaccgtgggaatggtgcgtcatcagggcaagatcatgtacgtgggcgacgtgcggagcgtgacacagaagcatatccaggagtggggccctttcgacctggtgatcggcggcagcccttgcaatgacctgagcatcgtgaacccagcccggaagggcctgtacgagggaaccggcagactgttcttcgagttttacagactgctgcacgacgcccggcctaaggaaggcgacgaccggcccttcttttggctgttcgagaatgtggtggccatgggagtcagcgacaagcgggatattagccggttcctggagagcaaccccgtgatgatcgatgccaaggaagtgagcgccgcccaccgggccagatacttctggggcaatctgcctggcatgaacagacccctggccagcaccgtgaacgacaagctggagctgcaggagtgcctggagcacggccggatcgccaagttcagcaaggtgagaaccatcaccacccgaagcaacagcatcaaacaaggcaaggaccagcactttcctgtgttcatgaacgagaaggaggacatcctgtggtgtaccgagatggagagagtgttcgggttcccagtccactacacagatgtcagcaacatgtctagactggccagacagagactgctgggaagaagctggtccgtccctgtgatcagacacctgttcgcccctctgaaggagtacttcgcctgcgtgagcagcggcaacagcaacgccaacagccggggccccagcttctctagcggcctggtgccactgtccctgagagggagccacatgggccccatggagatctacaaaaccgtgagcgcctggaagcggcagcctgtgcgcgtgctgagcctgtttcggaatatcgataaagtcctgaaaagcctgggattcctggagagcggctctggctccggcggtggcaccctgaagtacgtggaggatgtgacaaacgtggtcagacgggatgtggagaagtggggccccttcgatctggtgtacggcagcacccaacccctgggcagctcttgtgaccggtgccctggctggtacatgtttcagttccaccggatcctgcagtacgccctgccgagacaggagtcccagcggccattcttttggattttcatggacaacttgctgctgaccgaggatgaccaggaaactaccactcggttcctgcagaccgaagccgtgaccctgcaggacgtgagaggccgggactaccagaacgccatgcgggtgtggtccaacatccctggactgaaaagcaagcacgcacctctgacccctaaagaagaggagtacctgcaggcccaggtgcggagcagaagcaagctggacgcccctaaggtggatctgctggtgaagaattgcctcctgcccctgagagagtacttcaagtatttcagccagaatagtctgcccctgggaggcagcggcggcggcaggcaggccttcctggccttcggcgacgtgaccgtggacttcacccagaaggagtggaggctgctgagccccgcccagagggccctgtacagggaggtgaccctggagaactacagccacctggtgagcctgggcatcctgcacagcaagcccgagctgatcaggaggctggagcagggcgaggtgccctggggcgaggagaggaggaggaggcccggcccctgcgccggcatctacgccgagggcggcccaagcagcggcgcccctcctcccagcggcggcaggcggcccaagcagcggcgcccctcctcccagcggcggcagcccagccggctccccaacctctaccgaggagggcacctctgagtccgccacccccgagagcggccctggcacctccaccgagcccagcgagggcagcgcacccggcagccctgccggcagccccacctccacagaggagggaaccagcaccgagcccagcgaaggcagcgccccaggcaccagcaccgagcctagtgagcaggagattaaacggatcaacaagatcagaagaagacttgtgaaagacagcaacaccaagaaggccggcaagacaggccccatgaaaaccctgctggttagagtgatgacacccgatctgagagagcggctggaaaacctgagaaagaagcctgaaaatatcccccagcccatcagcaatacatctagagccaacctgaataagctgctgaccgattacaccgaaatgaagaaggcgatcctgcatgtgtactgggaagagttccagaaggaccctgtgggcctgatgagccgggtggcccagcctgccagcaagaagatcgatcagaacaagctgaaacctgagatggacgagaagggcaacctgaccaccgccggctttgcctgctctcagtgtggccagcccctgttcgtgtacaagctggagcaggtgtctgagaagggcaaggcttacaccaactacttcggacggtgcaatgtggccgagcacgaaaagctgatcctgctggcccagctgaagcccgagaaggatagcgacgaagccgtgacatatagcctgggaaagtttgggcagagggccctggatttctacagcattcatgtgaccaaggagtccacccaccccgtgaagcccctggcccagatcgccggaaacagatacgcctccggacctgtgggaaaggccctgagcgacgcatgtatgggcacaatcgcctccttcctgtctaagtaccaggacatcatcatcgaacaccagaaggtggtgaagggcaaccagaagagactggagagcctgcgggagctggccggcaaggaaaacctggaataccctagcgtgaccctgccacctcagcctcacaccaaggagggcgttgatgcctacaacgaagtgatcgcccgggtgcgaatgtgggtgaacctgaacctgtggcagaagctgaagctaagcagagatgatgccaagcctctgctgagactgaagggattcccttcctttcctctggtcgagagacaggccaacgaagtggactggtgggacatggtgtgtaacgtgaagaagctgatcaacgagaaaaaggaggatggcaaggtgttttggcagaatctggctggctacaagagacaggaagccctgagaccatacctgagcagcgaggaagatcggaagaagggaaagaaattcgctcggtaccagctgggcgacctgctgctgcacctggaaaagaagcacggcgaggactggggaaaggtgtacgacgaggcctgggagcggattgacaagaaagtggaaggcctgagcaagcacatcaagctggaagaggaacggagaagcgaggacgcccagagcaaggccgccctgaccgactggctgcgggctaaggccagcttcgtgatcgagggcctgaaggaggccgacaaggacgagttctgcagatgcgagctgaagctgcagaagtggtacggggacctgcggggaaagcccttcgccatcgaagccgagaacagcatcctggacatcagcggcttcagcaagcagtacaactgtgccttcatctggcagaaggacggcgtgaagaagctgaacctgtacctgatcatcaactacttcaagggcggcaagctgcggttcaagaagatcaaacctgaagccttcgaagccaacagattctacaccgtgatcaacaaaaagagcggcgagatcgtgcccatggaggtgaacttcaacttcgacgaccccaacctgatcatcctgcctctggcctttggcaagagacagggcagagaattcatctggaacgacctgctgtccctggaaaccggcagcctgaagctggccaacggaagagtgatcgagaagacactgtacaacagaagaacccggcaggatgagcctgccctgttcgtggccctgaccttcgagcggcgggaggtcctggactcctccaatatcaaaccaatgaacctgatcggcgtggcaagaggcgaaaacatccccgccgtgatcgccctgaccgaccccgagggctgcccactgagccggtttaaggatagcctgggaaacccaacccacatcctgagaatcggcgagagctataaggagaagcagcggaccatccaggccaagaaggaggtggagcagcggagagccggcggctacagccggaagtacgccagcaaagccaagaatctggcagacgatatggtgagaaacaccgctagagatctgctgtactacgccgtgacccaggatgccatgctgatcttcgccaacctgagccggggcttcggccggcagggcaagcggaccttcatggccgagagacagtacacacggatggaggactggctgaccgccaagctggcctacgagggcctgagcaagacctacctgtccaagacactggcccagtacacctccaagacatgcagcaactgtgggtttaccatcaccagcgccgactacgacagggtgctggagaagctgaagaagacagcaacaggctggatgaccacaattaacggcaaggagctgaaggtggagggccagattacctactacaacagatacaagagacagaacgtagtcaaggacctgtccgtcgagctggatagactgagcgaagaatctgtgaacaacgacatctcctcctggacaaagggcagaagcggagaagctctgagcctcctgaagaaaagattctcccatagacccgtgcaggagaagttcgtgtgcctgaactgcggcttcgagacacacgcagccgagcaagccgccctgaacatcgccagatcctggctgttcctgcggagccaggagtacaagaaataccagacaaacaagacaaccggcaacaccgataagagagccttcgtcgagacctggcagtccttttaccggaagaagcttaaggaggtgtggaaacctgccgtgcggtctggcggatctggcggaggctccaccagccccaagaaaaagagaaaagtctaagctgccttctgcggggcttgccttctggccatgcccttcttctctcccttgcacctgtacctcttggtctttgaataaagcctgagtaggaaggctagcaaaaaaaaaaaaaaaaaaaaaaaaaaaaaaaaaaaaaaaaaaaaaaaaaaaaaaaaaaaaaaaaaaaaaaaaaaaaaaaagcccagccggctccccaacctctaccgaggagggcacctctgagtccgccacccccgagagcggccctggcacctccaccgagcccagcgagggcagcgcacccggcagccctgccggcagccccacctccacagaggagggaaccagcaccgagcccagcgaaggcagcgccccaggcaccagcaccgagcctagtgagcaggagattaaacggatcaacaagatcagaagaagacttgtgaaagacagcaacaccaagaaggccggcaagacaggccccatgaaaaccctgctggttagagtgatgacacccgatctgagagagcggctggaaaacctgagaaagaagcctgaaaatatcccccagcccatcagcaatacatctagagccaacctgaataagctgctgaccgattacaccgaaatgaagaaggcgatcctgcatgtgtactgggaagagttccagaaggaccctgtgggcctgatgagccgggtggcccagcctgccagcaagaagatcgatcagaacaagctgaaacctgagatggacgagaagggcaacctgaccaccgccggctttgcctgctctcagtgtggccagcccctgttcgtgtacaagctggagcaggtgtctgagaagggcaaggcttacaccaactacttcggacggtgcaatgtggccgagcacgaaaagctgatcctgctggcccagctgaagcccgagaaggatagcgacgaagccgtgacatatagcctgggaaagtttgggcagagggccctggatttctacagcattcatgtgaccaaggagtccacccaccccgtgaagcccctggcccagatcgccggaaacagatacgcctccggacctgtgggaaaggccctgagcgacgcatgtatgggcacaatcgcctccttcctgtctaagtaccaggacatcatcatcgaacaccagaaggtggtgaagggcaaccagaagagactggagagcctgcgggagctggccggcaaggaaaacctggaataccctagcgtgaccctgccacctcagcctcacaccaaggagggcgttgatgcctacaacgaagtgatcgcccgggtgcgaatgtgggtgaacctgaacctgtggcagaagctgaagctaagcagagatgatgccaagcctctgctgagactgaagggattcccttcctttcctctggtcgagagacaggccaacgaagtggactggtgggacatggtgtgtaacgtgaagaagctgatcaacgagaaaaaggaggatggcaaggtgttttggcagaatctggctggctacaagagacaggaagccctgagaccatacctgagcagcgaggaagatcggaagaagggaaagaaattcgctcggtaccagctgggcgacctgctgctgcacctggaaaagaagcacggcgaggactggggaaaggtgtacgacgaggcctgggagcggattgacaagaaagtggaaggcctgagcaagcacatcaagctggaagaggaacggagaagcgaggacgcccagagcaaggccgccctgaccgactggctgcgggctaaggccagcttcgtgatcgagggcctgaaggaggccgacaaggacgagttctgcagatgcgagctgaagctgcagaagtggtacggggacctgcggggaaagcccttcgccatcgaagccgagaacagcatcctggacatcagcggcttcagcaagcagtacaactgtgccttcatctggcagaaggacggcgtgaagaagctgaacctgtacctgatcatcaactacttcaagggcggcaagctgcggttcaagaagatcaaacctgaagccttcgaagccaacagattctacaccgtgatcaacaaaaagagcggcgagatcgtgcccatggaggtgaacttcaacttcgacgaccccaacctgatcatcctgcctctggcctttggcaagagacagggcagagaattcatctggaacgacctgctgtccctggaaaccggcagcctgaagctggccaacggaagagtgatcgagaagacactgtacaacagaagaacccggcaggatgagcctgccctgttcgtggccctgaccttcgagcggcgggaggtcctggactcctccaatatcaaaccaatgaacctgatcggcgtggcaagaggcgaaaacatccccgccgtgatcgccctgaccgaccccgagggctgcccactgagccggtttaaggatagcctgggaaacccaacccacatcctgagaatcggcgagagctataaggagaagcagcggaccatccaggccaagaaggaggtggagcagcggagagccggcggctacagccggaagtacgccagcaaagccaagaatctggcagacgatatggtgagaaacaccgctagagatctgctgtactacgccgtgacccaggatgccatgctgatcttcgccaacctgagccggggcttcggccggcagggcaagcggaccttcatggccgagagacagtacacacggatggaggactggctgaccgccaagctggcctacgagggcctgagcaagacctacctgtccaagacactggcccagtacacctccaagacatgcagcaactgtgggtttaccatcaccagcgccgactacgacagggtgctggagaagctgaagaagacagcaacaggctggatgaccacaattaacggcaaggagctgaaggtggagggccagattacctactacaacagatacaagagacagaacgtagtcaaggacctgtccgtcgagctggatagactgagcgaagaatctgtgaacaacgacatctcctcctggacaaagggcagaagcggagaagctctgagcctcctgaagaaaagattctcccatagacccgtgcaggagaagttcgtgtgcctgaactgcggcttcgagacacacgcagccgagcaagccgccctgaacatcgccagatcctggctgttcctgcggagccaggagtacaagaaataccagacaaacaagacaaccggcaacaccgataagagagccttcgtcgagacctggcagtccttttaccggaagaagcttaaggaggtgtggaaacctgccgtgcggtctggcggatctggcggaggctccaccagccccaagaaaaagagaaaagtctaagctgccttctgcggggcttgccttctggccatgcccttcttctctcccttgcacctgtacctcttggtctttgaataaagcctgagtaggaaggctagcaaaaaaaaaaaaaaaaaaaaaaaaaaaaaaaaaaaaaaaaaaaaaaaaaaaaaaaaaaaaaaaaaaaaaaaaaaaaaaaa

SEQ ID NO: 8989 - RNA, 8787 nt, synthetic construct
  source 1..8787: mol_type = other RNA
aggaaataagagagaaaagaagagtaagaagaaatataagagccaccatggcccctaagaagaagcgtaaagtgagccggatgaaccacgaccaggagttcgacccccctaaggtgtaccctcccgtccccgccgagaagagaaagcccatccgggtcctgagcctgttcgatggcatcgccaccggtctgctggtgctgaaggacctgggcatccaggtggataggtacattgcctccgaggtgtgcgaggactccatcaccgtgggaatggtgcgtcatcagggcaagatcatgtacgtgggcgacgtgcggagcgtgacacagaagcatatccaggagtggggccctttcgacctggtgatcggcggcagcccttgcaatgacctgagcatcgtgaacccagcccggaagggcctgtacgagggaaccggcagactgttcttcgagttttacagactgctgcacgacgcccggcctaaggaaggcgacgaccggcccttcttttggctgttcgagaatgtggtggccatgggagtcagcgacaagcgggatattagccggttcctggagagcaaccccgtgatgatcgatgccaaggaagtgagcgccgcccaccgggccagatacttctggggcaatctgcctggcatgaacagacccctggccagcaccgtgaacgacaagctggagctgcaggagtgcctggagcacggccggatcgccaagttcagcaaggtgagaaccatcaccacccgaagcaacagcatcaaacaaggcaaggaccagcactttcctgtgttcatgaacgagaaggaggacatcctgtggtgtaccgagatggagagagtgttcgggttcccagtccactacacagatgtcagcaacatgtctagactggccagacagagactgctgggaagaagctggtccgtccctgtgatcagacacctgttcgcccctctgaaggagtacttcgcctgcgtgagcagcggcaacagcaacgccaacagccggggccccagcttctctagcggcctggtgccactgtccctgagagggagccacatgggccccatggagatctacaaaaccgtgagcgcctggaagcggcagcctgtgcgcgtgctgagcctgtttcggaatatcgataaagtcctgaaaagcctgggattcctggagagcggctctggctccggcggtggcaccctgaagtacgtggaggatgtgacaaacgtggtcagacgggatgtggagaagtggggccccttcgatctggtgtacggcagcacccaacccctgggcagctcttgtgaccggtgccctggctggtacatgtttcagttccaccggatcctgcagtacgccctgccgagacaggagtcccagcggccattcttttggattttcatggacaacttgctgctgaccgaggatgaccaggaaactaccactcggttcctgcagaccgaagccgtgaccctgcaggacgtgagaggccgggactaccagaacgccatgcgggtgtggtccaacatccctggactgaaaagcaagcacgcacctctgacccctaaagaagaggagtacctgcaggcccaggtgcggagcagaagcaagctggacgcccctaaggtggatctgctggtgaagaattgcctcctgcccctgagagagtacttcaagtatttcagccagaatagtctgcccctgggaggcagcggcggcggcccccaggagagcgtgaccttcaaggacgtggccgtggacttcacctgggaggagtggggctacctggacaccagccagaaggagctgtaccaggaggtgatgctggagaactacaggaacctggtgagcctgggcttcgtggtggccaagcccgacgtgatcagccagctggagcagggcgaggccccctggaggcccgagggcaggttccccaggagcaggcaccccgacagcgacaccaggggcggcccaagcagcggcgcccctcctcccagcggcggcaggcggcccaagcagcggcgcccctcctcccagcggcggcagcccagccggctccccaacctctaccgaggagggcacctctgagtccgccacccccgagagcggccctggcacctccaccgagcccagcgagggcagcgcacccggcagccctgccggcagccccacctccacagaggagggaaccagcaccgagcccagcgaaggcagcgccccaggcaccagcaccgagcctagtgagcaggagattaaacggatcaacaagatcagaagaagacttgtgaaagacagcaacaccaagaaggccggcaagacaggccccatgaaaaccctgctggttagagtgatgacacccgatctgagagagcggctggaaaacctgagaaagaagcctgaaaatatcccccagcccatcagcaatacatctagagccaacctgaataagctgctgaccgattacaccgaaatgaagaaggcgatcctgcatgtgtactgggaagagttccagaaggaccctgtgggcctgatgagccgggtggcccagcctgccagcaagaagatcgatcagaacaagctgaaacctgagatggacgagaagggcaacctgaccaccgccggctttgcctgctctcagtgtggccagcccctgttcgtgtacaagctggagcaggtgtctgagaagggcaaggcttacaccaactacttcggacggtgcaatgtggccgagcacgaaaagctgatcctgctggcccagctgaagcccgagaaggatagcgacgaagccgtgacatatagcctgggaaagtttgggcagagggccctggatttctacagcattcatgtgaccaaggagtccacccaccccgtgaagcccctggcccagatcgccggaaacagatacgcctccggacctgtgggaaaggccctgagcgacgcatgtatgggcacaatcgcctccttcctgtctaagtaccaggacatcatcatcgaacaccagaaggtggtgaagggcaaccagaagagactggagagcctgcgggagctggccggcaaggaaaacctggaataccctagcgtgaccctgccacctcagcctcacaccaaggagggcgttgatgcctacaacgaagtgatcgcccgggtgcgaatgtgggtgaacctgaacctgtggcagaagctgaagctaagcagagatgatgccaagcctctgctgagactgaagggattcccttcctttcctctggtcgagagacaggccaacgaagtggactggtgggacatggtgtgtaacgtgaagaagctgatcaacgagaaaaaggaggatggcaaggtgttttggcagaatctggctggctacaagagacaggaagccctgagaccatacctgagcagcgaggaagatcggaagaagggaaagaaattcgctcggtaccagctgggcgacctgctgctgcacctggaaaagaagcacggcgaggactggggaaaggtgtacgacgaggcctgggagcggattgacaagaaagtggaaggcctgagcaagcacatcaagctggaagaggaacggagaagcgaggacgcccagagcaaggccgccctgaccgactggctgcgggctaaggccagcttcgtgatcgagggcctgaaggaggccgacaaggacgagttctgcagatgcgagctgaagctgcagaagtggtacggggacctgcggggaaagcccttcgccatcgaagccgagaacagcatcctggacatcagcggcttcagcaagcagtacaactgtgccttcatctggcagaaggacggcgtgaagaagctgaacctgtacctgatcatcaactacttcaagggcggcaagctgcggttcaagaagatcaaacctgaagccttcgaagccaacagattctacaccgtgatcaacaaaaagagcggcgagatcgtgcccatggaggtgaacttcaacttcgacgaccccaacctgatcatcctgcctctggcctttggcaagagacagggcagagaattcatctggaacgacctgctgtccctggaaaccggcagcctgaagctggccaacggaagagtgatcgagaagacactgtacaacagaagaacccggcaggatgagcctgccctgttcgtggccctgaccttcgagcggcgggaggtcctggactcctccaatatcaaaccaatgaacctgatcggcgtggcaagaggcgaaaacatccccgccgtgatcgccctgaccgaccccgagggctgcccactgagccggtttaaggatagcctgggaaacccaacccacatcctgagaatcggcgagagctataaggagaagcagcggaccatccaggccaagaaggaggtggagcagcggagagccggcggctacagccggaagtacgccagcaaagccaagaatctggcagacgatatggtgagaaacaccgctagagatctgctgtactacgccgtgacccaggatgccatgctgatcttcgccaacctgagccggggcttcggccggcagggcaagcggaccttcatggccgagagacagtacacacggatggaggactggctgaccgccaagctggcctacgagggcctgagcaagacctacctgtccaagacactggcccagtacacctccaagacatgcagcaactgtgggtttaccatcaccagcgccgactacgacagggtgctggagaagctgaagaagacagcaacaggctggatgaccacaattaacggcaaggagctgaaggtggagggccagattacctactacaacagatacaagagacagaacgtagtcaaggacctgtccgtcgagctggatagactgagcgaagaatctgtgaacaacgacatctcctcctggacaaagggcagaagcggagaagctctgagcctcctgaagaaaagattctcccatagacccgtgcaggagaagttcgtgtgcctgaactgcggcttcgagacacacgcagccgagcaagccgccctgaacatcgccagatcctggctgttcctgcggagccaggagtacaagaaataccagacaaacaagacaaccggcaacaccgataagagagccttcgtcgagacctggcagtccttttaccggaagaagcttaaggaggtgtggaaacctgccgtgcggtctggcggatctggcggaggctccaccagccccaagaaaaagagaaaagtctaagctgccttctgcggggcttgccttctggccatgcccttcttctctcccttgcacctgtacctcttggtctttgaataaagcctgagtaggaaggctagcaaaaaaaaaaaaaaaaaaaaaaaaaaaaaaaaaaaaaaaaaaaaaaaaaaaaaaaaaaaaaaaaaaaaaaaaaaaaaaaagcccagccggctccccaacctctaccgaggagggcacctctgagtccgccacccccgagagcggccctggcacctccaccgagcccagcgagggcagcgcacccggcagccctgccggcagccccacctccacagaggagggaaccagcaccgagcccagcgaaggcagcgccccaggcaccagcaccgagcctagtgagcaggagattaaacggatcaacaagatcagaagaagacttgtgaaagacagcaacaccaagaaggccggcaagacaggccccatgaaaaccctgctggttagagtgatgacacccgatctgagagagcggctggaaaacctgagaaagaagcctgaaaatatcccccagcccatcagcaatacatctagagccaacctgaataagctgctgaccgattacaccgaaatgaagaaggcgatcctgcatgtgtactgggaagagttccagaaggaccctgtgggcctgatgagccgggtggcccagcctgccagcaagaagatcgatcagaacaagctgaaacctgagatggacgagaagggcaacctgaccaccgccggctttgcctgctctcagtgtggccagcccctgttcgtgtacaagctggagcaggtgtctgagaagggcaaggcttacaccaactacttcggacggtgcaatgtggccgagcacgaaaagctgatcctgctggcccagctgaagcccgagaaggatagcgacgaagccgtgacatatagcctgggaaagtttgggcagagggccctggatttctacagcattcatgtgaccaaggagtccacccaccccgtgaagcccctggcccagatcgccggaaacagatacgcctccggacctgtgggaaaggccctgagcgacgcatgtatgggcacaatcgcctccttcctgtctaagtaccaggacatcatcatcgaacaccagaaggtggtgaagggcaaccagaagagactggagagcctgcgggagctggccggcaaggaaaacctggaataccctagcgtgaccctgccacctcagcctcacaccaaggagggcgttgatgcctacaacgaagtgatcgcccgggtgcgaatgtgggtgaacctgaacctgtggcagaagctgaagctaagcagagatgatgccaagcctctgctgagactgaagggattcccttcctttcctctggtcgagagacaggccaacgaagtggactggtgggacatggtgtgtaacgtgaagaagctgatcaacgagaaaaaggaggatggcaaggtgttttggcagaatctggctggctacaagagacaggaagccctgagaccatacctgagcagcgaggaagatcggaagaagggaaagaaattcgctcggtaccagctgggcgacctgctgctgcacctggaaaagaagcacggcgaggactggggaaaggtgtacgacgaggcctgggagcggattgacaagaaagtggaaggcctgagcaagcacatcaagctggaagaggaacggagaagcgaggacgcccagagcaaggccgccctgaccgactggctgcgggctaaggccagcttcgtgatcgagggcctgaaggaggccgacaaggacgagttctgcagatgcgagctgaagctgcagaagtggtacggggacctgcggggaaagcccttcgccatcgaagccgagaacagcatcctggacatcagcggcttcagcaagcagtacaactgtgccttcatctggcagaaggacggcgtgaagaagctgaacctgtacctgatcatcaactacttcaagggcggcaagctgcggttcaagaagatcaaacctgaagccttcgaagccaacagattctacaccgtgatcaacaaaaagagcggcgagatcgtgcccatggaggtgaacttcaacttcgacgaccccaacctgatcatcctgcctctggcctttggcaagagacagggcagagaattcatctggaacgacctgctgtccctggaaaccggcagcctgaagctggccaacggaagagtgatcgagaagacactgtacaacagaagaacccggcaggatgagcctgccctgttcgtggccctgaccttcgagcggcgggaggtcctggactcctccaatatcaaaccaatgaacctgatcggcgtggcaagaggcgaaaacatccccgccgtgatcgccctgaccgaccccgagggctgcccactgagccggtttaaggatagcctgggaaacccaacccacatcctgagaatcggcgagagctataaggagaagcagcggaccatccaggccaagaaggaggtggagcagcggagagccggcggctacagccggaagtacgccagcaaagccaagaatctggcagacgatatggtgagaaacaccgctagagatctgctgtactacgccgtgacccaggatgccatgctgatcttcgccaacctgagccggggcttcggccggcagggcaagcggaccttcatggccgagagacagtacacacggatggaggactggctgaccgccaagctggcctacgagggcctgagcaagacctacctgtccaagacactggcccagtacacctccaagacatgcagcaactgtgggtttaccatcaccagcgccgactacgacagggtgctggagaagctgaagaagacagcaacaggctggatgaccacaattaacggcaaggagctgaaggtggagggccagattacctactacaacagatacaagagacagaacgtagtcaaggacctgtccgtcgagctggatagactgagcgaagaatctgtgaacaacgacatctcctcctggacaaagggcagaagcggagaagctctgagcctcctgaagaaaagattctcccatagacccgtgcaggagaagttcgtgtgcctgaactgcggcttcgagacacacgcagccgagcaagccgccctgaacatcgccagatcctggctgttcctgcggagccaggagtacaagaaataccagacaaacaagacaaccggcaacaccgataagagagccttcgtcgagacctggcagtccttttaccggaagaagcttaaggaggtgtggaaacctgccgtgcggtctggcggatctggcggaggctccaccagccccaagaaaaagagaaaagtctaagctgccttctgcggggcttgccttctggccatgcccttcttctctcccttgcacctgtacctcttggtctttgaataaagcctgagtaggaaggctagcaaaaaaaaaaaaaaaaaaaaaaaaaaaaaaaaaaaaaaaaaaaaaaaaaaaaaaaaaaaaaaaaaaaaaaaaaaaaaaaa

SEQ ID NO: 8990 - RNA, 8787 nt, synthetic construct
  source 1..8787: mol_type = other RNA
aggaaataagagagaaaagaagagtaagaagaaatataagagccaccatggcccctaagaagaagcgtaaagtgagccggatgaaccacgaccaggagttcgacccccctaaggtgtaccctcccgtccccgccgagaagagaaagcccatccgggtcctgagcctgttcgatggcatcgccaccggtctgctggtgctgaaggacctgggcatccaggtggataggtacattgcctccgaggtgtgcgaggactccatcaccgtgggaatggtgcgtcatcagggcaagatcatgtacgtgggcgacgtgcggagcgtgacacagaagcatatccaggagtggggccctttcgacctggtgatcggcggcagcccttgcaatgacctgagcatcgtgaacccagcccggaagggcctgtacgagggaaccggcagactgttcttcgagttttacagactgctgcacgacgcccggcctaaggaaggcgacgaccggcccttcttttggctgttcgagaatgtggtggccatgggagtcagcgacaagcgggatattagccggttcctggagagcaaccccgtgatgatcgatgccaaggaagtgagcgccgcccaccgggccagatacttctggggcaatctgcctggcatgaacagacccctggccagcaccgtgaacgacaagctggagctgcaggagtgcctggagcacggccggatcgccaagttcagcaaggtgagaaccatcaccacccgaagcaacagcatcaaacaaggcaaggaccagcactttcctgtgttcatgaacgagaaggaggacatcctgtggtgtaccgagatggagagagtgttcgggttcccagtccactacacagatgtcagcaacatgtctagactggccagacagagactgctgggaagaagctggtccgtccctgtgatcagacacctgttcgcccctctgaaggagtacttcgcctgcgtgagcagcggcaacagcaacgccaacagccggggccccagcttctctagcggcctggtgccactgtccctgagagggagccacatgggccccatggagatctacaaaaccgtgagcgcctggaagcggcagcctgtgcgcgtgctgagcctgtttcggaatatcgataaagtcctgaaaagcctgggattcctggagagcggctctggctccggcggtggcaccctgaagtacgtggaggatgtgacaaacgtggtcagacgggatgtggagaagtggggccccttcgatctggtgtacggcagcacccaacccctgggcagctcttgtgaccggtgccctggctggtacatgtttcagttccaccggatcctgcagtacgccctgccgagacaggagtcccagcggccattcttttggattttcatggacaacttgctgctgaccgaggatgaccaggaaactaccactcggttcctgcagaccgaagccgtgaccctgcaggacgtgagaggccgggactaccagaacgccatgcgggtgtggtccaacatccctggactgaaaagcaagcacgcacctctgacccctaaagaagaggagtacctgcaggcccaggtgcggagcagaagcaagctggacgcccctaaggtggatctgctggtgaagaattgcctcctgcccctgagagagtacttcaagtatttcagccagaatagtctgcccctgggaggcagcggcggcggcccccagaagctggtgaccttcgaggacgtggccgtgtacttcacccccaccgagtgggacggcctgagccccgcccagagggccctgtacagggacgtgatgctggagaactacggcaacgtggccagcctgggcttccccatcctgaagcccgccgtgatcagccagctggagggcggcggcgagctgggcatccccagcctgctggccgccggcgtgggcagcgacccccccggcctgtggggcggcccaagcagcggcgcccctcctcccagcggcggcaggcggcccaagcagcggcgcccctcctcccagcggcggcagcccagccggctccccaacctctaccgaggagggcacctctgagtccgccacccccgagagcggccctggcacctccaccgagcccagcgagggcagcgcacccggcagccctgccggcagccccacctccacagaggagggaaccagcaccgagcccagcgaaggcagcgccccaggcaccagcaccgagcctagtgagcaggagattaaacggatcaacaagatcagaagaagacttgtgaaagacagcaacaccaagaaggccggcaagacaggccccatgaaaaccctgctggttagagtgatgacacccgatctgagagagcggctggaaaacctgagaaagaagcctgaaaatatcccccagcccatcagcaatacatctagagccaacctgaataagctgctgaccgattacaccgaaatgaagaaggcgatcctgcatgtgtactgggaagagttccagaaggaccctgtgggcctgatgagccgggtggcccagcctgccagcaagaagatcgatcagaacaagctgaaacctgagatggacgagaagggcaacctgaccaccgccggctttgcctgctctcagtgtggccagcccctgttcgtgtacaagctggagcaggtgtctgagaagggcaaggcttacaccaactacttcggacggtgcaatgtggccgagcacgaaaagctgatcctgctggcccagctgaagcccgagaaggatagcgacgaagccgtgacatatagcctgggaaagtttgggcagagggccctggatttctacagcattcatgtgaccaaggagtccacccaccccgtgaagcccctggcccagatcgccggaaacagatacgcctccggacctgtgggaaaggccctgagcgacgcatgtatgggcacaatcgcctccttcctgtctaagtaccaggacatcatcatcgaacaccagaaggtggtgaagggcaaccagaagagactggagagcctgcgggagctggccggcaaggaaaacctggaataccctagcgtgaccctgccacctcagcctcacaccaaggagggcgttgatgcctacaacgaagtgatcgcccgggtgcgaatgtgggtgaacctgaacctgtggcagaagctgaagctaagcagagatgatgccaagcctctgctgagactgaagggattcccttcctttcctctggtcgagagacaggccaacgaagtggactggtgggacatggtgtgtaacgtgaagaagctgatcaacgagaaaaaggaggatggcaaggtgttttggcagaatctggctggctacaagagacaggaagccctgagaccatacctgagcagcgaggaagatcggaagaagggaaagaaattcgctcggtaccagctgggcgacctgctgctgcacctggaaaagaagcacggcgaggactggggaaaggtgtacgacgaggcctgggagcggattgacaagaaagtggaaggcctgagcaagcacatcaagctggaagaggaacggagaagcgaggacgcccagagcaaggccgccctgaccgactggctgcgggctaaggccagcttcgtgatcgagggcctgaaggaggccgacaaggacgagttctgcagatgcgagctgaagctgcagaagtggtacggggacctgcggggaaagcccttcgccatcgaagccgagaacagcatcctggacatcagcggcttcagcaagcagtacaactgtgccttcatctggcagaaggacggcgtgaagaagctgaacctgtacctgatcatcaactacttcaagggcggcaagctgcggttcaagaagatcaaacctgaagccttcgaagccaacagattctacaccgtgatcaacaaaaagagcggcgagatcgtgcccatggaggtgaacttcaacttcgacgaccccaacctgatcatcctgcctctggcctttggcaagagacagggcagagaattcatctggaacgacctgctgtccctggaaaccggcagcctgaagctggccaacggaagagtgatcgagaagacactgtacaacagaagaacccggcaggatgagcctgccctgttcgtggccctgaccttcgagcggcgggaggtcctggactcctccaatatcaaaccaatgaacctgatcggcgtggcaagaggcgaaaacatccccgccgtgatcgccctgaccgaccccgagggctgcccactgagccggtttaaggatagcctgggaaacccaacccacatcctgagaatcggcgagagctataaggagaagcagcggaccatccaggccaagaaggaggtggagcagcggagagccggcggctacagccggaagtacgccagcaaagccaagaatctggcagacgatatggtgagaaacaccgctagagatctgctgtactacgccgtgacccaggatgccatgctgatcttcgccaacctgagccggggcttcggccggcagggcaagcggaccttcatggccgagagacagtacacacggatggaggactggctgaccgccaagctggcctacgagggcctgagcaagacctacctgtccaagacactggcccagtacacctccaagacatgcagcaactgtgggtttaccatcaccagcgccgactacgacagggtgctggagaagctgaagaagacagcaacaggctggatgaccacaattaacggcaaggagctgaaggtggagggccagattacctactacaacagatacaagagacagaacgtagtcaaggacctgtccgtcgagctggatagactgagcgaagaatctgtgaacaacgacatctcctcctggacaaagggcagaagcggagaagctctgagcctcctgaagaaaagattctcccatagacccgtgcaggagaagttcgtgtgcctgaactgcggcttcgagacacacgcagccgagcaagccgccctgaacatcgccagatcctggctgttcctgcggagccaggagtacaagaaataccagacaaacaagacaaccggcaacaccgataagagagccttcgtcgagacctggcagtccttttaccggaagaagcttaaggaggtgtggaaacctgccgtgcggtctggcggatctggcggaggctccaccagccccaagaaaaagagaaaagtctaagctgccttctgcggggcttgccttctggccatgcccttcttctctcccttgcacctgtacctcttggtctttgaataaagcctgagtaggaaggctagcaaaaaaaaaaaaaaaaaaaaaaaaaaaaaaaaaaaaaaaaaaaaaaaaaaaaaaaaaaaaaaaaaaaaaaaaaaaaaaaagcccagccggctccccaacctctaccgaggagggcacctctgagtccgccacccccgagagcggccctggcacctccaccgagcccagcgagggcagcgcacccggcagccctgccggcagccccacctccacagaggagggaaccagcaccgagcccagcgaaggcagcgccccaggcaccagcaccgagcctagtgagcaggagattaaacggatcaacaagatcagaagaagacttgtgaaagacagcaacaccaagaaggccggcaagacaggccccatgaaaaccctgctggttagagtgatgacacccgatctgagagagcggctggaaaacctgagaaagaagcctgaaaatatcccccagcccatcagcaatacatctagagccaacctgaataagctgctgaccgattacaccgaaatgaagaaggcgatcctgcatgtgtactgggaagagttccagaaggaccctgtgggcctgatgagccgggtggcccagcctgccagcaagaagatcgatcagaacaagctgaaacctgagatggacgagaagggcaacctgaccaccgccggctttgcctgctctcagtgtggccagcccctgttcgtgtacaagctggagcaggtgtctgagaagggcaaggcttacaccaactacttcggacggtgcaatgtggccgagcacgaaaagctgatcctgctggcccagctgaagcccgagaaggatagcgacgaagccgtgacatatagcctgggaaagtttgggcagagggccctggatttctacagcattcatgtgaccaaggagtccacccaccccgtgaagcccctggcccagatcgccggaaacagatacgcctccggacctgtgggaaaggccctgagcgacgcatgtatgggcacaatcgcctccttcctgtctaagtaccaggacatcatcatcgaacaccagaaggtggtgaagggcaaccagaagagactggagagcctgcgggagctggccggcaaggaaaacctggaataccctagcgtgaccctgccacctcagcctcacaccaaggagggcgttgatgcctacaacgaagtgatcgcccgggtgcgaatgtgggtgaacctgaacctgtggcagaagctgaagctaagcagagatgatgccaagcctctgctgagactgaagggattcccttcctttcctctggtcgagagacaggccaacgaagtggactggtgggacatggtgtgtaacgtgaagaagctgatcaacgagaaaaaggaggatggcaaggtgttttggcagaatctggctggctacaagagacaggaagccctgagaccatacctgagcagcgaggaagatcggaagaagggaaagaaattcgctcggtaccagctgggcgacctgctgctgcacctggaaaagaagcacggcgaggactggggaaaggtgtacgacgaggcctgggagcggattgacaagaaagtggaaggcctgagcaagcacatcaagctggaagaggaacggagaagcgaggacgcccagagcaaggccgccctgaccgactggctgcgggctaaggccagcttcgtgatcgagggcctgaaggaggccgacaaggacgagttctgcagatgcgagctgaagctgcagaagtggtacggggacctgcggggaaagcccttcgccatcgaagccgagaacagcatcctggacatcagcggcttcagcaagcagtacaactgtgccttcatctggcagaaggacggcgtgaagaagctgaacctgtacctgatcatcaactacttcaagggcggcaagctgcggttcaagaagatcaaacctgaagccttcgaagccaacagattctacaccgtgatcaacaaaaagagcggcgagatcgtgcccatggaggtgaacttcaacttcgacgaccccaacctgatcatcctgcctctggcctttggcaagagacagggcagagaattcatctggaacgacctgctgtccctggaaaccggcagcctgaagctggccaacggaagagtgatcgagaagacactgtacaacagaagaacccggcaggatgagcctgccctgttcgtggccctgaccttcgagcggcgggaggtcctggactcctccaatatcaaaccaatgaacctgatcggcgtggcaagaggcgaaaacatccccgccgtgatcgccctgaccgaccccgagggctgcccactgagccggtttaaggatagcctgggaaacccaacccacatcctgagaatcggcgagagctataaggagaagcagcggaccatccaggccaagaaggaggtggagcagcggagagccggcggctacagccggaagtacgccagcaaagccaagaatctggcagacgatatggtgagaaacaccgctagagatctgctgtactacgccgtgacccaggatgccatgctgatcttcgccaacctgagccggggcttcggccggcagggcaagcggaccttcatggccgagagacagtacacacggatggaggactggctgaccgccaagctggcctacgagggcctgagcaagacctacctgtccaagacactggcccagtacacctccaagacatgcagcaactgtgggtttaccatcaccagcgccgactacgacagggtgctggagaagctgaagaagacagcaacaggctggatgaccacaattaacggcaaggagctgaaggtggagggccagattacctactacaacagatacaagagacagaacgtagtcaaggacctgtccgtcgagctggatagactgagcgaagaatctgtgaacaacgacatctcctcctggacaaagggcagaagcggagaagctctgagcctcctgaagaaaagattctcccatagacccgtgcaggagaagttcgtgtgcctgaactgcggcttcgagacacacgcagccgagcaagccgccctgaacatcgccagatcctggctgttcctgcggagccaggagtacaagaaataccagacaaacaagacaaccggcaacaccgataagagagccttcgtcgagacctggcagtccttttaccggaagaagcttaaggaggtgtggaaacctgccgtgcggtctggcggatctggcggaggctccaccagccccaagaaaaagagaaaagtctaagctgccttctgcggggcttgccttctggccatgcccttcttctctcccttgcacctgtacctcttggtctttgaataaagcctgagtaggaaggctagcaaaaaaaaaaaaaaaaaaaaaaaaaaaaaaaaaaaaaaaaaaaaaaaaaaaaaaaaaaaaaaaaaaaaaaaaaaaaaaaa

SEQ ID NO: 8991 - RNA, 8787 nt, synthetic construct
  source 1..8787: mol_type = other RNA
aggaaataagagagaaaagaagagtaagaagaaatataagagccaccatggcccctaagaagaagcgtaaagtgagccggatgaaccacgaccaggagttcgacccccctaaggtgtaccctcccgtccccgccgagaagagaaagcccatccgggtcctgagcctgttcgatggcatcgccaccggtctgctggtgctgaaggacctgggcatccaggtggataggtacattgcctccgaggtgtgcgaggactccatcaccgtgggaatggtgcgtcatcagggcaagatcatgtacgtgggcgacgtgcggagcgtgacacagaagcatatccaggagtggggccctttcgacctggtgatcggcggcagcccttgcaatgacctgagcatcgtgaacccagcccggaagggcctgtacgagggaaccggcagactgttcttcgagttttacagactgctgcacgacgcccggcctaaggaaggcgacgaccggcccttcttttggctgttcgagaatgtggtggccatgggagtcagcgacaagcgggatattagccggttcctggagagcaaccccgtgatgatcgatgccaaggaagtgagcgccgcccaccgggccagatacttctggggcaatctgcctggcatgaacagacccctggccagcaccgtgaacgacaagctggagctgcaggagtgcctggagcacggccggatcgccaagttcagcaaggtgagaaccatcaccacccgaagcaacagcatcaaacaaggcaaggaccagcactttcctgtgttcatgaacgagaaggaggacatcctgtggtgtaccgagatggagagagtgttcgggttcccagtccactacacagatgtcagcaacatgtctagactggccagacagagactgctgggaagaagctggtccgtccctgtgatcagacacctgttcgcccctctgaaggagtacttcgcctgcgtgagcagcggcaacagcaacgccaacagccggggccccagcttctctagcggcctggtgccactgtccctgagagggagccacatgggccccatggagatctacaaaaccgtgagcgcctggaagcggcagcctgtgcgcgtgctgagcctgtttcggaatatcgataaagtcctgaaaagcctgggattcctggagagcggctctggctccggcggtggcaccctgaagtacgtggaggatgtgacaaacgtggtcagacgggatgtggagaagtggggccccttcgatctggtgtacggcagcacccaacccctgggcagctcttgtgaccggtgccctggctggtacatgtttcagttccaccggatcctgcagtacgccctgccgagacaggagtcccagcggccattcttttggattttcatggacaacttgctgctgaccgaggatgaccaggaaactaccactcggttcctgcagaccgaagccgtgaccctgcaggacgtgagaggccgggactaccagaacgccatgcgggtgtggtccaacatccctggactgaaaagcaagcacgcacctctgacccctaaagaagaggagtacctgcaggcccaggtgcggagcagaagcaagctggacgcccctaaggtggatctgctggtgaagaattgcctcctgcccctgagagagtacttcaagtatttcagccagaatagtctgcccctgggaggcagcggcggcggcatggacagcgtggccttcgaggacgtggccgtgaacttcacccaggaggagtgggccctgctggaccccagccagaagaacctgtacagggaggtgatgcaggagaccgtgaggaacctggccagcatcggcaagaagtggaacaaccagtacatcgaggacgagcaccagaaccccaggaagaacctgaggaggctgatcggcgagaggctgagcgagagcaaggagagccaccagcacggcggcggcccaagcagcggcgcccctcctcccagcggcggcaggcggcccaagcagcggcgcccctcctcccagcggcggcagcccagccggctccccaacctctaccgaggagggcacctctgagtccgccacccccgagagcggccctggcacctccaccgagcccagcgagggcagcgcacccggcagccctgccggcagccccacctccacagaggagggaaccagcaccgagcccagcgaaggcagcgccccaggcaccagcaccgagcctagtgagcaggagattaaacggatcaacaagatcagaagaagacttgtgaaagacagcaacaccaagaaggccggcaagacaggccccatgaaaaccctgctggttagagtgatgacacccgatctgagagagcggctggaaaacctgagaaagaagcctgaaaatatcccccagcccatcagcaatacatctagagccaacctgaataagctgctgaccgattacaccgaaatgaagaaggcgatcctgcatgtgtactgggaagagttccagaaggaccctgtgggcctgatgagccgggtggcccagcctgccagcaagaagatcgatcagaacaagctgaaacctgagatggacgagaagggcaacctgaccaccgccggctttgcctgctctcagtgtggccagcccctgttcgtgtacaagctggagcaggtgtctgagaagggcaaggcttacaccaactacttcggacggtgcaatgtggccgagcacgaaaagctgatcctgctggcccagctgaagcccgagaaggatagcgacgaagccgtgacatatagcctgggaaagtttgggcagagggccctggatttctacagcattcatgtgaccaaggagtccacccaccccgtgaagcccctggcccagatcgccggaaacagatacgcctccggacctgtgggaaaggccctgagcgacgcatgtatgggcacaatcgcctccttcctgtctaagtaccaggacatcatcatcgaacaccagaaggtggtgaagggcaaccagaagagactggagagcctgcgggagctggccggcaaggaaaacctggaataccctagcgtgaccctgccacctcagcctcacaccaaggagggcgttgatgcctacaacgaagtgatcgcccgggtgcgaatgtgggtgaacctgaacctgtggcagaagctgaagctaagcagagatgatgccaagcctctgctgagactgaagggattcccttcctttcctctggtcgagagacaggccaacgaagtggactggtgggacatggtgtgtaacgtgaagaagctgatcaacgagaaaaaggaggatggcaaggtgttttggcagaatctggctggctacaagagacaggaagccctgagaccatacctgagcagcgaggaagatcggaagaagggaaagaaattcgctcggtaccagctgggcgacctgctgctgcacctggaaaagaagcacggcgaggactggggaaaggtgtacgacgaggcctgggagcggattgacaagaaagtggaaggcctgagcaagcacatcaagctggaagaggaacggagaagcgaggacgcccagagcaaggccgccctgaccgactggctgcgggctaaggccagcttcgtgatcgagggcctgaaggaggccgacaaggacgagttctgcagatgcgagctgaagctgcagaagtggtacggggacctgcggggaaagcccttcgccatcgaagccgagaacagcatcctggacatcagcggcttcagcaagcagtacaactgtgccttcatctggcagaaggacggcgtgaagaagctgaacctgtacctgatcatcaactacttcaagggcggcaagctgcggttcaagaagatcaaacctgaagccttcgaagccaacagattctacaccgtgatcaacaaaaagagcggcgagatcgtgcccatggaggtgaacttcaacttcgacgaccccaacctgatcatcctgcctctggcctttggcaagagacagggcagagaattcatctggaacgacctgctgtccctggaaaccggcagcctgaagctggccaacggaagagtgatcgagaagacactgtacaacagaagaacccggcaggatgagcctgccctgttcgtggccctgaccttcgagcggcgggaggtcctggactcctccaatatcaaaccaatgaacctgatcggcgtggcaagaggcgaaaacatccccgccgtgatcgccctgaccgaccccgagggctgcccactgagccggtttaaggatagcctgggaaacccaacccacatcctgagaatcggcgagagctataaggagaagcagcggaccatccaggccaagaaggaggtggagcagcggagagccggcggctacagccggaagtacgccagcaaagccaagaatctggcagacgatatggtgagaaacaccgctagagatctgctgtactacgccgtgacccaggatgccatgctgatcttcgccaacctgagccggggcttcggccggcagggcaagcggaccttcatggccgagagacagtacacacggatggaggactggctgaccgccaagctggcctacgagggcctgagcaagacctacctgtccaagacactggcccagtacacctccaagacatgcagcaactgtgggtttaccatcaccagcgccgactacgacagggtgctggagaagctgaagaagacagcaacaggctggatgaccacaattaacggcaaggagctgaaggtggagggccagattacctactacaacagatacaagagacagaacgtagtcaaggacctgtccgtcgagctggatagactgagcgaagaatctgtgaacaacgacatctcctcctggacaaagggcagaagcggagaagctctgagcctcctgaagaaaagattctcccatagacccgtgcaggagaagttcgtgtgcctgaactgcggcttcgagacacacgcagccgagcaagccgccctgaacatcgccagatcctggctgttcctgcggagccaggagtacaagaaataccagacaaacaagacaaccggcaacaccgataagagagccttcgtcgagacctggcagtccttttaccggaagaagcttaaggaggtgtggaaacctgccgtgcggtctggcggatctggcggaggctccaccagccccaagaaaaagagaaaagtctaagctgccttctgcggggcttgccttctggccatgcccttcttctctcccttgcacctgtacctcttggtctttgaataaagcctgagtaggaaggctagcaaaaaaaaaaaaaaaaaaaaaaaaaaaaaaaaaaaaaaaaaaaaaaaaaaaaaaaaaaaaaaaaaaaaaaaaaaaaaaaagcccagccggctccccaacctctaccgaggagggcacctctgagtccgccacccccgagagcggccctggcacctccaccgagcccagcgagggcagcgcacccggcagccctgccggcagccccacctccacagaggagggaaccagcaccgagcccagcgaaggcagcgccccaggcaccagcaccgagcctagtgagcaggagattaaacggatcaacaagatcagaagaagacttgtgaaagacagcaacaccaagaaggccggcaagacaggccccatgaaaaccctgctggttagagtgatgacacccgatctgagagagcggctggaaaacctgagaaagaagcctgaaaatatcccccagcccatcagcaatacatctagagccaacctgaataagctgctgaccgattacaccgaaatgaagaaggcgatcctgcatgtgtactgggaagagttccagaaggaccctgtgggcctgatgagccgggtggcccagcctgccagcaagaagatcgatcagaacaagctgaaacctgagatggacgagaagggcaacctgaccaccgccggctttgcctgctctcagtgtggccagcccctgttcgtgtacaagctggagcaggtgtctgagaagggcaaggcttacaccaactacttcggacggtgcaatgtggccgagcacgaaaagctgatcctgctggcccagctgaagcccgagaaggatagcgacgaagccgtgacatatagcctgggaaagtttgggcagagggccctggatttctacagcattcatgtgaccaaggagtccacccaccccgtgaagcccctggcccagatcgccggaaacagatacgcctccggacctgtgggaaaggccctgagcgacgcatgtatgggcacaatcgcctccttcctgtctaagtaccaggacatcatcatcgaacaccagaaggtggtgaagggcaaccagaagagactggagagcctgcgggagctggccggcaaggaaaacctggaataccctagcgtgaccctgccacctcagcctcacaccaaggagggcgttgatgcctacaacgaagtgatcgcccgggtgcgaatgtgggtgaacctgaacctgtggcagaagctgaagctaagcagagatgatgccaagcctctgctgagactgaagggattcccttcctttcctctggtcgagagacaggccaacgaagtggactggtgggacatggtgtgtaacgtgaagaagctgatcaacgagaaaaaggaggatggcaaggtgttttggcagaatctggctggctacaagagacaggaagccctgagaccatacctgagcagcgaggaagatcggaagaagggaaagaaattcgctcggtaccagctgggcgacctgctgctgcacctggaaaagaagcacggcgaggactggggaaaggtgtacgacgaggcctgggagcggattgacaagaaagtggaaggcctgagcaagcacatcaagctggaagaggaacggagaagcgaggacgcccagagcaaggccgccctgaccgactggctgcgggctaaggccagcttcgtgatcgagggcctgaaggaggccgacaaggacgagttctgcagatgcgagctgaagctgcagaagtggtacggggacctgcggggaaagcccttcgccatcgaagccgagaacagcatcctggacatcagcggcttcagcaagcagtacaactgtgccttcatctggcagaaggacggcgtgaagaagctgaacctgtacctgatcatcaactacttcaagggcggcaagctgcggttcaagaagatcaaacctgaagccttcgaagccaacagattctacaccgtgatcaacaaaaagagcggcgagatcgtgcccatggaggtgaacttcaacttcgacgaccccaacctgatcatcctgcctctggcctttggcaagagacagggcagagaattcatctggaacgacctgctgtccctggaaaccggcagcctgaagctggccaacggaagagtgatcgagaagacactgtacaacagaagaacccggcaggatgagcctgccctgttcgtggccctgaccttcgagcggcgggaggtcctggactcctccaatatcaaaccaatgaacctgatcggcgtggcaagaggcgaaaacatccccgccgtgatcgccctgaccgaccccgagggctgcccactgagccggtttaaggatagcctgggaaacccaacccacatcctgagaatcggcgagagctataaggagaagcagcggaccatccaggccaagaaggaggtggagcagcggagagccggcggctacagccggaagtacgccagcaaagccaagaatctggcagacgatatggtgagaaacaccgctagagatctgctgtactacgccgtgacccaggatgccatgctgatcttcgccaacctgagccggggcttcggccggcagggcaagcggaccttcatggccgagagacagtacacacggatggaggactggctgaccgccaagctggcctacgagggcctgagcaagacctacctgtccaagacactggcccagtacacctccaagacatgcagcaactgtgggtttaccatcaccagcgccgactacgacagggtgctggagaagctgaagaagacagcaacaggctggatgaccacaattaacggcaaggagctgaaggtggagggccagattacctactacaacagatacaagagacagaacgtagtcaaggacctgtccgtcgagctggatagactgagcgaagaatctgtgaacaacgacatctcctcctggacaaagggcagaagcggagaagctctgagcctcctgaagaaaagattctcccatagacccgtgcaggagaagttcgtgtgcctgaactgcggcttcgagacacacgcagccgagcaagccgccctgaacatcgccagatcctggctgttcctgcggagccaggagtacaagaaataccagacaaacaagacaaccggcaacaccgataagagagccttcgtcgagacctggcagtccttttaccggaagaagcttaaggaggtgtggaaacctgccgtgcggtctggcggatctggcggaggctccaccagccccaagaaaaagagaaaagtctaagctgccttctgcggggcttgccttctggccatgcccttcttctctcccttgcacctgtacctcttggtctttgaataaagcctgagtaggaaggctagcaaaaaaaaaaaaaaaaaaaaaaaaaaaaaaaaaaaaaaaaaaaaaaaaaaaaaaaaaaaaaaaaaaaaaaaaaaaaaaaa

SEQ ID NO: 8992 - RNA, 8787 nt, synthetic construct
  source 1..8787: mol_type = other RNA
aggaaataagagagaaaagaagagtaagaagaaatataagagccaccatggcccctaagaagaagcgtaaagtgagccggatgaaccacgaccaggagttcgacccccctaaggtgtaccctcccgtccccgccgagaagagaaagcccatccgggtcctgagcctgttcgatggcatcgccaccggtctgctggtgctgaaggacctgggcatccaggtggataggtacattgcctccgaggtgtgcgaggactccatcaccgtgggaatggtgcgtcatcagggcaagatcatgtacgtgggcgacgtgcggagcgtgacacagaagcatatccaggagtggggccctttcgacctggtgatcggcggcagcccttgcaatgacctgagcatcgtgaacccagcccggaagggcctgtacgagggaaccggcagactgttcttcgagttttacagactgctgcacgacgcccggcctaaggaaggcgacgaccggcccttcttttggctgttcgagaatgtggtggccatgggagtcagcgacaagcgggatattagccggttcctggagagcaaccccgtgatgatcgatgccaaggaagtgagcgccgcccaccgggccagatacttctggggcaatctgcctggcatgaacagacccctggccagcaccgtgaacgacaagctggagctgcaggagtgcctggagcacggccggatcgccaagttcagcaaggtgagaaccatcaccacccgaagcaacagcatcaaacaaggcaaggaccagcactttcctgtgttcatgaacgagaaggaggacatcctgtggtgtaccgagatggagagagtgttcgggttcccagtccactacacagatgtcagcaacatgtctagactggccagacagagactgctgggaagaagctggtccgtccctgtgatcagacacctgttcgcccctctgaaggagtacttcgcctgcgtgagcagcggcaacagcaacgccaacagccggggccccagcttctctagcggcctggtgccactgtccctgagagggagccacatgggccccatggagatctacaaaaccgtgagcgcctggaagcggcagcctgtgcgcgtgctgagcctgtttcggaatatcgataaagtcctgaaaagcctgggattcctggagagcggctctggctccggcggtggcaccctgaagtacgtggaggatgtgacaaacgtggtcagacgggatgtggagaagtggggccccttcgatctggtgtacggcagcacccaacccctgggcagctcttgtgaccggtgccctggctggtacatgtttcagttccaccggatcctgcagtacgccctgccgagacaggagtcccagcggccattcttttggattttcatggacaacttgctgctgaccgaggatgaccaggaaactaccactcggttcctgcagaccgaagccgtgaccctgcaggacgtgagaggccgggactaccagaacgccatgcgggtgtggtccaacatccctggactgaaaagcaagcacgcacctctgacccctaaagaagaggagtacctgcaggcccaggtgcggagcagaagcaagctggacgcccctaaggtggatctgctggtgaagaattgcctcctgcccctgagagagtacttcaagtatttcagccagaatagtctgcccctgggaggcagcggcggcggcatgcacctgaccgcctggccccagaagagcgtgaccttcgaggacgtggccgtgtacttcacccaggccgagtgggacggcctgagccccgcccagaggaccctgtacagggacgtgatgctggagaactacggcaacgtggccagcctgggcttccccctgctgaagcccgccgtgatcagccagctggagggcggcggcgagctgggcggccccagccccctggccgccggcaggggcctgggcggcccaagcagcggcgcccctcctcccagcggcggcaggcggcccaagcagcggcgcccctcctcccagcggcggcagcccagccggctccccaacctctaccgaggagggcacctctgagtccgccacccccgagagcggccctggcacctccaccgagcccagcgagggcagcgcacccggcagccctgccggcagccccacctccacagaggagggaaccagcaccgagcccagcgaaggcagcgccccaggcaccagcaccgagcctagtgagcaggagattaaacggatcaacaagatcagaagaagacttgtgaaagacagcaacaccaagaaggccggcaagacaggccccatgaaaaccctgctggttagagtgatgacacccgatctgagagagcggctggaaaacctgagaaagaagcctgaaaatatcccccagcccatcagcaatacatctagagccaacctgaataagctgctgaccgattacaccgaaatgaagaaggcgatcctgcatgtgtactgggaagagttccagaaggaccctgtgggcctgatgagccgggtggcccagcctgccagcaagaagatcgatcagaacaagctgaaacctgagatggacgagaagggcaacctgaccaccgccggctttgcctgctctcagtgtggccagcccctgttcgtgtacaagctggagcaggtgtctgagaagggcaaggcttacaccaactacttcggacggtgcaatgtggccgagcacgaaaagctgatcctgctggcccagctgaagcccgagaaggatagcgacgaagccgtgacatatagcctgggaaagtttgggcagagggccctggatttctacagcattcatgtgaccaaggagtccacccaccccgtgaagcccctggcccagatcgccggaaacagatacgcctccggacctgtgggaaaggccctgagcgacgcatgtatgggcacaatcgcctccttcctgtctaagtaccaggacatcatcatcgaacaccagaaggtggtgaagggcaaccagaagagactggagagcctgcgggagctggccggcaaggaaaacctggaataccctagcgtgaccctgccacctcagcctcacaccaaggagggcgttgatgcctacaacgaagtgatcgcccgggtgcgaatgtgggtgaacctgaacctgtggcagaagctgaagctaagcagagatgatgccaagcctctgctgagactgaagggattcccttcctttcctctggtcgagagacaggccaacgaagtggactggtgggacatggtgtgtaacgtgaagaagctgatcaacgagaaaaaggaggatggcaaggtgttttggcagaatctggctggctacaagagacaggaagccctgagaccatacctgagcagcgaggaagatcggaagaagggaaagaaattcgctcggtaccagctgggcgacctgctgctgcacctggaaaagaagcacggcgaggactggggaaaggtgtacgacgaggcctgggagcggattgacaagaaagtggaaggcctgagcaagcacatcaagctggaagaggaacggagaagcgaggacgcccagagcaaggccgccctgaccgactggctgcgggctaaggccagcttcgtgatcgagggcctgaaggaggccgacaaggacgagttctgcagatgcgagctgaagctgcagaagtggtacggggacctgcggggaaagcccttcgccatcgaagccgagaacagcatcctggacatcagcggcttcagcaagcagtacaactgtgccttcatctggcagaaggacggcgtgaagaagctgaacctgtacctgatcatcaactacttcaagggcggcaagctgcggttcaagaagatcaaacctgaagccttcgaagccaacagattctacaccgtgatcaacaaaaagagcggcgagatcgtgcccatggaggtgaacttcaacttcgacgaccccaacctgatcatcctgcctctggcctttggcaagagacagggcagagaattcatctggaacgacctgctgtccctggaaaccggcagcctgaagctggccaacggaagagtgatcgagaagacactgtacaacagaagaacccggcaggatgagcctgccctgttcgtggccctgaccttcgagcggcgggaggtcctggactcctccaatatcaaaccaatgaacctgatcggcgtggcaagaggcgaaaacatccccgccgtgatcgccctgaccgaccccgagggctgcccactgagccggtttaaggatagcctgggaaacccaacccacatcctgagaatcggcgagagctataaggagaagcagcggaccatccaggccaagaaggaggtggagcagcggagagccggcggctacagccggaagtacgccagcaaagccaagaatctggcagacgatatggtgagaaacaccgctagagatctgctgtactacgccgtgacccaggatgccatgctgatcttcgccaacctgagccggggcttcggccggcagggcaagcggaccttcatggccgagagacagtacacacggatggaggactggctgaccgccaagctggcctacgagggcctgagcaagacctacctgtccaagacactggcccagtacacctccaagacatgcagcaactgtgggtttaccatcaccagcgccgactacgacagggtgctggagaagctgaagaagacagcaacaggctggatgaccacaattaacggcaaggagctgaaggtggagggccagattacctactacaacagatacaagagacagaacgtagtcaaggacctgtccgtcgagctggatagactgagcgaagaatctgtgaacaacgacatctcctcctggacaaagggcagaagcggagaagctctgagcctcctgaagaaaagattctcccatagacccgtgcaggagaagttcgtgtgcctgaactgcggcttcgagacacacgcagccgagcaagccgccctgaacatcgccagatcctggctgttcctgcggagccaggagtacaagaaataccagacaaacaagacaaccggcaacaccgataagagagccttcgtcgagacctggcagtccttttaccggaagaagcttaaggaggtgtggaaacctgccgtgcggtctggcggatctggcggaggctccaccagccccaagaaaaagagaaaagtctaagctgccttctgcggggcttgccttctggccatgcccttcttctctcccttgcacctgtacctcttggtctttgaataaagcctgagtaggaaggctagcaaaaaaaaaaaaaaaaaaaaaaaaaaaaaaaaaaaaaaaaaaaaaaaaaaaaaaaaaaaaaaaaaaaaaaaaaaaaaaaagcccagccggctccccaacctctaccgaggagggcacctctgagtccgccacccccgagagcggccctggcacctccaccgagcccagcgagggcagcgcacccggcagccctgccggcagccccacctccacagaggagggaaccagcaccgagcccagcgaaggcagcgccccaggcaccagcaccgagcctagtgagcaggagattaaacggatcaacaagatcagaagaagacttgtgaaagacagcaacaccaagaaggccggcaagacaggccccatgaaaaccctgctggttagagtgatgacacccgatctgagagagcggctggaaaacctgagaaagaagcctgaaaatatcccccagcccatcagcaatacatctagagccaacctgaataagctgctgaccgattacaccgaaatgaagaaggcgatcctgcatgtgtactgggaagagttccagaaggaccctgtgggcctgatgagccgggtggcccagcctgccagcaagaagatcgatcagaacaagctgaaacctgagatggacgagaagggcaacctgaccaccgccggctttgcctgctctcagtgtggccagcccctgttcgtgtacaagctggagcaggtgtctgagaagggcaaggcttacaccaactacttcggacggtgcaatgtggccgagcacgaaaagctgatcctgctggcccagctgaagcccgagaaggatagcgacgaagccgtgacatatagcctgggaaagtttgggcagagggccctggatttctacagcattcatgtgaccaaggagtccacccaccccgtgaagcccctggcccagatcgccggaaacagatacgcctccggacctgtgggaaaggccctgagcgacgcatgtatgggcacaatcgcctccttcctgtctaagtaccaggacatcatcatcgaacaccagaaggtggtgaagggcaaccagaagagactggagagcctgcgggagctggccggcaaggaaaacctggaataccctagcgtgaccctgccacctcagcctcacaccaaggagggcgttgatgcctacaacgaagtgatcgcccgggtgcgaatgtgggtgaacctgaacctgtggcagaagctgaagctaagcagagatgatgccaagcctctgctgagactgaagggattcccttcctttcctctggtcgagagacaggccaacgaagtggactggtgggacatggtgtgtaacgtgaagaagctgatcaacgagaaaaaggaggatggcaaggtgttttggcagaatctggctggctacaagagacaggaagccctgagaccatacctgagcagcgaggaagatcggaagaagggaaagaaattcgctcggtaccagctgggcgacctgctgctgcacctggaaaagaagcacggcgaggactggggaaaggtgtacgacgaggcctgggagcggattgacaagaaagtggaaggcctgagcaagcacatcaagctggaagaggaacggagaagcgaggacgcccagagcaaggccgccctgaccgactggctgcgggctaaggccagcttcgtgatcgagggcctgaaggaggccgacaaggacgagttctgcagatgcgagctgaagctgcagaagtggtacggggacctgcggggaaagcccttcgccatcgaagccgagaacagcatcctggacatcagcggcttcagcaagcagtacaactgtgccttcatctggcagaaggacggcgtgaagaagctgaacctgtacctgatcatcaactacttcaagggcggcaagctgcggttcaagaagatcaaacctgaagccttcgaagccaacagattctacaccgtgatcaacaaaaagagcggcgagatcgtgcccatggaggtgaacttcaacttcgacgaccccaacctgatcatcctgcctctggcctttggcaagagacagggcagagaattcatctggaacgacctgctgtccctggaaaccggcagcctgaagctggccaacggaagagtgatcgagaagacactgtacaacagaagaacccggcaggatgagcctgccctgttcgtggccctgaccttcgagcggcgggaggtcctggactcctccaatatcaaaccaatgaacctgatcggcgtggcaagaggcgaaaacatccccgccgtgatcgccctgaccgaccccgagggctgcccactgagccggtttaaggatagcctgggaaacccaacccacatcctgagaatcggcgagagctataaggagaagcagcggaccatccaggccaagaaggaggtggagcagcggagagccggcggctacagccggaagtacgccagcaaagccaagaatctggcagacgatatggtgagaaacaccgctagagatctgctgtactacgccgtgacccaggatgccatgctgatcttcgccaacctgagccggggcttcggccggcagggcaagcggaccttcatggccgagagacagtacacacggatggaggactggctgaccgccaagctggcctacgagggcctgagcaagacctacctgtccaagacactggcccagtacacctccaagacatgcagcaactgtgggtttaccatcaccagcgccgactacgacagggtgctggagaagctgaagaagacagcaacaggctggatgaccacaattaacggcaaggagctgaaggtggagggccagattacctactacaacagatacaagagacagaacgtagtcaaggacctgtccgtcgagctggatagactgagcgaagaatctgtgaacaacgacatctcctcctggacaaagggcagaagcggagaagctctgagcctcctgaagaaaagattctcccatagacccgtgcaggagaagttcgtgtgcctgaactgcggcttcgagacacacgcagccgagcaagccgccctgaacatcgccagatcctggctgttcctgcggagccaggagtacaagaaataccagacaaacaagacaaccggcaacaccgataagagagccttcgtcgagacctggcagtccttttaccggaagaagcttaaggaggtgtggaaacctgccgtgcggtctggcggatctggcggaggctccaccagccccaagaaaaagagaaaagtctaagctgccttctgcggggcttgccttctggccatgcccttcttctctcccttgcacctgtacctcttggtctttgaataaagcctgagtaggaaggctagcaaaaaaaaaaaaaaaaaaaaaaaaaaaaaaaaaaaaaaaaaaaaaaaaaaaaaaaaaaaaaaaaaaaaaaaaaaaaaaaa

SEQ ID NO: 8993 - RNA, 8787 nt, synthetic construct
  source 1..8787: mol_type = other RNA
aggaaataagagagaaaagaagagtaagaagaaatataagagccaccatggcccctaagaagaagcgtaaagtgagccggatgaaccacgaccaggagttcgacccccctaaggtgtaccctcccgtccccgccgagaagagaaagcccatccgggtcctgagcctgttcgatggcatcgccaccggtctgctggtgctgaaggacctgggcatccaggtggataggtacattgcctccgaggtgtgcgaggactccatcaccgtgggaatggtgcgtcatcagggcaagatcatgtacgtgggcgacgtgcggagcgtgacacagaagcatatccaggagtggggccctttcgacctggtgatcggcggcagcccttgcaatgacctgagcatcgtgaacccagcccggaagggcctgtacgagggaaccggcagactgttcttcgagttttacagactgctgcacgacgcccggcctaaggaaggcgacgaccggcccttcttttggctgttcgagaatgtggtggccatgggagtcagcgacaagcgggatattagccggttcctggagagcaaccccgtgatgatcgatgccaaggaagtgagcgccgcccaccgggccagatacttctggggcaatctgcctggcatgaacagacccctggccagcaccgtgaacgacaagctggagctgcaggagtgcctggagcacggccggatcgccaagttcagcaaggtgagaaccatcaccacccgaagcaacagcatcaaacaaggcaaggaccagcactttcctgtgttcatgaacgagaaggaggacatcctgtggtgtaccgagatggagagagtgttcgggttcccagtccactacacagatgtcagcaacatgtctagactggccagacagagactgctgggaagaagctggtccgtccctgtgatcagacacctgttcgcccctctgaaggagtacttcgcctgcgtgagcagcggcaacagcaacgccaacagccggggccccagcttctctagcggcctggtgccactgtccctgagagggagccacatgggccccatggagatctacaaaaccgtgagcgcctggaagcggcagcctgtgcgcgtgctgagcctgtttcggaatatcgataaagtcctgaaaagcctgggattcctggagagcggctctggctccggcggtggcaccctgaagtacgtggaggatgtgacaaacgtggtcagacgggatgtggagaagtggggccccttcgatctggtgtacggcagcacccaacccctgggcagctcttgtgaccggtgccctggctggtacatgtttcagttccaccggatcctgcagtacgccctgccgagacaggagtcccagcggccattcttttggattttcatggacaacttgctgctgaccgaggatgaccaggaaactaccactcggttcctgcagaccgaagccgtgaccctgcaggacgtgagaggccgggactaccagaacgccatgcgggtgtggtccaacatccctggactgaaaagcaagcacgcacctctgacccctaaagaagaggagtacctgcaggcccaggtgcggagcagaagcaagctggacgcccctaaggtggatctgctggtgaagaattgcctcctgcccctgagagagtacttcaagtatttcagccagaatagtctgcccctgggaggcagcggcggcggcaccgagaacgccgtgacctacgacgacgtgcacgtgggcttcacctgggaggagtgggccctgctggaccccagccagaagaacctgtacaaggacgtgatgctggacacctacaggaacctgaccaccatcggctacagctgggagggccacaacatcgaggagcacttccagagcagcaggaggcacgagaggcacaagaggagcgacaccggcgagaacagcagcgtgtacacccagtgcggcggcccaagcagcggcgcccctcctcccagcggcggcaggcggcccaagcagcggcgcccctcctcccagcggcggcagcccagccggctccccaacctctaccgaggagggcacctctgagtccgccacccccgagagcggccctggcacctccaccgagcccagcgagggcagcgcacccggcagccctgccggcagccccacctccacagaggagggaaccagcaccgagcccagcgaaggcagcgccccaggcaccagcaccgagcctagtgagcaggagattaaacggatcaacaagatcagaagaagacttgtgaaagacagcaacaccaagaaggccggcaagacaggccccatgaaaaccctgctggttagagtgatgacacccgatctgagagagcggctggaaaacctgagaaagaagcctgaaaatatcccccagcccatcagcaatacatctagagccaacctgaataagctgctgaccgattacaccgaaatgaagaaggcgatcctgcatgtgtactgggaagagttccagaaggaccctgtgggcctgatgagccgggtggcccagcctgccagcaagaagatcgatcagaacaagctgaaacctgagatggacgagaagggcaacctgaccaccgccggctttgcctgctctcagtgtggccagcccctgttcgtgtacaagctggagcaggtgtctgagaagggcaaggcttacaccaactacttcggacggtgcaatgtggccgagcacgaaaagctgatcctgctggcccagctgaagcccgagaaggatagcgacgaagccgtgacatatagcctgggaaagtttgggcagagggccctggatttctacagcattcatgtgaccaaggagtccacccaccccgtgaagcccctggcccagatcgccggaaacagatacgcctccggacctgtgggaaaggccctgagcgacgcatgtatgggcacaatcgcctccttcctgtctaagtaccaggacatcatcatcgaacaccagaaggtggtgaagggcaaccagaagagactggagagcctgcgggagctggccggcaaggaaaacctggaataccctagcgtgaccctgccacctcagcctcacaccaaggagggcgttgatgcctacaacgaagtgatcgcccgggtgcgaatgtgggtgaacctgaacctgtggcagaagctgaagctaagcagagatgatgccaagcctctgctgagactgaagggattcccttcctttcctctggtcgagagacaggccaacgaagtggactggtgggacatggtgtgtaacgtgaagaagctgatcaacgagaaaaaggaggatggcaaggtgttttggcagaatctggctggctacaagagacaggaagccctgagaccatacctgagcagcgaggaagatcggaagaagggaaagaaattcgctcggtaccagctgggcgacctgctgctgcacctggaaaagaagcacggcgaggactggggaaaggtgtacgacgaggcctgggagcggattgacaagaaagtggaaggcctgagcaagcacatcaagctggaagaggaacggagaagcgaggacgcccagagcaaggccgccctgaccgactggctgcgggctaaggccagcttcgtgatcgagggcctgaaggaggccgacaaggacgagttctgcagatgcgagctgaagctgcagaagtggtacggggacctgcggggaaagcccttcgccatcgaagccgagaacagcatcctggacatcagcggcttcagcaagcagtacaactgtgccttcatctggcagaaggacggcgtgaagaagctgaacctgtacctgatcatcaactacttcaagggcggcaagctgcggttcaagaagatcaaacctgaagccttcgaagccaacagattctacaccgtgatcaacaaaaagagcggcgagatcgtgcccatggaggtgaacttcaacttcgacgaccccaacctgatcatcctgcctctggcctttggcaagagacagggcagagaattcatctggaacgacctgctgtccctggaaaccggcagcctgaagctggccaacggaagagtgatcgagaagacactgtacaacagaagaacccggcaggatgagcctgccctgttcgtggccctgaccttcgagcggcgggaggtcctggactcctccaatatcaaaccaatgaacctgatcggcgtggcaagaggcgaaaacatccccgccgtgatcgccctgaccgaccccgagggctgcccactgagccggtttaaggatagcctgggaaacccaacccacatcctgagaatcggcgagagctataaggagaagcagcggaccatccaggccaagaaggaggtggagcagcggagagccggcggctacagccggaagtacgccagcaaagccaagaatctggcagacgatatggtgagaaacaccgctagagatctgctgtactacgccgtgacccaggatgccatgctgatcttcgccaacctgagccggggcttcggccggcagggcaagcggaccttcatggccgagagacagtacacacggatggaggactggctgaccgccaagctggcctacgagggcctgagcaagacctacctgtccaagacactggcccagtacacctccaagacatgcagcaactgtgggtttaccatcaccagcgccgactacgacagggtgctggagaagctgaagaagacagcaacaggctggatgaccacaattaacggcaaggagctgaaggtggagggccagattacctactacaacagatacaagagacagaacgtagtcaaggacctgtccgtcgagctggatagactgagcgaagaatctgtgaacaacgacatctcctcctggacaaagggcagaagcggagaagctctgagcctcctgaagaaaagattctcccatagacccgtgcaggagaagttcgtgtgcctgaactgcggcttcgagacacacgcagccgagcaagccgccctgaacatcgccagatcctggctgttcctgcggagccaggagtacaagaaataccagacaaacaagacaaccggcaacaccgataagagagccttcgtcgagacctggcagtccttttaccggaagaagcttaaggaggtgtggaaacctgccgtgcggtctggcggatctggcggaggctccaccagccccaagaaaaagagaaaagtctaagctgccttctgcggggcttgccttctggccatgcccttcttctctcccttgcacctgtacctcttggtctttgaataaagcctgagtaggaaggctagcaaaaaaaaaaaaaaaaaaaaaaaaaaaaaaaaaaaaaaaaaaaaaaaaaaaaaaaaaaaaaaaaaaaaaaaaaaaaaaaagcccagccggctccccaacctctaccgaggagggcacctctgagtccgccacccccgagagcggccctggcacctccaccgagcccagcgagggcagcgcacccggcagccctgccggcagccccacctccacagaggagggaaccagcaccgagcccagcgaaggcagcgccccaggcaccagcaccgagcctagtgagcaggagattaaacggatcaacaagatcagaagaagacttgtgaaagacagcaacaccaagaaggccggcaagacaggccccatgaaaaccctgctggttagagtgatgacacccgatctgagagagcggctggaaaacctgagaaagaagcctgaaaatatcccccagcccatcagcaatacatctagagccaacctgaataagctgctgaccgattacaccgaaatgaagaaggcgatcctgcatgtgtactgggaagagttccagaaggaccctgtgggcctgatgagccgggtggcccagcctgccagcaagaagatcgatcagaacaagctgaaacctgagatggacgagaagggcaacctgaccaccgccggctttgcctgctctcagtgtggccagcccctgttcgtgtacaagctggagcaggtgtctgagaagggcaaggcttacaccaactacttcggacggtgcaatgtggccgagcacgaaaagctgatcctgctggcccagctgaagcccgagaaggatagcgacgaagccgtgacatatagcctgggaaagtttgggcagagggccctggatttctacagcattcatgtgaccaaggagtccacccaccccgtgaagcccctggcccagatcgccggaaacagatacgcctccggacctgtgggaaaggccctgagcgacgcatgtatgggcacaatcgcctccttcctgtctaagtaccaggacatcatcatcgaacaccagaaggtggtgaagggcaaccagaagagactggagagcctgcgggagctggccggcaaggaaaacctggaataccctagcgtgaccctgccacctcagcctcacaccaaggagggcgttgatgcctacaacgaagtgatcgcccgggtgcgaatgtgggtgaacctgaacctgtggcagaagctgaagctaagcagagatgatgccaagcctctgctgagactgaagggattcccttcctttcctctggtcgagagacaggccaacgaagtggactggtgggacatggtgtgtaacgtgaagaagctgatcaacgagaaaaaggaggatggcaaggtgttttggcagaatctggctggctacaagagacaggaagccctgagaccatacctgagcagcgaggaagatcggaagaagggaaagaaattcgctcggtaccagctgggcgacctgctgctgcacctggaaaagaagcacggcgaggactggggaaaggtgtacgacgaggcctgggagcggattgacaagaaagtggaaggcctgagcaagcacatcaagctggaagaggaacggagaagcgaggacgcccagagcaaggccgccctgaccgactggctgcgggctaaggccagcttcgtgatcgagggcctgaaggaggccgacaaggacgagttctgcagatgcgagctgaagctgcagaagtggtacggggacctgcggggaaagcccttcgccatcgaagccgagaacagcatcctggacatcagcggcttcagcaagcagtacaactgtgccttcatctggcagaaggacggcgtgaagaagctgaacctgtacctgatcatcaactacttcaagggcggcaagctgcggttcaagaagatcaaacctgaagccttcgaagccaacagattctacaccgtgatcaacaaaaagagcggcgagatcgtgcccatggaggtgaacttcaacttcgacgaccccaacctgatcatcctgcctctggcctttggcaagagacagggcagagaattcatctggaacgacctgctgtccctggaaaccggcagcctgaagctggccaacggaagagtgatcgagaagacactgtacaacagaagaacccggcaggatgagcctgccctgttcgtggccctgaccttcgagcggcgggaggtcctggactcctccaatatcaaaccaatgaacctgatcggcgtggcaagaggcgaaaacatccccgccgtgatcgccctgaccgaccccgagggctgcccactgagccggtttaaggatagcctgggaaacccaacccacatcctgagaatcggcgagagctataaggagaagcagcggaccatccaggccaagaaggaggtggagcagcggagagccggcggctacagccggaagtacgccagcaaagccaagaatctggcagacgatatggtgagaaacaccgctagagatctgctgtactacgccgtgacccaggatgccatgctgatcttcgccaacctgagccggggcttcggccggcagggcaagcggaccttcatggccgagagacagtacacacggatggaggactggctgaccgccaagctggcctacgagggcctgagcaagacctacctgtccaagacactggcccagtacacctccaagacatgcagcaactgtgggtttaccatcaccagcgccgactacgacagggtgctggagaagctgaagaagacagcaacaggctggatgaccacaattaacggcaaggagctgaaggtggagggccagattacctactacaacagatacaagagacagaacgtagtcaaggacctgtccgtcgagctggatagactgagcgaagaatctgtgaacaacgacatctcctcctggacaaagggcagaagcggagaagctctgagcctcctgaagaaaagattctcccatagacccgtgcaggagaagttcgtgtgcctgaactgcggcttcgagacacacgcagccgagcaagccgccctgaacatcgccagatcctggctgttcctgcggagccaggagtacaagaaataccagacaaacaagacaaccggcaacaccgataagagagccttcgtcgagacctggcagtccttttaccggaagaagcttaaggaggtgtggaaacctgccgtgcggtctggcggatctggcggaggctccaccagccccaagaaaaagagaaaagtctaagctgccttctgcggggcttgccttctggccatgcccttcttctctcccttgcacctgtacctcttggtctttgaataaagcctgagtaggaaggctagcaaaaaaaaaaaaaaaaaaaaaaaaaaaaaaaaaaaaaaaaaaaaaaaaaaaaaaaaaaaaaaaaaaaaaaaaaaaaaaaa

SEQ ID NO: 8994 - RNA, 8787 nt, synthetic construct
  source 1..8787: mol_type = other RNA
aggaaataagagagaaaagaagagtaagaagaaatataagagccaccatggcccctaagaagaagcgtaaagtgagccggatgaaccacgaccaggagttcgacccccctaaggtgtaccctcccgtccccgccgagaagagaaagcccatccgggtcctgagcctgttcgatggcatcgccaccggtctgctggtgctgaaggacctgggcatccaggtggataggtacattgcctccgaggtgtgcgaggactccatcaccgtgggaatggtgcgtcatcagggcaagatcatgtacgtgggcgacgtgcggagcgtgacacagaagcatatccaggagtggggccctttcgacctggtgatcggcggcagcccttgcaatgacctgagcatcgtgaacccagcccggaagggcctgtacgagggaaccggcagactgttcttcgagttttacagactgctgcacgacgcccggcctaaggaaggcgacgaccggcccttcttttggctgttcgagaatgtggtggccatgggagtcagcgacaagcgggatattagccggttcctggagagcaaccccgtgatgatcgatgccaaggaagtgagcgccgcccaccgggccagatacttctggggcaatctgcctggcatgaacagacccctggccagcaccgtgaacgacaagctggagctgcaggagtgcctggagcacggccggatcgccaagttcagcaaggtgagaaccatcaccacccgaagcaacagcatcaaacaaggcaaggaccagcactttcctgtgttcatgaacgagaaggaggacatcctgtggtgtaccgagatggagagagtgttcgggttcccagtccactacacagatgtcagcaacatgtctagactggccagacagagactgctgggaagaagctggtccgtccctgtgatcagacacctgttcgcccctctgaaggagtacttcgcctgcgtgagcagcggcaacagcaacgccaacagccggggccccagcttctctagcggcctggtgccactgtccctgagagggagccacatgggccccatggagatctacaaaaccgtgagcgcctggaagcggcagcctgtgcgcgtgctgagcctgtttcggaatatcgataaagtcctgaaaagcctgggattcctggagagcggctctggctccggcggtggcaccctgaagtacgtggaggatgtgacaaacgtggtcagacgggatgtggagaagtggggccccttcgatctggtgtacggcagcacccaacccctgggcagctcttgtgaccggtgccctggctggtacatgtttcagttccaccggatcctgcagtacgccctgccgagacaggagtcccagcggccattcttttggattttcatggacaacttgctgctgaccgaggatgaccaggaaactaccactcggttcctgcagaccgaagccgtgaccctgcaggacgtgagaggccgggactaccagaacgccatgcgggtgtggtccaacatccctggactgaaaagcaagcacgcacctctgacccctaaagaagaggagtacctgcaggcccaggtgcggagcagaagcaagctggacgcccctaaggtggatctgctggtgaagaattgcctcctgcccctgagagagtacttcaagtatttcagccagaatagtctgcccctgggaggcagcggcggcggcagccagggcctggtgaccttcggcgacgtggccgtggacttcagccaggaggagtgggagtggctgaaccccatccagaggaacctgtacaggaaggtgatgctggagaactacaggaacctggcctggctgggcctgtgcgtgagcaagcccgacgtgatcagcagcctggagcagggcaaggagccctggaccgtgaagaggaagatgaccagggcctggtgccccgacctgaaggccgtgggcggcccaagcagcggcgcccctcctcccagcggcggcaggcggcccaagcagcggcgcccctcctcccagcggcggcagcccagccggctccccaacctctaccgaggagggcacctctgagtccgccacccccgagagcggccctggcacctccaccgagcccagcgagggcagcgcacccggcagccctgccggcagccccacctccacagaggagggaaccagcaccgagcccagcgaaggcagcgccccaggcaccagcaccgagcctagtgagcaggagattaaacggatcaacaagatcagaagaagacttgtgaaagacagcaacaccaagaaggccggcaagacaggccccatgaaaaccctgctggttagagtgatgacacccgatctgagagagcggctggaaaacctgagaaagaagcctgaaaatatcccccagcccatcagcaatacatctagagccaacctgaataagctgctgaccgattacaccgaaatgaagaaggcgatcctgcatgtgtactgggaagagttccagaaggaccctgtgggcctgatgagccgggtggcccagcctgccagcaagaagatcgatcagaacaagctgaaacctgagatggacgagaagggcaacctgaccaccgccggctttgcctgctctcagtgtggccagcccctgttcgtgtacaagctggagcaggtgtctgagaagggcaaggcttacaccaactacttcggacggtgcaatgtggccgagcacgaaaagctgatcctgctggcccagctgaagcccgagaaggatagcgacgaagccgtgacatatagcctgggaaagtttgggcagagggccctggatttctacagcattcatgtgaccaaggagtccacccaccccgtgaagcccctggcccagatcgccggaaacagatacgcctccggacctgtgggaaaggccctgagcgacgcatgtatgggcacaatcgcctccttcctgtctaagtaccaggacatcatcatcgaacaccagaaggtggtgaagggcaaccagaagagactggagagcctgcgggagctggccggcaaggaaaacctggaataccctagcgtgaccctgccacctcagcctcacaccaaggagggcgttgatgcctacaacgaagtgatcgcccgggtgcgaatgtgggtgaacctgaacctgtggcagaagctgaagctaagcagagatgatgccaagcctctgctgagactgaagggattcccttcctttcctctggtcgagagacaggccaacgaagtggactggtgggacatggtgtgtaacgtgaagaagctgatcaacgagaaaaaggaggatggcaaggtgttttggcagaatctggctggctacaagagacaggaagccctgagaccatacctgagcagcgaggaagatcggaagaagggaaagaaattcgctcggtaccagctgggcgacctgctgctgcacctggaaaagaagcacggcgaggactggggaaaggtgtacgacgaggcctgggagcggattgacaagaaagtggaaggcctgagcaagcacatcaagctggaagaggaacggagaagcgaggacgcccagagcaaggccgccctgaccgactggctgcgggctaaggccagcttcgtgatcgagggcctgaaggaggccgacaaggacgagttctgcagatgcgagctgaagctgcagaagtggtacggggacctgcggggaaagcccttcgccatcgaagccgagaacagcatcctggacatcagcggcttcagcaagcagtacaactgtgccttcatctggcagaaggacggcgtgaagaagctgaacctgtacctgatcatcaactacttcaagggcggcaagctgcggttcaagaagatcaaacctgaagccttcgaagccaacagattctacaccgtgatcaacaaaaagagcggcgagatcgtgcccatggaggtgaacttcaacttcgacgaccccaacctgatcatcctgcctctggcctttggcaagagacagggcagagaattcatctggaacgacctgctgtccctggaaaccggcagcctgaagctggccaacggaagagtgatcgagaagacactgtacaacagaagaacccggcaggatgagcctgccctgttcgtggccctgaccttcgagcggcgggaggtcctggactcctccaatatcaaaccaatgaacctgatcggcgtggcaagaggcgaaaacatccccgccgtgatcgccctgaccgaccccgagggctgcccactgagccggtttaaggatagcctgggaaacccaacccacatcctgagaatcggcgagagctataaggagaagcagcggaccatccaggccaagaaggaggtggagcagcggagagccggcggctacagccggaagtacgccagcaaagccaagaatctggcagacgatatggtgagaaacaccgctagagatctgctgtactacgccgtgacccaggatgccatgctgatcttcgccaacctgagccggggcttcggccggcagggcaagcggaccttcatggccgagagacagtacacacggatggaggactggctgaccgccaagctggcctacgagggcctgagcaagacctacctgtccaagacactggcccagtacacctccaagacatgcagcaactgtgggtttaccatcaccagcgccgactacgacagggtgctggagaagctgaagaagacagcaacaggctggatgaccacaattaacggcaaggagctgaaggtggagggccagattacctactacaacagatacaagagacagaacgtagtcaaggacctgtccgtcgagctggatagactgagcgaagaatctgtgaacaacgacatctcctcctggacaaagggcagaagcggagaagctctgagcctcctgaagaaaagattctcccatagacccgtgcaggagaagttcgtgtgcctgaactgcggcttcgagacacacgcagccgagcaagccgccctgaacatcgccagatcctggctgttcctgcggagccaggagtacaagaaataccagacaaacaagacaaccggcaacaccgataagagagccttcgtcgagacctggcagtccttttaccggaagaagcttaaggaggtgtggaaacctgccgtgcggtctggcggatctggcggaggctccaccagccccaagaaaaagagaaaagtctaagctgccttctgcggggcttgccttctggccatgcccttcttctctcccttgcacctgtacctcttggtctttgaataaagcctgagtaggaaggctagcaaaaaaaaaaaaaaaaaaaaaaaaaaaaaaaaaaaaaaaaaaaaaaaaaaaaaaaaaaaaaaaaaaaaaaaaaaaaaaaagcccagccggctccccaacctctaccgaggagggcacctctgagtccgccacccccgagagcggccctggcacctccaccgagcccagcgagggcagcgcacccggcagccctgccggcagccccacctccacagaggagggaaccagcaccgagcccagcgaaggcagcgccccaggcaccagcaccgagcctagtgagcaggagattaaacggatcaacaagatcagaagaagacttgtgaaagacagcaacaccaagaaggccggcaagacaggccccatgaaaaccctgctggttagagtgatgacacccgatctgagagagcggctggaaaacctgagaaagaagcctgaaaatatcccccagcccatcagcaatacatctagagccaacctgaataagctgctgaccgattacaccgaaatgaagaaggcgatcctgcatgtgtactgggaagagttccagaaggaccctgtgggcctgatgagccgggtggcccagcctgccagcaagaagatcgatcagaacaagctgaaacctgagatggacgagaagggcaacctgaccaccgccggctttgcctgctctcagtgtggccagcccctgttcgtgtacaagctggagcaggtgtctgagaagggcaaggcttacaccaactacttcggacggtgcaatgtggccgagcacgaaaagctgatcctgctggcccagctgaagcccgagaaggatagcgacgaagccgtgacatatagcctgggaaagtttgggcagagggccctggatttctacagcattcatgtgaccaaggagtccacccaccccgtgaagcccctggcccagatcgccggaaacagatacgcctccggacctgtgggaaaggccctgagcgacgcatgtatgggcacaatcgcctccttcctgtctaagtaccaggacatcatcatcgaacaccagaaggtggtgaagggcaaccagaagagactggagagcctgcgggagctggccggcaaggaaaacctggaataccctagcgtgaccctgccacctcagcctcacaccaaggagggcgttgatgcctacaacgaagtgatcgcccgggtgcgaatgtgggtgaacctgaacctgtggcagaagctgaagctaagcagagatgatgccaagcctctgctgagactgaagggattcccttcctttcctctggtcgagagacaggccaacgaagtggactggtgggacatggtgtgtaacgtgaagaagctgatcaacgagaaaaaggaggatggcaaggtgttttggcagaatctggctggctacaagagacaggaagccctgagaccatacctgagcagcgaggaagatcggaagaagggaaagaaattcgctcggtaccagctgggcgacctgctgctgcacctggaaaagaagcacggcgaggactggggaaaggtgtacgacgaggcctgggagcggattgacaagaaagtggaaggcctgagcaagcacatcaagctggaagaggaacggagaagcgaggacgcccagagcaaggccgccctgaccgactggctgcgggctaaggccagcttcgtgatcgagggcctgaaggaggccgacaaggacgagttctgcagatgcgagctgaagctgcagaagtggtacggggacctgcggggaaagcccttcgccatcgaagccgagaacagcatcctggacatcagcggcttcagcaagcagtacaactgtgccttcatctggcagaaggacggcgtgaagaagctgaacctgtacctgatcatcaactacttcaagggcggcaagctgcggttcaagaagatcaaacctgaagccttcgaagccaacagattctacaccgtgatcaacaaaaagagcggcgagatcgtgcccatggaggtgaacttcaacttcgacgaccccaacctgatcatcctgcctctggcctttggcaagagacagggcagagaattcatctggaacgacctgctgtccctggaaaccggcagcctgaagctggccaacggaagagtgatcgagaagacactgtacaacagaagaacccggcaggatgagcctgccctgttcgtggccctgaccttcgagcggcgggaggtcctggactcctccaatatcaaaccaatgaacctgatcggcgtggcaagaggcgaaaacatccccgccgtgatcgccctgaccgaccccgagggctgcccactgagccggtttaaggatagcctgggaaacccaacccacatcctgagaatcggcgagagctataaggagaagcagcggaccatccaggccaagaaggaggtggagcagcggagagccggcggctacagccggaagtacgccagcaaagccaagaatctggcagacgatatggtgagaaacaccgctagagatctgctgtactacgccgtgacccaggatgccatgctgatcttcgccaacctgagccggggcttcggccggcagggcaagcggaccttcatggccgagagacagtacacacggatggaggactggctgaccgccaagctggcctacgagggcctgagcaagacctacctgtccaagacactggcccagtacacctccaagacatgcagcaactgtgggtttaccatcaccagcgccgactacgacagggtgctggagaagctgaagaagacagcaacaggctggatgaccacaattaacggcaaggagctgaaggtggagggccagattacctactacaacagatacaagagacagaacgtagtcaaggacctgtccgtcgagctggatagactgagcgaagaatctgtgaacaacgacatctcctcctggacaaagggcagaagcggagaagctctgagcctcctgaagaaaagattctcccatagacccgtgcaggagaagttcgtgtgcctgaactgcggcttcgagacacacgcagccgagcaagccgccctgaacatcgccagatcctggctgttcctgcggagccaggagtacaagaaataccagacaaacaagacaaccggcaacaccgataagagagccttcgtcgagacctggcagtccttttaccggaagaagcttaaggaggtgtggaaacctgccgtgcggtctggcggatctggcggaggctccaccagccccaagaaaaagagaaaagtctaagctgccttctgcggggcttgccttctggccatgcccttcttctctcccttgcacctgtacctcttggtctttgaataaagcctgagtaggaaggctagcaaaaaaaaaaaaaaaaaaaaaaaaaaaaaaaaaaaaaaaaaaaaaaaaaaaaaaaaaaaaaaaaaaaaaaaaaaaaaaaa

SEQ ID NO: 8995 - RNA, 8787 nt, synthetic construct
  source 1..8787: mol_type = other RNA
aggaaataagagagaaaagaagagtaagaagaaatataagagccaccatggcccctaagaagaagcgtaaagtgagccggatgaaccacgaccaggagttcgacccccctaaggtgtaccctcccgtccccgccgagaagagaaagcccatccgggtcctgagcctgttcgatggcatcgccaccggtctgctggtgctgaaggacctgggcatccaggtggataggtacattgcctccgaggtgtgcgaggactccatcaccgtgggaatggtgcgtcatcagggcaagatcatgtacgtgggcgacgtgcggagcgtgacacagaagcatatccaggagtggggccctttcgacctggtgatcggcggcagcccttgcaatgacctgagcatcgtgaacccagcccggaagggcctgtacgagggaaccggcagactgttcttcgagttttacagactgctgcacgacgcccggcctaaggaaggcgacgaccggcccttcttttggctgttcgagaatgtggtggccatgggagtcagcgacaagcgggatattagccggttcctggagagcaaccccgtgatgatcgatgccaaggaagtgagcgccgcccaccgggccagatacttctggggcaatctgcctggcatgaacagacccctggccagcaccgtgaacgacaagctggagctgcaggagtgcctggagcacggccggatcgccaagttcagcaaggtgagaaccatcaccacccgaagcaacagcatcaaacaaggcaaggaccagcactttcctgtgttcatgaacgagaaggaggacatcctgtggtgtaccgagatggagagagtgttcgggttcccagtccactacacagatgtcagcaacatgtctagactggccagacagagactgctgggaagaagctggtccgtccctgtgatcagacacctgttcgcccctctgaaggagtacttcgcctgcgtgagcagcggcaacagcaacgccaacagccggggccccagcttctctagcggcctggtgccactgtccctgagagggagccacatgggccccatggagatctacaaaaccgtgagcgcctggaagcggcagcctgtgcgcgtgctgagcctgtttcggaatatcgataaagtcctgaaaagcctgggattcctggagagcggctctggctccggcggtggcaccctgaagtacgtggaggatgtgacaaacgtggtcagacgggatgtggagaagtggggccccttcgatctggtgtacggcagcacccaacccctgggcagctcttgtgaccggtgccctggctggtacatgtttcagttccaccggatcctgcagtacgccctgccgagacaggagtcccagcggccattcttttggattttcatggacaacttgctgctgaccgaggatgaccaggaaactaccactcggttcctgcagaccgaagccgtgaccctgcaggacgtgagaggccgggactaccagaacgccatgcgggtgtggtccaacatccctggactgaaaagcaagcacgcacctctgacccctaaagaagaggagtacctgcaggcccaggtgcggagcagaagcaagctggacgcccctaaggtggatctgctggtgaagaattgcctcctgcccctgagagagtacttcaagtatttcagccagaatagtctgcccctgggaggcagcggcggcggcagccaggagagcgtggccttcgaggacgtggccgtgtacttcaccaccaaggagtgggccatcatggtgcccgccgagagggccctgtacagggacgtgatgctggagaactacgaggccgtggccttcgtggtgccccccaccagcaagcccgccctggtgagccacctggagcagggcaaggagagctgcttcatcaggccccaggtggtgctgagcaggagcgactggagggccggcctgggcggcccaagcagcggcgcccctcctcccagcggcggcaggcggcccaagcagcggcgcccctcctcccagcggcggcagcccagccggctccccaacctctaccgaggagggcacctctgagtccgccacccccgagagcggccctggcacctccaccgagcccagcgagggcagcgcacccggcagccctgccggcagccccacctccacagaggagggaaccagcaccgagcccagcgaaggcagcgccccaggcaccagcaccgagcctagtgagcaggagattaaacggatcaacaagatcagaagaagacttgtgaaagacagcaacaccaagaaggccggcaagacaggccccatgaaaaccctgctggttagagtgatgacacccgatctgagagagcggctggaaaacctgagaaagaagcctgaaaatatcccccagcccatcagcaatacatctagagccaacctgaataagctgctgaccgattacaccgaaatgaagaaggcgatcctgcatgtgtactgggaagagttccagaaggaccctgtgggcctgatgagccgggtggcccagcctgccagcaagaagatcgatcagaacaagctgaaacctgagatggacgagaagggcaacctgaccaccgccggctttgcctgctctcagtgtggccagcccctgttcgtgtacaagctggagcaggtgtctgagaagggcaaggcttacaccaactacttcggacggtgcaatgtggccgagcacgaaaagctgatcctgctggcccagctgaagcccgagaaggatagcgacgaagccgtgacatatagcctgggaaagtttgggcagagggccctggatttctacagcattcatgtgaccaaggagtccacccaccccgtgaagcccctggcccagatcgccggaaacagatacgcctccggacctgtgggaaaggccctgagcgacgcatgtatgggcacaatcgcctccttcctgtctaagtaccaggacatcatcatcgaacaccagaaggtggtgaagggcaaccagaagagactggagagcctgcgggagctggccggcaaggaaaacctggaataccctagcgtgaccctgccacctcagcctcacaccaaggagggcgttgatgcctacaacgaagtgatcgcccgggtgcgaatgtgggtgaacctgaacctgtggcagaagctgaagctaagcagagatgatgccaagcctctgctgagactgaagggattcccttcctttcctctggtcgagagacaggccaacgaagtggactggtgggacatggtgtgtaacgtgaagaagctgatcaacgagaaaaaggaggatggcaaggtgttttggcagaatctggctggctacaagagacaggaagccctgagaccatacctgagcagcgaggaagatcggaagaagggaaagaaattcgctcggtaccagctgggcgacctgctgctgcacctggaaaagaagcacggcgaggactggggaaaggtgtacgacgaggcctgggagcggattgacaagaaagtggaaggcctgagcaagcacatcaagctggaagaggaacggagaagcgaggacgcccagagcaaggccgccctgaccgactggctgcgggctaaggccagcttcgtgatcgagggcctgaaggaggccgacaaggacgagttctgcagatgcgagctgaagctgcagaagtggtacggggacctgcggggaaagcccttcgccatcgaagccgagaacagcatcctggacatcagcggcttcagcaagcagtacaactgtgccttcatctggcagaaggacggcgtgaagaagctgaacctgtacctgatcatcaactacttcaagggcggcaagctgcggttcaagaagatcaaacctgaagccttcgaagccaacagattctacaccgtgatcaacaaaaagagcggcgagatcgtgcccatggaggtgaacttcaacttcgacgaccccaacctgatcatcctgcctctggcctttggcaagagacagggcagagaattcatctggaacgacctgctgtccctggaaaccggcagcctgaagctggccaacggaagagtgatcgagaagacactgtacaacagaagaacccggcaggatgagcctgccctgttcgtggccctgaccttcgagcggcgggaggtcctggactcctccaatatcaaaccaatgaacctgatcggcgtggcaagaggcgaaaacatccccgccgtgatcgccctgaccgaccccgagggctgcccactgagccggtttaaggatagcctgggaaacccaacccacatcctgagaatcggcgagagctataaggagaagcagcggaccatccaggccaagaaggaggtggagcagcggagagccggcggctacagccggaagtacgccagcaaagccaagaatctggcagacgatatggtgagaaacaccgctagagatctgctgtactacgccgtgacccaggatgccatgctgatcttcgccaacctgagccggggcttcggccggcagggcaagcggaccttcatggccgagagacagtacacacggatggaggactggctgaccgccaagctggcctacgagggcctgagcaagacctacctgtccaagacactggcccagtacacctccaagacatgcagcaactgtgggtttaccatcaccagcgccgactacgacagggtgctggagaagctgaagaagacagcaacaggctggatgaccacaattaacggcaaggagctgaaggtggagggccagattacctactacaacagatacaagagacagaacgtagtcaaggacctgtccgtcgagctggatagactgagcgaagaatctgtgaacaacgacatctcctcctggacaaagggcagaagcggagaagctctgagcctcctgaagaaaagattctcccatagacccgtgcaggagaagttcgtgtgcctgaactgcggcttcgagacacacgcagccgagcaagccgccctgaacatcgccagatcctggctgttcctgcggagccaggagtacaagaaataccagacaaacaagacaaccggcaacaccgataagagagccttcgtcgagacctggcagtccttttaccggaagaagcttaaggaggtgtggaaacctgccgtgcggtctggcggatctggcggaggctccaccagccccaagaaaaagagaaaagtctaagctgccttctgcggggcttgccttctggccatgcccttcttctctcccttgcacctgtacctcttggtctttgaataaagcctgagtaggaaggctagcaaaaaaaaaaaaaaaaaaaaaaaaaaaaaaaaaaaaaaaaaaaaaaaaaaaaaaaaaaaaaaaaaaaaaaaaaaaaaaaagcccagccggctccccaacctctaccgaggagggcacctctgagtccgccacccccgagagcggccctggcacctccaccgagcccagcgagggcagcgcacccggcagccctgccggcagccccacctccacagaggagggaaccagcaccgagcccagcgaaggcagcgccccaggcaccagcaccgagcctagtgagcaggagattaaacggatcaacaagatcagaagaagacttgtgaaagacagcaacaccaagaaggccggcaagacaggccccatgaaaaccctgctggttagagtgatgacacccgatctgagagagcggctggaaaacctgagaaagaagcctgaaaatatcccccagcccatcagcaatacatctagagccaacctgaataagctgctgaccgattacaccgaaatgaagaaggcgatcctgcatgtgtactgggaagagttccagaaggaccctgtgggcctgatgagccgggtggcccagcctgccagcaagaagatcgatcagaacaagctgaaacctgagatggacgagaagggcaacctgaccaccgccggctttgcctgctctcagtgtggccagcccctgttcgtgtacaagctggagcaggtgtctgagaagggcaaggcttacaccaactacttcggacggtgcaatgtggccgagcacgaaaagctgatcctgctggcccagctgaagcccgagaaggatagcgacgaagccgtgacatatagcctgggaaagtttgggcagagggccctggatttctacagcattcatgtgaccaaggagtccacccaccccgtgaagcccctggcccagatcgccggaaacagatacgcctccggacctgtgggaaaggccctgagcgacgcatgtatgggcacaatcgcctccttcctgtctaagtaccaggacatcatcatcgaacaccagaaggtggtgaagggcaaccagaagagactggagagcctgcgggagctggccggcaaggaaaacctggaataccctagcgtgaccctgccacctcagcctcacaccaaggagggcgttgatgcctacaacgaagtgatcgcccgggtgcgaatgtgggtgaacctgaacctgtggcagaagctgaagctaagcagagatgatgccaagcctctgctgagactgaagggattcccttcctttcctctggtcgagagacaggccaacgaagtggactggtgggacatggtgtgtaacgtgaagaagctgatcaacgagaaaaaggaggatggcaaggtgttttggcagaatctggctggctacaagagacaggaagccctgagaccatacctgagcagcgaggaagatcggaagaagggaaagaaattcgctcggtaccagctgggcgacctgctgctgcacctggaaaagaagcacggcgaggactggggaaaggtgtacgacgaggcctgggagcggattgacaagaaagtggaaggcctgagcaagcacatcaagctggaagaggaacggagaagcgaggacgcccagagcaaggccgccctgaccgactggctgcgggctaaggccagcttcgtgatcgagggcctgaaggaggccgacaaggacgagttctgcagatgcgagctgaagctgcagaagtggtacggggacctgcggggaaagcccttcgccatcgaagccgagaacagcatcctggacatcagcggcttcagcaagcagtacaactgtgccttcatctggcagaaggacggcgtgaagaagctgaacctgtacctgatcatcaactacttcaagggcggcaagctgcggttcaagaagatcaaacctgaagccttcgaagccaacagattctacaccgtgatcaacaaaaagagcggcgagatcgtgcccatggaggtgaacttcaacttcgacgaccccaacctgatcatcctgcctctggcctttggcaagagacagggcagagaattcatctggaacgacctgctgtccctggaaaccggcagcctgaagctggccaacggaagagtgatcgagaagacactgtacaacagaagaacccggcaggatgagcctgccctgttcgtggccctgaccttcgagcggcgggaggtcctggactcctccaatatcaaaccaatgaacctgatcggcgtggcaagaggcgaaaacatccccgccgtgatcgccctgaccgaccccgagggctgcccactgagccggtttaaggatagcctgggaaacccaacccacatcctgagaatcggcgagagctataaggagaagcagcggaccatccaggccaagaaggaggtggagcagcggagagccggcggctacagccggaagtacgccagcaaagccaagaatctggcagacgatatggtgagaaacaccgctagagatctgctgtactacgccgtgacccaggatgccatgctgatcttcgccaacctgagccggggcttcggccggcagggcaagcggaccttcatggccgagagacagtacacacggatggaggactggctgaccgccaagctggcctacgagggcctgagcaagacctacctgtccaagacactggcccagtacacctccaagacatgcagcaactgtgggtttaccatcaccagcgccgactacgacagggtgctggagaagctgaagaagacagcaacaggctggatgaccacaattaacggcaaggagctgaaggtggagggccagattacctactacaacagatacaagagacagaacgtagtcaaggacctgtccgtcgagctggatagactgagcgaagaatctgtgaacaacgacatctcctcctggacaaagggcagaagcggagaagctctgagcctcctgaagaaaagattctcccatagacccgtgcaggagaagttcgtgtgcctgaactgcggcttcgagacacacgcagccgagcaagccgccctgaacatcgccagatcctggctgttcctgcggagccaggagtacaagaaataccagacaaacaagacaaccggcaacaccgataagagagccttcgtcgagacctggcagtccttttaccggaagaagcttaaggaggtgtggaaacctgccgtgcggtctggcggatctggcggaggctccaccagccccaagaaaaagagaaaagtctaagctgccttctgcggggcttgccttctggccatgcccttcttctctcccttgcacctgtacctcttggtctttgaataaagcctgagtaggaaggctagcaaaaaaaaaaaaaaaaaaaaaaaaaaaaaaaaaaaaaaaaaaaaaaaaaaaaaaaaaaaaaaaaaaaaaaaaaaaaaaaa

SEQ ID NO: 8996 - RNA, 8787 nt, synthetic construct
  source 1..8787: mol_type = other RNA
aggaaataagagagaaaagaagagtaagaagaaatataagagccaccatggcccctaagaagaagcgtaaagtgagccggatgaaccacgaccaggagttcgacccccctaaggtgtaccctcccgtccccgccgagaagagaaagcccatccgggtcctgagcctgttcgatggcatcgccaccggtctgctggtgctgaaggacctgggcatccaggtggataggtacattgcctccgaggtgtgcgaggactccatcaccgtgggaatggtgcgtcatcagggcaagatcatgtacgtgggcgacgtgcggagcgtgacacagaagcatatccaggagtggggccctttcgacctggtgatcggcggcagcccttgcaatgacctgagcatcgtgaacccagcccggaagggcctgtacgagggaaccggcagactgttcttcgagttttacagactgctgcacgacgcccggcctaaggaaggcgacgaccggcccttcttttggctgttcgagaatgtggtggccatgggagtcagcgacaagcgggatattagccggttcctggagagcaaccccgtgatgatcgatgccaaggaagtgagcgccgcccaccgggccagatacttctggggcaatctgcctggcatgaacagacccctggccagcaccgtgaacgacaagctggagctgcaggagtgcctggagcacggccggatcgccaagttcagcaaggtgagaaccatcaccacccgaagcaacagcatcaaacaaggcaaggaccagcactttcctgtgttcatgaacgagaaggaggacatcctgtggtgtaccgagatggagagagtgttcgggttcccagtccactacacagatgtcagcaacatgtctagactggccagacagagactgctgggaagaagctggtccgtccctgtgatcagacacctgttcgcccctctgaaggagtacttcgcctgcgtgagcagcggcaacagcaacgccaacagccggggccccagcttctctagcggcctggtgccactgtccctgagagggagccacatgggccccatggagatctacaaaaccgtgagcgcctggaagcggcagcctgtgcgcgtgctgagcctgtttcggaatatcgataaagtcctgaaaagcctgggattcctggagagcggctctggctccggcggtggcaccctgaagtacgtggaggatgtgacaaacgtggtcagacgggatgtggagaagtggggccccttcgatctggtgtacggcagcacccaacccctgggcagctcttgtgaccggtgccctggctggtacatgtttcagttccaccggatcctgcagtacgccctgccgagacaggagtcccagcggccattcttttggattttcatggacaacttgctgctgaccgaggatgaccaggaaactaccactcggttcctgcagaccgaagccgtgaccctgcaggacgtgagaggccgggactaccagaacgccatgcgggtgtggtccaacatccctggactgaaaagcaagcacgcacctctgacccctaaagaagaggagtacctgcaggcccaggtgcggagcagaagcaagctggacgcccctaaggtggatctgctggtgaagaattgcctcctgcccctgagagagtacttcaagtatttcagccagaatagtctgcccctgggaggcagcggcggcggcatggtgagcttcgaggacgtggccgtgctgctgagccaggaggagtgggactgcctgatccccgcccagaggggcctgtacagggacgtgatgctggagacctacggcaacctggtgagcctgggcctgcaggccagcaagcccgacgtgatcagcaggctggagcagggcgacaagccctggaccccccacatcctgaggacccagaggagctggagctggaggcacaagagggagtgctacggcggcccaagcagcggcgcccctcctcccagcggcggcaggcggcccaagcagcggcgcccctcctcccagcggcggcagcccagccggctccccaacctctaccgaggagggcacctctgagtccgccacccccgagagcggccctggcacctccaccgagcccagcgagggcagcgcacccggcagccctgccggcagccccacctccacagaggagggaaccagcaccgagcccagcgaaggcagcgccccaggcaccagcaccgagcctagtgagcaggagattaaacggatcaacaagatcagaagaagacttgtgaaagacagcaacaccaagaaggccggcaagacaggccccatgaaaaccctgctggttagagtgatgacacccgatctgagagagcggctggaaaacctgagaaagaagcctgaaaatatcccccagcccatcagcaatacatctagagccaacctgaataagctgctgaccgattacaccgaaatgaagaaggcgatcctgcatgtgtactgggaagagttccagaaggaccctgtgggcctgatgagccgggtggcccagcctgccagcaagaagatcgatcagaacaagctgaaacctgagatggacgagaagggcaacctgaccaccgccggctttgcctgctctcagtgtggccagcccctgttcgtgtacaagctggagcaggtgtctgagaagggcaaggcttacaccaactacttcggacggtgcaatgtggccgagcacgaaaagctgatcctgctggcccagctgaagcccgagaaggatagcgacgaagccgtgacatatagcctgggaaagtttgggcagagggccctggatttctacagcattcatgtgaccaaggagtccacccaccccgtgaagcccctggcccagatcgccggaaacagatacgcctccggacctgtgggaaaggccctgagcgacgcatgtatgggcacaatcgcctccttcctgtctaagtaccaggacatcatcatcgaacaccagaaggtggtgaagggcaaccagaagagactggagagcctgcgggagctggccggcaaggaaaacctggaataccctagcgtgaccctgccacctcagcctcacaccaaggagggcgttgatgcctacaacgaagtgatcgcccgggtgcgaatgtgggtgaacctgaacctgtggcagaagctgaagctaagcagagatgatgccaagcctctgctgagactgaagggattcccttcctttcctctggtcgagagacaggccaacgaagtggactggtgggacatggtgtgtaacgtgaagaagctgatcaacgagaaaaaggaggatggcaaggtgttttggcagaatctggctggctacaagagacaggaagccctgagaccatacctgagcagcgaggaagatcggaagaagggaaagaaattcgctcggtaccagctgggcgacctgctgctgcacctggaaaagaagcacggcgaggactggggaaaggtgtacgacgaggcctgggagcggattgacaagaaagtggaaggcctgagcaagcacatcaagctggaagaggaacggagaagcgaggacgcccagagcaaggccgccctgaccgactggctgcgggctaaggccagcttcgtgatcgagggcctgaaggaggccgacaaggacgagttctgcagatgcgagctgaagctgcagaagtggtacggggacctgcggggaaagcccttcgccatcgaagccgagaacagcatcctggacatcagcggcttcagcaagcagtacaactgtgccttcatctggcagaaggacggcgtgaagaagctgaacctgtacctgatcatcaactacttcaagggcggcaagctgcggttcaagaagatcaaacctgaagccttcgaagccaacagattctacaccgtgatcaacaaaaagagcggcgagatcgtgcccatggaggtgaacttcaacttcgacgaccccaacctgatcatcctgcctctggcctttggcaagagacagggcagagaattcatctggaacgacctgctgtccctggaaaccggcagcctgaagctggccaacggaagagtgatcgagaagacactgtacaacagaagaacccggcaggatgagcctgccctgttcgtggccctgaccttcgagcggcgggaggtcctggactcctccaatatcaaaccaatgaacctgatcggcgtggcaagaggcgaaaacatccccgccgtgatcgccctgaccgaccccgagggctgcccactgagccggtttaaggatagcctgggaaacccaacccacatcctgagaatcggcgagagctataaggagaagcagcggaccatccaggccaagaaggaggtggagcagcggagagccggcggctacagccggaagtacgccagcaaagccaagaatctggcagacgatatggtgagaaacaccgctagagatctgctgtactacgccgtgacccaggatgccatgctgatcttcgccaacctgagccggggcttcggccggcagggcaagcggaccttcatggccgagagacagtacacacggatggaggactggctgaccgccaagctggcctacgagggcctgagcaagacctacctgtccaagacactggcccagtacacctccaagacatgcagcaactgtgggtttaccatcaccagcgccgactacgacagggtgctggagaagctgaagaagacagcaacaggctggatgaccacaattaacggcaaggagctgaaggtggagggccagattacctactacaacagatacaagagacagaacgtagtcaaggacctgtccgtcgagctggatagactgagcgaagaatctgtgaacaacgacatctcctcctggacaaagggcagaagcggagaagctctgagcctcctgaagaaaagattctcccatagacccgtgcaggagaagttcgtgtgcctgaactgcggcttcgagacacacgcagccgagcaagccgccctgaacatcgccagatcctggctgttcctgcggagccaggagtacaagaaataccagacaaacaagacaaccggcaacaccgataagagagccttcgtcgagacctggcagtccttttaccggaagaagcttaaggaggtgtggaaacctgccgtgcggtctggcggatctggcggaggctccaccagccccaagaaaaagagaaaagtctaagctgccttctgcggggcttgccttctggccatgcccttcttctctcccttgcacctgtacctcttggtctttgaataaagcctgagtaggaaggctagcaaaaaaaaaaaaaaaaaaaaaaaaaaaaaaaaaaaaaaaaaaaaaaaaaaaaaaaaaaaaaaaaaaaaaaaaaaaaaaaagcccagccggctccccaacctctaccgaggagggcacctctgagtccgccacccccgagagcggccctggcacctccaccgagcccagcgagggcagcgcacccggcagccctgccggcagccccacctccacagaggagggaaccagcaccgagcccagcgaaggcagcgccccaggcaccagcaccgagcctagtgagcaggagattaaacggatcaacaagatcagaagaagacttgtgaaagacagcaacaccaagaaggccggcaagacaggccccatgaaaaccctgctggttagagtgatgacacccgatctgagagagcggctggaaaacctgagaaagaagcctgaaaatatcccccagcccatcagcaatacatctagagccaacctgaataagctgctgaccgattacaccgaaatgaagaaggcgatcctgcatgtgtactgggaagagttccagaaggaccctgtgggcctgatgagccgggtggcccagcctgccagcaagaagatcgatcagaacaagctgaaacctgagatggacgagaagggcaacctgaccaccgccggctttgcctgctctcagtgtggccagcccctgttcgtgtacaagctggagcaggtgtctgagaagggcaaggcttacaccaactacttcggacggtgcaatgtggccgagcacgaaaagctgatcctgctggcccagctgaagcccgagaaggatagcgacgaagccgtgacatatagcctgggaaagtttgggcagagggccctggatttctacagcattcatgtgaccaaggagtccacccaccccgtgaagcccctggcccagatcgccggaaacagatacgcctccggacctgtgggaaaggccctgagcgacgcatgtatgggcacaatcgcctccttcctgtctaagtaccaggacatcatcatcgaacaccagaaggtggtgaagggcaaccagaagagactggagagcctgcgggagctggccggcaaggaaaacctggaataccctagcgtgaccctgccacctcagcctcacaccaaggagggcgttgatgcctacaacgaagtgatcgcccgggtgcgaatgtgggtgaacctgaacctgtggcagaagctgaagctaagcagagatgatgccaagcctctgctgagactgaagggattcccttcctttcctctggtcgagagacaggccaacgaagtggactggtgggacatggtgtgtaacgtgaagaagctgatcaacgagaaaaaggaggatggcaaggtgttttggcagaatctggctggctacaagagacaggaagccctgagaccatacctgagcagcgaggaagatcggaagaagggaaagaaattcgctcggtaccagctgggcgacctgctgctgcacctggaaaagaagcacggcgaggactggggaaaggtgtacgacgaggcctgggagcggattgacaagaaagtggaaggcctgagcaagcacatcaagctggaagaggaacggagaagcgaggacgcccagagcaaggccgccctgaccgactggctgcgggctaaggccagcttcgtgatcgagggcctgaaggaggccgacaaggacgagttctgcagatgcgagctgaagctgcagaagtggtacggggacctgcggggaaagcccttcgccatcgaagccgagaacagcatcctggacatcagcggcttcagcaagcagtacaactgtgccttcatctggcagaaggacggcgtgaagaagctgaacctgtacctgatcatcaactacttcaagggcggcaagctgcggttcaagaagatcaaacctgaagccttcgaagccaacagattctacaccgtgatcaacaaaaagagcggcgagatcgtgcccatggaggtgaacttcaacttcgacgaccccaacctgatcatcctgcctctggcctttggcaagagacagggcagagaattcatctggaacgacctgctgtccctggaaaccggcagcctgaagctggccaacggaagagtgatcgagaagacactgtacaacagaagaacccggcaggatgagcctgccctgttcgtggccctgaccttcgagcggcgggaggtcctggactcctccaatatcaaaccaatgaacctgatcggcgtggcaagaggcgaaaacatccccgccgtgatcgccctgaccgaccccgagggctgcccactgagccggtttaaggatagcctgggaaacccaacccacatcctgagaatcggcgagagctataaggagaagcagcggaccatccaggccaagaaggaggtggagcagcggagagccggcggctacagccggaagtacgccagcaaagccaagaatctggcagacgatatggtgagaaacaccgctagagatctgctgtactacgccgtgacccaggatgccatgctgatcttcgccaacctgagccggggcttcggccggcagggcaagcggaccttcatggccgagagacagtacacacggatggaggactggctgaccgccaagctggcctacgagggcctgagcaagacctacctgtccaagacactggcccagtacacctccaagacatgcagcaactgtgggtttaccatcaccagcgccgactacgacagggtgctggagaagctgaagaagacagcaacaggctggatgaccacaattaacggcaaggagctgaaggtggagggccagattacctactacaacagatacaagagacagaacgtagtcaaggacctgtccgtcgagctggatagactgagcgaagaatctgtgaacaacgacatctcctcctggacaaagggcagaagcggagaagctctgagcctcctgaagaaaagattctcccatagacccgtgcaggagaagttcgtgtgcctgaactgcggcttcgagacacacgcagccgagcaagccgccctgaacatcgccagatcctggctgttcctgcggagccaggagtacaagaaataccagacaaacaagacaaccggcaacaccgataagagagccttcgtcgagacctggcagtccttttaccggaagaagcttaaggaggtgtggaaacctgccgtgcggtctggcggatctggcggaggctccaccagccccaagaaaaagagaaaagtctaagctgccttctgcggggcttgccttctggccatgcccttcttctctcccttgcacctgtacctcttggtctttgaataaagcctgagtaggaaggctagcaaaaaaaaaaaaaaaaaaaaaaaaaaaaaaaaaaaaaaaaaaaaaaaaaaaaaaaaaaaaaaaaaaaaaaaaaaaaaaaa

SEQ ID NO: 8997 - RNA, 8787 nt, synthetic construct
  source 1..8787: mol_type = other RNA
aggaaataagagagaaaagaagagtaagaagaaatataagagccaccatggcccctaagaagaagcgtaaagtgagccggatgaaccacgaccaggagttcgacccccctaaggtgtaccctcccgtccccgccgagaagagaaagcccatccgggtcctgagcctgttcgatggcatcgccaccggtctgctggtgctgaaggacctgggcatccaggtggataggtacattgcctccgaggtgtgcgaggactccatcaccgtgggaatggtgcgtcatcagggcaagatcatgtacgtgggcgacgtgcggagcgtgacacagaagcatatccaggagtggggccctttcgacctggtgatcggcggcagcccttgcaatgacctgagcatcgtgaacccagcccggaagggcctgtacgagggaaccggcagactgttcttcgagttttacagactgctgcacgacgcccggcctaaggaaggcgacgaccggcccttcttttggctgttcgagaatgtggtggccatgggagtcagcgacaagcgggatattagccggttcctggagagcaaccccgtgatgatcgatgccaaggaagtgagcgccgcccaccgggccagatacttctggggcaatctgcctggcatgaacagacccctggccagcaccgtgaacgacaagctggagctgcaggagtgcctggagcacggccggatcgccaagttcagcaaggtgagaaccatcaccacccgaagcaacagcatcaaacaaggcaaggaccagcactttcctgtgttcatgaacgagaaggaggacatcctgtggtgtaccgagatggagagagtgttcgggttcccagtccactacacagatgtcagcaacatgtctagactggccagacagagactgctgggaagaagctggtccgtccctgtgatcagacacctgttcgcccctctgaaggagtacttcgcctgcgtgagcagcggcaacagcaacgccaacagccggggccccagcttctctagcggcctggtgccactgtccctgagagggagccacatgggccccatggagatctacaaaaccgtgagcgcctggaagcggcagcctgtgcgcgtgctgagcctgtttcggaatatcgataaagtcctgaaaagcctgggattcctggagagcggctctggctccggcggtggcaccctgaagtacgtggaggatgtgacaaacgtggtcagacgggatgtggagaagtggggccccttcgatctggtgtacggcagcacccaacccctgggcagctcttgtgaccggtgccctggctggtacatgtttcagttccaccggatcctgcagtacgccctgccgagacaggagtcccagcggccattcttttggattttcatggacaacttgctgctgaccgaggatgaccaggaaactaccactcggttcctgcagaccgaagccgtgaccctgcaggacgtgagaggccgggactaccagaacgccatgcgggtgtggtccaacatccctggactgaaaagcaagcacgcacctctgacccctaaagaagaggagtacctgcaggcccaggtgcggagcagaagcaagctggacgcccctaaggtggatctgctggtgaagaattgcctcctgcccctgagagagtacttcaagtatttcagccagaatagtctgcccctgggaggcagcggcggcggccaggccgaggtgaccttcgaggacgtggccgtgctgttcagcagggaggagtggggcaggctgggccccgcccagaggggcctgtacagggacgtgatgctggagacctacaggaacctggtgagcctgggcgccggccccgccgcccccaagcccggcgtgatcacccagctggagaggggcgacgagccctgggtgctggacgcccagggcgccaagggcaaggagaggctgagggtgagcggcggcccaagcagcggcgcccctcctcccagcggcggcaggcggcccaagcagcggcgcccctcctcccagcggcggcagcccagccggctccccaacctctaccgaggagggcacctctgagtccgccacccccgagagcggccctggcacctccaccgagcccagcgagggcagcgcacccggcagccctgccggcagccccacctccacagaggagggaaccagcaccgagcccagcgaaggcagcgccccaggcaccagcaccgagcctagtgagcaggagattaaacggatcaacaagatcagaagaagacttgtgaaagacagcaacaccaagaaggccggcaagacaggccccatgaaaaccctgctggttagagtgatgacacccgatctgagagagcggctggaaaacctgagaaagaagcctgaaaatatcccccagcccatcagcaatacatctagagccaacctgaataagctgctgaccgattacaccgaaatgaagaaggcgatcctgcatgtgtactgggaagagttccagaaggaccctgtgggcctgatgagccgggtggcccagcctgccagcaagaagatcgatcagaacaagctgaaacctgagatggacgagaagggcaacctgaccaccgccggctttgcctgctctcagtgtggccagcccctgttcgtgtacaagctggagcaggtgtctgagaagggcaaggcttacaccaactacttcggacggtgcaatgtggccgagcacgaaaagctgatcctgctggcccagctgaagcccgagaaggatagcgacgaagccgtgacatatagcctgggaaagtttgggcagagggccctggatttctacagcattcatgtgaccaaggagtccacccaccccgtgaagcccctggcccagatcgccggaaacagatacgcctccggacctgtgggaaaggccctgagcgacgcatgtatgggcacaatcgcctccttcctgtctaagtaccaggacatcatcatcgaacaccagaaggtggtgaagggcaaccagaagagactggagagcctgcgggagctggccggcaaggaaaacctggaataccctagcgtgaccctgccacctcagcctcacaccaaggagggcgttgatgcctacaacgaagtgatcgcccgggtgcgaatgtgggtgaacctgaacctgtggcagaagctgaagctaagcagagatgatgccaagcctctgctgagactgaagggattcccttcctttcctctggtcgagagacaggccaacgaagtggactggtgggacatggtgtgtaacgtgaagaagctgatcaacgagaaaaaggaggatggcaaggtgttttggcagaatctggctggctacaagagacaggaagccctgagaccatacctgagcagcgaggaagatcggaagaagggaaagaaattcgctcggtaccagctgggcgacctgctgctgcacctggaaaagaagcacggcgaggactggggaaaggtgtacgacgaggcctgggagcggattgacaagaaagtggaaggcctgagcaagcacatcaagctggaagaggaacggagaagcgaggacgcccagagcaaggccgccctgaccgactggctgcgggctaaggccagcttcgtgatcgagggcctgaaggaggccgacaaggacgagttctgcagatgcgagctgaagctgcagaagtggtacggggacctgcggggaaagcccttcgccatcgaagccgagaacagcatcctggacatcagcggcttcagcaagcagtacaactgtgccttcatctggcagaaggacggcgtgaagaagctgaacctgtacctgatcatcaactacttcaagggcggcaagctgcggttcaagaagatcaaacctgaagccttcgaagccaacagattctacaccgtgatcaacaaaaagagcggcgagatcgtgcccatggaggtgaacttcaacttcgacgaccccaacctgatcatcctgcctctggcctttggcaagagacagggcagagaattcatctggaacgacctgctgtccctggaaaccggcagcctgaagctggccaacggaagagtgatcgagaagacactgtacaacagaagaacccggcaggatgagcctgccctgttcgtggccctgaccttcgagcggcgggaggtcctggactcctccaatatcaaaccaatgaacctgatcggcgtggcaagaggcgaaaacatccccgccgtgatcgccctgaccgaccccgagggctgcccactgagccggtttaaggatagcctgggaaacccaacccacatcctgagaatcggcgagagctataaggagaagcagcggaccatccaggccaagaaggaggtggagcagcggagagccggcggctacagccggaagtacgccagcaaagccaagaatctggcagacgatatggtgagaaacaccgctagagatctgctgtactacgccgtgacccaggatgccatgctgatcttcgccaacctgagccggggcttcggccggcagggcaagcggaccttcatggccgagagacagtacacacggatggaggactggctgaccgccaagctggcctacgagggcctgagcaagacctacctgtccaagacactggcccagtacacctccaagacatgcagcaactgtgggtttaccatcaccagcgccgactacgacagggtgctggagaagctgaagaagacagcaacaggctggatgaccacaattaacggcaaggagctgaaggtggagggccagattacctactacaacagatacaagagacagaacgtagtcaaggacctgtccgtcgagctggatagactgagcgaagaatctgtgaacaacgacatctcctcctggacaaagggcagaagcggagaagctctgagcctcctgaagaaaagattctcccatagacccgtgcaggagaagttcgtgtgcctgaactgcggcttcgagacacacgcagccgagcaagccgccctgaacatcgccagatcctggctgttcctgcggagccaggagtacaagaaataccagacaaacaagacaaccggcaacaccgataagagagccttcgtcgagacctggcagtccttttaccggaagaagcttaaggaggtgtggaaacctgccgtgcggtctggcggatctggcggaggctccaccagccccaagaaaaagagaaaagtctaagctgccttctgcggggcttgccttctggccatgcccttcttctctcccttgcacctgtacctcttggtctttgaataaagcctgagtaggaaggctagcaaaaaaaaaaaaaaaaaaaaaaaaaaaaaaaaaaaaaaaaaaaaaaaaaaaaaaaaaaaaaaaaaaaaaaaaaaaaaaaagcccagccggctccccaacctctaccgaggagggcacctctgagtccgccacccccgagagcggccctggcacctccaccgagcccagcgagggcagcgcacccggcagccctgccggcagccccacctccacagaggagggaaccagcaccgagcccagcgaaggcagcgccccaggcaccagcaccgagcctagtgagcaggagattaaacggatcaacaagatcagaagaagacttgtgaaagacagcaacaccaagaaggccggcaagacaggccccatgaaaaccctgctggttagagtgatgacacccgatctgagagagcggctggaaaacctgagaaagaagcctgaaaatatcccccagcccatcagcaatacatctagagccaacctgaataagctgctgaccgattacaccgaaatgaagaaggcgatcctgcatgtgtactgggaagagttccagaaggaccctgtgggcctgatgagccgggtggcccagcctgccagcaagaagatcgatcagaacaagctgaaacctgagatggacgagaagggcaacctgaccaccgccggctttgcctgctctcagtgtggccagcccctgttcgtgtacaagctggagcaggtgtctgagaagggcaaggcttacaccaactacttcggacggtgcaatgtggccgagcacgaaaagctgatcctgctggcccagctgaagcccgagaaggatagcgacgaagccgtgacatatagcctgggaaagtttgggcagagggccctggatttctacagcattcatgtgaccaaggagtccacccaccccgtgaagcccctggcccagatcgccggaaacagatacgcctccggacctgtgggaaaggccctgagcgacgcatgtatgggcacaatcgcctccttcctgtctaagtaccaggacatcatcatcgaacaccagaaggtggtgaagggcaaccagaagagactggagagcctgcgggagctggccggcaaggaaaacctggaataccctagcgtgaccctgccacctcagcctcacaccaaggagggcgttgatgcctacaacgaagtgatcgcccgggtgcgaatgtgggtgaacctgaacctgtggcagaagctgaagctaagcagagatgatgccaagcctctgctgagactgaagggattcccttcctttcctctggtcgagagacaggccaacgaagtggactggtgggacatggtgtgtaacgtgaagaagctgatcaacgagaaaaaggaggatggcaaggtgttttggcagaatctggctggctacaagagacaggaagccctgagaccatacctgagcagcgaggaagatcggaagaagggaaagaaattcgctcggtaccagctgggcgacctgctgctgcacctggaaaagaagcacggcgaggactggggaaaggtgtacgacgaggcctgggagcggattgacaagaaagtggaaggcctgagcaagcacatcaagctggaagaggaacggagaagcgaggacgcccagagcaaggccgccctgaccgactggctgcgggctaaggccagcttcgtgatcgagggcctgaaggaggccgacaaggacgagttctgcagatgcgagctgaagctgcagaagtggtacggggacctgcggggaaagcccttcgccatcgaagccgagaacagcatcctggacatcagcggcttcagcaagcagtacaactgtgccttcatctggcagaaggacggcgtgaagaagctgaacctgtacctgatcatcaactacttcaagggcggcaagctgcggttcaagaagatcaaacctgaagccttcgaagccaacagattctacaccgtgatcaacaaaaagagcggcgagatcgtgcccatggaggtgaacttcaacttcgacgaccccaacctgatcatcctgcctctggcctttggcaagagacagggcagagaattcatctggaacgacctgctgtccctggaaaccggcagcctgaagctggccaacggaagagtgatcgagaagacactgtacaacagaagaacccggcaggatgagcctgccctgttcgtggccctgaccttcgagcggcgggaggtcctggactcctccaatatcaaaccaatgaacctgatcggcgtggcaagaggcgaaaacatccccgccgtgatcgccctgaccgaccccgagggctgcccactgagccggtttaaggatagcctgggaaacccaacccacatcctgagaatcggcgagagctataaggagaagcagcggaccatccaggccaagaaggaggtggagcagcggagagccggcggctacagccggaagtacgccagcaaagccaagaatctggcagacgatatggtgagaaacaccgctagagatctgctgtactacgccgtgacccaggatgccatgctgatcttcgccaacctgagccggggcttcggccggcagggcaagcggaccttcatggccgagagacagtacacacggatggaggactggctgaccgccaagctggcctacgagggcctgagcaagacctacctgtccaagacactggcccagtacacctccaagacatgcagcaactgtgggtttaccatcaccagcgccgactacgacagggtgctggagaagctgaagaagacagcaacaggctggatgaccacaattaacggcaaggagctgaaggtggagggccagattacctactacaacagatacaagagacagaacgtagtcaaggacctgtccgtcgagctggatagactgagcgaagaatctgtgaacaacgacatctcctcctggacaaagggcagaagcggagaagctctgagcctcctgaagaaaagattctcccatagacccgtgcaggagaagttcgtgtgcctgaactgcggcttcgagacacacgcagccgagcaagccgccctgaacatcgccagatcctggctgttcctgcggagccaggagtacaagaaataccagacaaacaagacaaccggcaacaccgataagagagccttcgtcgagacctggcagtccttttaccggaagaagcttaaggaggtgtggaaacctgccgtgcggtctggcggatctggcggaggctccaccagccccaagaaaaagagaaaagtctaagctgccttctgcggggcttgccttctggccatgcccttcttctctcccttgcacctgtacctcttggtctttgaataaagcctgagtaggaaggctagcaaaaaaaaaaaaaaaaaaaaaaaaaaaaaaaaaaaaaaaaaaaaaaaaaaaaaaaaaaaaaaaaaaaaaaaaaaaaaaaa

SEQ ID NO: 8998 - RNA, 8787 nt, synthetic construct
  source 1..8787: mol_type = other RNA
aggaaataagagagaaaagaagagtaagaagaaatataagagccaccatggcccctaagaagaagcgtaaagtgagccggatgaaccacgaccaggagttcgacccccctaaggtgtaccctcccgtccccgccgagaagagaaagcccatccgggtcctgagcctgttcgatggcatcgccaccggtctgctggtgctgaaggacctgggcatccaggtggataggtacattgcctccgaggtgtgcgaggactccatcaccgtgggaatggtgcgtcatcagggcaagatcatgtacgtgggcgacgtgcggagcgtgacacagaagcatatccaggagtggggccctttcgacctggtgatcggcggcagcccttgcaatgacctgagcatcgtgaacccagcccggaagggcctgtacgagggaaccggcagactgttcttcgagttttacagactgctgcacgacgcccggcctaaggaaggcgacgaccggcccttcttttggctgttcgagaatgtggtggccatgggagtcagcgacaagcgggatattagccggttcctggagagcaaccccgtgatgatcgatgccaaggaagtgagcgccgcccaccgggccagatacttctggggcaatctgcctggcatgaacagacccctggccagcaccgtgaacgacaagctggagctgcaggagtgcctggagcacggccggatcgccaagttcagcaaggtgagaaccatcaccacccgaagcaacagcatcaaacaaggcaaggaccagcactttcctgtgttcatgaacgagaaggaggacatcctgtggtgtaccgagatggagagagtgttcgggttcccagtccactacacagatgtcagcaacatgtctagactggccagacagagactgctgggaagaagctggtccgtccctgtgatcagacacctgttcgcccctctgaaggagtacttcgcctgcgtgagcagcggcaacagcaacgccaacagccggggccccagcttctctagcggcctggtgccactgtccctgagagggagccacatgggccccatggagatctacaaaaccgtgagcgcctggaagcggcagcctgtgcgcgtgctgagcctgtttcggaatatcgataaagtcctgaaaagcctgggattcctggagagcggctctggctccggcggtggcaccctgaagtacgtggaggatgtgacaaacgtggtcagacgggatgtggagaagtggggccccttcgatctggtgtacggcagcacccaacccctgggcagctcttgtgaccggtgccctggctggtacatgtttcagttccaccggatcctgcagtacgccctgccgagacaggagtcccagcggccattcttttggattttcatggacaacttgctgctgaccgaggatgaccaggaaactaccactcggttcctgcagaccgaagccgtgaccctgcaggacgtgagaggccgggactaccagaacgccatgcgggtgtggtccaacatccctggactgaaaagcaagcacgcacctctgacccctaaagaagaggagtacctgcaggcccaggtgcggagcagaagcaagctggacgcccctaaggtggatctgctggtgaagaattgcctcctgcccctgagagagtacttcaagtatttcagccagaatagtctgcccctgggaggcagcggcggcggcccccagaagagcgtgaccttcgaggacgtggccgtgtacttcacccagaccgagtgggacggcctgagccccgcccagagggccctgtacagggacgtgatgctggagaactacggcaacgtggccagcctgggcttcagcctgctgaagcccgccgtgatcctgcagctggagggcgccggcgagctgggcgaccccagcctgctggtggccggcaccgaggtgggcagccagggcgtgtggggcggcccaagcagcggcgcccctcctcccagcggcggcaggcggcccaagcagcggcgcccctcctcccagcggcggcagcccagccggctccccaacctctaccgaggagggcacctctgagtccgccacccccgagagcggccctggcacctccaccgagcccagcgagggcagcgcacccggcagccctgccggcagccccacctccacagaggagggaaccagcaccgagcccagcgaaggcagcgccccaggcaccagcaccgagcctagtgagcaggagattaaacggatcaacaagatcagaagaagacttgtgaaagacagcaacaccaagaaggccggcaagacaggccccatgaaaaccctgctggttagagtgatgacacccgatctgagagagcggctggaaaacctgagaaagaagcctgaaaatatcccccagcccatcagcaatacatctagagccaacctgaataagctgctgaccgattacaccgaaatgaagaaggcgatcctgcatgtgtactgggaagagttccagaaggaccctgtgggcctgatgagccgggtggcccagcctgccagcaagaagatcgatcagaacaagctgaaacctgagatggacgagaagggcaacctgaccaccgccggctttgcctgctctcagtgtggccagcccctgttcgtgtacaagctggagcaggtgtctgagaagggcaaggcttacaccaactacttcggacggtgcaatgtggccgagcacgaaaagctgatcctgctggcccagctgaagcccgagaaggatagcgacgaagccgtgacatatagcctgggaaagtttgggcagagggccctggatttctacagcattcatgtgaccaaggagtccacccaccccgtgaagcccctggcccagatcgccggaaacagatacgcctccggacctgtgggaaaggccctgagcgacgcatgtatgggcacaatcgcctccttcctgtctaagtaccaggacatcatcatcgaacaccagaaggtggtgaagggcaaccagaagagactggagagcctgcgggagctggccggcaaggaaaacctggaataccctagcgtgaccctgccacctcagcctcacaccaaggagggcgttgatgcctacaacgaagtgatcgcccgggtgcgaatgtgggtgaacctgaacctgtggcagaagctgaagctaagcagagatgatgccaagcctctgctgagactgaagggattcccttcctttcctctggtcgagagacaggccaacgaagtggactggtgggacatggtgtgtaacgtgaagaagctgatcaacgagaaaaaggaggatggcaaggtgttttggcagaatctggctggctacaagagacaggaagccctgagaccatacctgagcagcgaggaagatcggaagaagggaaagaaattcgctcggtaccagctgggcgacctgctgctgcacctggaaaagaagcacggcgaggactggggaaaggtgtacgacgaggcctgggagcggattgacaagaaagtggaaggcctgagcaagcacatcaagctggaagaggaacggagaagcgaggacgcccagagcaaggccgccctgaccgactggctgcgggctaaggccagcttcgtgatcgagggcctgaaggaggccgacaaggacgagttctgcagatgcgagctgaagctgcagaagtggtacggggacctgcggggaaagcccttcgccatcgaagccgagaacagcatcctggacatcagcggcttcagcaagcagtacaactgtgccttcatctggcagaaggacggcgtgaagaagctgaacctgtacctgatcatcaactacttcaagggcggcaagctgcggttcaagaagatcaaacctgaagccttcgaagccaacagattctacaccgtgatcaacaaaaagagcggcgagatcgtgcccatggaggtgaacttcaacttcgacgaccccaacctgatcatcctgcctctggcctttggcaagagacagggcagagaattcatctggaacgacctgctgtccctggaaaccggcagcctgaagctggccaacggaagagtgatcgagaagacactgtacaacagaagaacccggcaggatgagcctgccctgttcgtggccctgaccttcgagcggcgggaggtcctggactcctccaatatcaaaccaatgaacctgatcggcgtggcaagaggcgaaaacatccccgccgtgatcgccctgaccgaccccgagggctgcccactgagccggtttaaggatagcctgggaaacccaacccacatcctgagaatcggcgagagctataaggagaagcagcggaccatccaggccaagaaggaggtggagcagcggagagccggcggctacagccggaagtacgccagcaaagccaagaatctggcagacgatatggtgagaaacaccgctagagatctgctgtactacgccgtgacccaggatgccatgctgatcttcgccaacctgagccggggcttcggccggcagggcaagcggaccttcatggccgagagacagtacacacggatggaggactggctgaccgccaagctggcctacgagggcctgagcaagacctacctgtccaagacactggcccagtacacctccaagacatgcagcaactgtgggtttaccatcaccagcgccgactacgacagggtgctggagaagctgaagaagacagcaacaggctggatgaccacaattaacggcaaggagctgaaggtggagggccagattacctactacaacagatacaagagacagaacgtagtcaaggacctgtccgtcgagctggatagactgagcgaagaatctgtgaacaacgacatctcctcctggacaaagggcagaagcggagaagctctgagcctcctgaagaaaagattctcccatagacccgtgcaggagaagttcgtgtgcctgaactgcggcttcgagacacacgcagccgagcaagccgccctgaacatcgccagatcctggctgttcctgcggagccaggagtacaagaaataccagacaaacaagacaaccggcaacaccgataagagagccttcgtcgagacctggcagtccttttaccggaagaagcttaaggaggtgtggaaacctgccgtgcggtctggcggatctggcggaggctccaccagccccaagaaaaagagaaaagtctaagctgccttctgcggggcttgccttctggccatgcccttcttctctcccttgcacctgtacctcttggtctttgaataaagcctgagtaggaaggctagcaaaaaaaaaaaaaaaaaaaaaaaaaaaaaaaaaaaaaaaaaaaaaaaaaaaaaaaaaaaaaaaaaaaaaaaaaaaaaaaagcccagccggctccccaacctctaccgaggagggcacctctgagtccgccacccccgagagcggccctggcacctccaccgagcccagcgagggcagcgcacccggcagccctgccggcagccccacctccacagaggagggaaccagcaccgagcccagcgaaggcagcgccccaggcaccagcaccgagcctagtgagcaggagattaaacggatcaacaagatcagaagaagacttgtgaaagacagcaacaccaagaaggccggcaagacaggccccatgaaaaccctgctggttagagtgatgacacccgatctgagagagcggctggaaaacctgagaaagaagcctgaaaatatcccccagcccatcagcaatacatctagagccaacctgaataagctgctgaccgattacaccgaaatgaagaaggcgatcctgcatgtgtactgggaagagttccagaaggaccctgtgggcctgatgagccgggtggcccagcctgccagcaagaagatcgatcagaacaagctgaaacctgagatggacgagaagggcaacctgaccaccgccggctttgcctgctctcagtgtggccagcccctgttcgtgtacaagctggagcaggtgtctgagaagggcaaggcttacaccaactacttcggacggtgcaatgtggccgagcacgaaaagctgatcctgctggcccagctgaagcccgagaaggatagcgacgaagccgtgacatatagcctgggaaagtttgggcagagggccctggatttctacagcattcatgtgaccaaggagtccacccaccccgtgaagcccctggcccagatcgccggaaacagatacgcctccggacctgtgggaaaggccctgagcgacgcatgtatgggcacaatcgcctccttcctgtctaagtaccaggacatcatcatcgaacaccagaaggtggtgaagggcaaccagaagagactggagagcctgcgggagctggccggcaaggaaaacctggaataccctagcgtgaccctgccacctcagcctcacaccaaggagggcgttgatgcctacaacgaagtgatcgcccgggtgcgaatgtgggtgaacctgaacctgtggcagaagctgaagctaagcagagatgatgccaagcctctgctgagactgaagggattcccttcctttcctctggtcgagagacaggccaacgaagtggactggtgggacatggtgtgtaacgtgaagaagctgatcaacgagaaaaaggaggatggcaaggtgttttggcagaatctggctggctacaagagacaggaagccctgagaccatacctgagcagcgaggaagatcggaagaagggaaagaaattcgctcggtaccagctgggcgacctgctgctgcacctggaaaagaagcacggcgaggactggggaaaggtgtacgacgaggcctgggagcggattgacaagaaagtggaaggcctgagcaagcacatcaagctggaagaggaacggagaagcgaggacgcccagagcaaggccgccctgaccgactggctgcgggctaaggccagcttcgtgatcgagggcctgaaggaggccgacaaggacgagttctgcagatgcgagctgaagctgcagaagtggtacggggacctgcggggaaagcccttcgccatcgaagccgagaacagcatcctggacatcagcggcttcagcaagcagtacaactgtgccttcatctggcagaaggacggcgtgaagaagctgaacctgtacctgatcatcaactacttcaagggcggcaagctgcggttcaagaagatcaaacctgaagccttcgaagccaacagattctacaccgtgatcaacaaaaagagcggcgagatcgtgcccatggaggtgaacttcaacttcgacgaccccaacctgatcatcctgcctctggcctttggcaagagacagggcagagaattcatctggaacgacctgctgtccctggaaaccggcagcctgaagctggccaacggaagagtgatcgagaagacactgtacaacagaagaacccggcaggatgagcctgccctgttcgtggccctgaccttcgagcggcgggaggtcctggactcctccaatatcaaaccaatgaacctgatcggcgtggcaagaggcgaaaacatccccgccgtgatcgccctgaccgaccccgagggctgcccactgagccggtttaaggatagcctgggaaacccaacccacatcctgagaatcggcgagagctataaggagaagcagcggaccatccaggccaagaaggaggtggagcagcggagagccggcggctacagccggaagtacgccagcaaagccaagaatctggcagacgatatggtgagaaacaccgctagagatctgctgtactacgccgtgacccaggatgccatgctgatcttcgccaacctgagccggggcttcggccggcagggcaagcggaccttcatggccgagagacagtacacacggatggaggactggctgaccgccaagctggcctacgagggcctgagcaagacctacctgtccaagacactggcccagtacacctccaagacatgcagcaactgtgggtttaccatcaccagcgccgactacgacagggtgctggagaagctgaagaagacagcaacaggctggatgaccacaattaacggcaaggagctgaaggtggagggccagattacctactacaacagatacaagagacagaacgtagtcaaggacctgtccgtcgagctggatagactgagcgaagaatctgtgaacaacgacatctcctcctggacaaagggcagaagcggagaagctctgagcctcctgaagaaaagattctcccatagacccgtgcaggagaagttcgtgtgcctgaactgcggcttcgagacacacgcagccgagcaagccgccctgaacatcgccagatcctggctgttcctgcggagccaggagtacaagaaataccagacaaacaagacaaccggcaacaccgataagagagccttcgtcgagacctggcagtccttttaccggaagaagcttaaggaggtgtggaaacctgccgtgcggtctggcggatctggcggaggctccaccagccccaagaaaaagagaaaagtctaagctgccttctgcggggcttgccttctggccatgcccttcttctctcccttgcacctgtacctcttggtctttgaataaagcctgagtaggaaggctagcaaaaaaaaaaaaaaaaaaaaaaaaaaaaaaaaaaaaaaaaaaaaaaaaaaaaaaaaaaaaaaaaaaaaaaaaaaaaaaaa

SEQ ID NO: 8999 - RNA, 8787 nt, synthetic construct
  source 1..8787: mol_type = other RNA
aggaaataagagagaaaagaagagtaagaagaaatataagagccaccatggcccctaagaagaagcgtaaagtgagccggatgaaccacgaccaggagttcgacccccctaaggtgtaccctcccgtccccgccgagaagagaaagcccatccgggtcctgagcctgttcgatggcatcgccaccggtctgctggtgctgaaggacctgggcatccaggtggataggtacattgcctccgaggtgtgcgaggactccatcaccgtgggaatggtgcgtcatcagggcaagatcatgtacgtgggcgacgtgcggagcgtgacacagaagcatatccaggagtggggccctttcgacctggtgatcggcggcagcccttgcaatgacctgagcatcgtgaacccagcccggaagggcctgtacgagggaaccggcagactgttcttcgagttttacagactgctgcacgacgcccggcctaaggaaggcgacgaccggcccttcttttggctgttcgagaatgtggtggccatgggagtcagcgacaagcgggatattagccggttcctggagagcaaccccgtgatgatcgatgccaaggaagtgagcgccgcccaccgggccagatacttctggggcaatctgcctggcatgaacagacccctggccagcaccgtgaacgacaagctggagctgcaggagtgcctggagcacggccggatcgccaagttcagcaaggtgagaaccatcaccacccgaagcaacagcatcaaacaaggcaaggaccagcactttcctgtgttcatgaacgagaaggaggacatcctgtggtgtaccgagatggagagagtgttcgggttcccagtccactacacagatgtcagcaacatgtctagactggccagacagagactgctgggaagaagctggtccgtccctgtgatcagacacctgttcgcccctctgaaggagtacttcgcctgcgtgagcagcggcaacagcaacgccaacagccggggccccagcttctctagcggcctggtgccactgtccctgagagggagccacatgggccccatggagatctacaaaaccgtgagcgcctggaagcggcagcctgtgcgcgtgctgagcctgtttcggaatatcgataaagtcctgaaaagcctgggattcctggagagcggctctggctccggcggtggcaccctgaagtacgtggaggatgtgacaaacgtggtcagacgggatgtggagaagtggggccccttcgatctggtgtacggcagcacccaacccctgggcagctcttgtgaccggtgccctggctggtacatgtttcagttccaccggatcctgcagtacgccctgccgagacaggagtcccagcggccattcttttggattttcatggacaacttgctgctgaccgaggatgaccaggaaactaccactcggttcctgcagaccgaagccgtgaccctgcaggacgtgagaggccgggactaccagaacgccatgcgggtgtggtccaacatccctggactgaaaagcaagcacgcacctctgacccctaaagaagaggagtacctgcaggcccaggtgcggagcagaagcaagctggacgcccctaaggtggatctgctggtgaagaattgcctcctgcccctgagagagtacttcaagtatttcagccagaatagtctgcccctgggaggcagcggcggcggcccccaggagctggtgaccttccaggacgtggccgtgtacttcacccccgaggaggtgaggtacctggacagctaccagaaggccctgtacaaggacgtgatgctggagaactacggcaacatggccagcctgggcttccccctgagcaagcccgtgctgatcagccagctggagaggggcgaggagccctgggccatggaccccctggtggccaaggagaggaagaccaggaggggcaccagcggcggcccaagcagcggcgcccctcctcccagcggcggcaggcggcccaagcagcggcgcccctcctcccagcggcggcagcccagccggctccccaacctctaccgaggagggcacctctgagtccgccacccccgagagcggccctggcacctccaccgagcccagcgagggcagcgcacccggcagccctgccggcagccccacctccacagaggagggaaccagcaccgagcccagcgaaggcagcgccccaggcaccagcaccgagcctagtgagcaggagattaaacggatcaacaagatcagaagaagacttgtgaaagacagcaacaccaagaaggccggcaagacaggccccatgaaaaccctgctggttagagtgatgacacccgatctgagagagcggctggaaaacctgagaaagaagcctgaaaatatcccccagcccatcagcaatacatctagagccaacctgaataagctgctgaccgattacaccgaaatgaagaaggcgatcctgcatgtgtactgggaagagttccagaaggaccctgtgggcctgatgagccgggtggcccagcctgccagcaagaagatcgatcagaacaagctgaaacctgagatggacgagaagggcaacctgaccaccgccggctttgcctgctctcagtgtggccagcccctgttcgtgtacaagctggagcaggtgtctgagaagggcaaggcttacaccaactacttcggacggtgcaatgtggccgagcacgaaaagctgatcctgctggcccagctgaagcccgagaaggatagcgacgaagccgtgacatatagcctgggaaagtttgggcagagggccctggatttctacagcattcatgtgaccaaggagtccacccaccccgtgaagcccctggcccagatcgccggaaacagatacgcctccggacctgtgggaaaggccctgagcgacgcatgtatgggcacaatcgcctccttcctgtctaagtaccaggacatcatcatcgaacaccagaaggtggtgaagggcaaccagaagagactggagagcctgcgggagctggccggcaaggaaaacctggaataccctagcgtgaccctgccacctcagcctcacaccaaggagggcgttgatgcctacaacgaagtgatcgcccgggtgcgaatgtgggtgaacctgaacctgtggcagaagctgaagctaagcagagatgatgccaagcctctgctgagactgaagggattcccttcctttcctctggtcgagagacaggccaacgaagtggactggtgggacatggtgtgtaacgtgaagaagctgatcaacgagaaaaaggaggatggcaaggtgttttggcagaatctggctggctacaagagacaggaagccctgagaccatacctgagcagcgaggaagatcggaagaagggaaagaaattcgctcggtaccagctgggcgacctgctgctgcacctggaaaagaagcacggcgaggactggggaaaggtgtacgacgaggcctgggagcggattgacaagaaagtggaaggcctgagcaagcacatcaagctggaagaggaacggagaagcgaggacgcccagagcaaggccgccctgaccgactggctgcgggctaaggccagcttcgtgatcgagggcctgaaggaggccgacaaggacgagttctgcagatgcgagctgaagctgcagaagtggtacggggacctgcggggaaagcccttcgccatcgaagccgagaacagcatcctggacatcagcggcttcagcaagcagtacaactgtgccttcatctggcagaaggacggcgtgaagaagctgaacctgtacctgatcatcaactacttcaagggcggcaagctgcggttcaagaagatcaaacctgaagccttcgaagccaacagattctacaccgtgatcaacaaaaagagcggcgagatcgtgcccatggaggtgaacttcaacttcgacgaccccaacctgatcatcctgcctctggcctttggcaagagacagggcagagaattcatctggaacgacctgctgtccctggaaaccggcagcctgaagctggccaacggaagagtgatcgagaagacactgtacaacagaagaacccggcaggatgagcctgccctgttcgtggccctgaccttcgagcggcgggaggtcctggactcctccaatatcaaaccaatgaacctgatcggcgtggcaagaggcgaaaacatccccgccgtgatcgccctgaccgaccccgagggctgcccactgagccggtttaaggatagcctgggaaacccaacccacatcctgagaatcggcgagagctataaggagaagcagcggaccatccaggccaagaaggaggtggagcagcggagagccggcggctacagccggaagtacgccagcaaagccaagaatctggcagacgatatggtgagaaacaccgctagagatctgctgtactacgccgtgacccaggatgccatgctgatcttcgccaacctgagccggggcttcggccggcagggcaagcggaccttcatggccgagagacagtacacacggatggaggactggctgaccgccaagctggcctacgagggcctgagcaagacctacctgtccaagacactggcccagtacacctccaagacatgcagcaactgtgggtttaccatcaccagcgccgactacgacagggtgctggagaagctgaagaagacagcaacaggctggatgaccacaattaacggcaaggagctgaaggtggagggccagattacctactacaacagatacaagagacagaacgtagtcaaggacctgtccgtcgagctggatagactgagcgaagaatctgtgaacaacgacatctcctcctggacaaagggcagaagcggagaagctctgagcctcctgaagaaaagattctcccatagacccgtgcaggagaagttcgtgtgcctgaactgcggcttcgagacacacgcagccgagcaagccgccctgaacatcgccagatcctggctgttcctgcggagccaggagtacaagaaataccagacaaacaagacaaccggcaacaccgataagagagccttcgtcgagacctggcagtccttttaccggaagaagcttaaggaggtgtggaaacctgccgtgcggtctggcggatctggcggaggctccaccagccccaagaaaaagagaaaagtctaagctgccttctgcggggcttgccttctggccatgcccttcttctctcccttgcacctgtacctcttggtctttgaataaagcctgagtaggaaggctagcaaaaaaaaaaaaaaaaaaaaaaaaaaaaaaaaaaaaaaaaaaaaaaaaaaaaaaaaaaaaaaaaaaaaaaaaaaaaaaaagcccagccggctccccaacctctaccgaggagggcacctctgagtccgccacccccgagagcggccctggcacctccaccgagcccagcgagggcagcgcacccggcagccctgccggcagccccacctccacagaggagggaaccagcaccgagcccagcgaaggcagcgccccaggcaccagcaccgagcctagtgagcaggagattaaacggatcaacaagatcagaagaagacttgtgaaagacagcaacaccaagaaggccggcaagacaggccccatgaaaaccctgctggttagagtgatgacacccgatctgagagagcggctggaaaacctgagaaagaagcctgaaaatatcccccagcccatcagcaatacatctagagccaacctgaataagctgctgaccgattacaccgaaatgaagaaggcgatcctgcatgtgtactgggaagagttccagaaggaccctgtgggcctgatgagccgggtggcccagcctgccagcaagaagatcgatcagaacaagctgaaacctgagatggacgagaagggcaacctgaccaccgccggctttgcctgctctcagtgtggccagcccctgttcgtgtacaagctggagcaggtgtctgagaagggcaaggcttacaccaactacttcggacggtgcaatgtggccgagcacgaaaagctgatcctgctggcccagctgaagcccgagaaggatagcgacgaagccgtgacatatagcctgggaaagtttgggcagagggccctggatttctacagcattcatgtgaccaaggagtccacccaccccgtgaagcccctggcccagatcgccggaaacagatacgcctccggacctgtgggaaaggccctgagcgacgcatgtatgggcacaatcgcctccttcctgtctaagtaccaggacatcatcatcgaacaccagaaggtggtgaagggcaaccagaagagactggagagcctgcgggagctggccggcaaggaaaacctggaataccctagcgtgaccctgccacctcagcctcacaccaaggagggcgttgatgcctacaacgaagtgatcgcccgggtgcgaatgtgggtgaacctgaacctgtggcagaagctgaagctaagcagagatgatgccaagcctctgctgagactgaagggattcccttcctttcctctggtcgagagacaggccaacgaagtggactggtgggacatggtgtgtaacgtgaagaagctgatcaacgagaaaaaggaggatggcaaggtgttttggcagaatctggctggctacaagagacaggaagccctgagaccatacctgagcagcgaggaagatcggaagaagggaaagaaattcgctcggtaccagctgggcgacctgctgctgcacctggaaaagaagcacggcgaggactggggaaaggtgtacgacgaggcctgggagcggattgacaagaaagtggaaggcctgagcaagcacatcaagctggaagaggaacggagaagcgaggacgcccagagcaaggccgccctgaccgactggctgcgggctaaggccagcttcgtgatcgagggcctgaaggaggccgacaaggacgagttctgcagatgcgagctgaagctgcagaagtggtacggggacctgcggggaaagcccttcgccatcgaagccgagaacagcatcctggacatcagcggcttcagcaagcagtacaactgtgccttcatctggcagaaggacggcgtgaagaagctgaacctgtacctgatcatcaactacttcaagggcggcaagctgcggttcaagaagatcaaacctgaagccttcgaagccaacagattctacaccgtgatcaacaaaaagagcggcgagatcgtgcccatggaggtgaacttcaacttcgacgaccccaacctgatcatcctgcctctggcctttggcaagagacagggcagagaattcatctggaacgacctgctgtccctggaaaccggcagcctgaagctggccaacggaagagtgatcgagaagacactgtacaacagaagaacccggcaggatgagcctgccctgttcgtggccctgaccttcgagcggcgggaggtcctggactcctccaatatcaaaccaatgaacctgatcggcgtggcaagaggcgaaaacatccccgccgtgatcgccctgaccgaccccgagggctgcccactgagccggtttaaggatagcctgggaaacccaacccacatcctgagaatcggcgagagctataaggagaagcagcggaccatccaggccaagaaggaggtggagcagcggagagccggcggctacagccggaagtacgccagcaaagccaagaatctggcagacgatatggtgagaaacaccgctagagatctgctgtactacgccgtgacccaggatgccatgctgatcttcgccaacctgagccggggcttcggccggcagggcaagcggaccttcatggccgagagacagtacacacggatggaggactggctgaccgccaagctggcctacgagggcctgagcaagacctacctgtccaagacactggcccagtacacctccaagacatgcagcaactgtgggtttaccatcaccagcgccgactacgacagggtgctggagaagctgaagaagacagcaacaggctggatgaccacaattaacggcaaggagctgaaggtggagggccagattacctactacaacagatacaagagacagaacgtagtcaaggacctgtccgtcgagctggatagactgagcgaagaatctgtgaacaacgacatctcctcctggacaaagggcagaagcggagaagctctgagcctcctgaagaaaagattctcccatagacccgtgcaggagaagttcgtgtgcctgaactgcggcttcgagacacacgcagccgagcaagccgccctgaacatcgccagatcctggctgttcctgcggagccaggagtacaagaaataccagacaaacaagacaaccggcaacaccgataagagagccttcgtcgagacctggcagtccttttaccggaagaagcttaaggaggtgtggaaacctgccgtgcggtctggcggatctggcggaggctccaccagccccaagaaaaagagaaaagtctaagctgccttctgcggggcttgccttctggccatgcccttcttctctcccttgcacctgtacctcttggtctttgaataaagcctgagtaggaaggctagcaaaaaaaaaaaaaaaaaaaaaaaaaaaaaaaaaaaaaaaaaaaaaaaaaaaaaaaaaaaaaaaaaaaaaaaaaaaaaaaa

SEQ ID NO: 9000 - RNA, 8787 nt, synthetic construct
  source 1..8787: mol_type = other RNA
aggaaataagagagaaaagaagagtaagaagaaatataagagccaccatggcccctaagaagaagcgtaaagtgagccggatgaaccacgaccaggagttcgacccccctaaggtgtaccctcccgtccccgccgagaagagaaagcccatccgggtcctgagcctgttcgatggcatcgccaccggtctgctggtgctgaaggacctgggcatccaggtggataggtacattgcctccgaggtgtgcgaggactccatcaccgtgggaatggtgcgtcatcagggcaagatcatgtacgtgggcgacgtgcggagcgtgacacagaagcatatccaggagtggggccctttcgacctggtgatcggcggcagcccttgcaatgacctgagcatcgtgaacccagcccggaagggcctgtacgagggaaccggcagactgttcttcgagttttacagactgctgcacgacgcccggcctaaggaaggcgacgaccggcccttcttttggctgttcgagaatgtggtggccatgggagtcagcgacaagcgggatattagccggttcctggagagcaaccccgtgatgatcgatgccaaggaagtgagcgccgcccaccgggccagatacttctggggcaatctgcctggcatgaacagacccctggccagcaccgtgaacgacaagctggagctgcaggagtgcctggagcacggccggatcgccaagttcagcaaggtgagaaccatcaccacccgaagcaacagcatcaaacaaggcaaggaccagcactttcctgtgttcatgaacgagaaggaggacatcctgtggtgtaccgagatggagagagtgttcgggttcccagtccactacacagatgtcagcaacatgtctagactggccagacagagactgctgggaagaagctggtccgtccctgtgatcagacacctgttcgcccctctgaaggagtacttcgcctgcgtgagcagcggcaacagcaacgccaacagccggggccccagcttctctagcggcctggtgccactgtccctgagagggagccacatgggccccatggagatctacaaaaccgtgagcgcctggaagcggcagcctgtgcgcgtgctgagcctgtttcggaatatcgataaagtcctgaaaagcctgggattcctggagagcggctctggctccggcggtggcaccctgaagtacgtggaggatgtgacaaacgtggtcagacgggatgtggagaagtggggccccttcgatctggtgtacggcagcacccaacccctgggcagctcttgtgaccggtgccctggctggtacatgtttcagttccaccggatcctgcagtacgccctgccgagacaggagtcccagcggccattcttttggattttcatggacaacttgctgctgaccgaggatgaccaggaaactaccactcggttcctgcagaccgaagccgtgaccctgcaggacgtgagaggccgggactaccagaacgccatgcgggtgtggtccaacatccctggactgaaaagcaagcacgcacctctgacccctaaagaagaggagtacctgcaggcccaggtgcggagcagaagcaagctggacgcccctaaggtggatctgctggtgaagaattgcctcctgcccctgagagagtacttcaagtatttcagccagaatagtctgcccctgggaggcagcggcggcggcaccgtgggcagcgtgatgttcagcgacgtgagcgtggacttcagccaggaggagtgggagtgcctggaccccggccagagggacctgtacagggacgtgatgctggagaactacagcaacctgctgagcatgggcctgtacatccccaagccccaggtgatcagcctgctggagcagggcaaggagccctggatggtgggcagggagctgaccaggggcctgtgcagcgacctggagagcatgggcggcccaagcagcggcgcccctcctcccagcggcggcaggcggcccaagcagcggcgcccctcctcccagcggcggcagcccagccggctccccaacctctaccgaggagggcacctctgagtccgccacccccgagagcggccctggcacctccaccgagcccagcgagggcagcgcacccggcagccctgccggcagccccacctccacagaggagggaaccagcaccgagcccagcgaaggcagcgccccaggcaccagcaccgagcctagtgagcaggagattaaacggatcaacaagatcagaagaagacttgtgaaagacagcaacaccaagaaggccggcaagacaggccccatgaaaaccctgctggttagagtgatgacacccgatctgagagagcggctggaaaacctgagaaagaagcctgaaaatatcccccagcccatcagcaatacatctagagccaacctgaataagctgctgaccgattacaccgaaatgaagaaggcgatcctgcatgtgtactgggaagagttccagaaggaccctgtgggcctgatgagccgggtggcccagcctgccagcaagaagatcgatcagaacaagctgaaacctgagatggacgagaagggcaacctgaccaccgccggctttgcctgctctcagtgtggccagcccctgttcgtgtacaagctggagcaggtgtctgagaagggcaaggcttacaccaactacttcggacggtgcaatgtggccgagcacgaaaagctgatcctgctggcccagctgaagcccgagaaggatagcgacgaagccgtgacatatagcctgggaaagtttgggcagagggccctggatttctacagcattcatgtgaccaaggagtccacccaccccgtgaagcccctggcccagatcgccggaaacagatacgcctccggacctgtgggaaaggccctgagcgacgcatgtatgggcacaatcgcctccttcctgtctaagtaccaggacatcatcatcgaacaccagaaggtggtgaagggcaaccagaagagactggagagcctgcgggagctggccggcaaggaaaacctggaataccctagcgtgaccctgccacctcagcctcacaccaaggagggcgttgatgcctacaacgaagtgatcgcccgggtgcgaatgtgggtgaacctgaacctgtggcagaagctgaagctaagcagagatgatgccaagcctctgctgagactgaagggattcccttcctttcctctggtcgagagacaggccaacgaagtggactggtgggacatggtgtgtaacgtgaagaagctgatcaacgagaaaaaggaggatggcaaggtgttttggcagaatctggctggctacaagagacaggaagccctgagaccatacctgagcagcgaggaagatcggaagaagggaaagaaattcgctcggtaccagctgggcgacctgctgctgcacctggaaaagaagcacggcgaggactggggaaaggtgtacgacgaggcctgggagcggattgacaagaaagtggaaggcctgagcaagcacatcaagctggaagaggaacggagaagcgaggacgcccagagcaaggccgccctgaccgactggctgcgggctaaggccagcttcgtgatcgagggcctgaaggaggccgacaaggacgagttctgcagatgcgagctgaagctgcagaagtggtacggggacctgcggggaaagcccttcgccatcgaagccgagaacagcatcctggacatcagcggcttcagcaagcagtacaactgtgccttcatctggcagaaggacggcgtgaagaagctgaacctgtacctgatcatcaactacttcaagggcggcaagctgcggttcaagaagatcaaacctgaagccttcgaagccaacagattctacaccgtgatcaacaaaaagagcggcgagatcgtgcccatggaggtgaacttcaacttcgacgaccccaacctgatcatcctgcctctggcctttggcaagagacagggcagagaattcatctggaacgacctgctgtccctggaaaccggcagcctgaagctggccaacggaagagtgatcgagaagacactgtacaacagaagaacccggcaggatgagcctgccctgttcgtggccctgaccttcgagcggcgggaggtcctggactcctccaatatcaaaccaatgaacctgatcggcgtggcaagaggcgaaaacatccccgccgtgatcgccctgaccgaccccgagggctgcccactgagccggtttaaggatagcctgggaaacccaacccacatcctgagaatcggcgagagctataaggagaagcagcggaccatccaggccaagaaggaggtggagcagcggagagccggcggctacagccggaagtacgccagcaaagccaagaatctggcagacgatatggtgagaaacaccgctagagatctgctgtactacgccgtgacccaggatgccatgctgatcttcgccaacctgagccggggcttcggccggcagggcaagcggaccttcatggccgagagacagtacacacggatggaggactggctgaccgccaagctggcctacgagggcctgagcaagacctacctgtccaagacactggcccagtacacctccaagacatgcagcaactgtgggtttaccatcaccagcgccgactacgacagggtgctggagaagctgaagaagacagcaacaggctggatgaccacaattaacggcaaggagctgaaggtggagggccagattacctactacaacagatacaagagacagaacgtagtcaaggacctgtccgtcgagctggatagactgagcgaagaatctgtgaacaacgacatctcctcctggacaaagggcagaagcggagaagctctgagcctcctgaagaaaagattctcccatagacccgtgcaggagaagttcgtgtgcctgaactgcggcttcgagacacacgcagccgagcaagccgccctgaacatcgccagatcctggctgttcctgcggagccaggagtacaagaaataccagacaaacaagacaaccggcaacaccgataagagagccttcgtcgagacctggcagtccttttaccggaagaagcttaaggaggtgtggaaacctgccgtgcggtctggcggatctggcggaggctccaccagccccaagaaaaagagaaaagtctaagctgccttctgcggggcttgccttctggccatgcccttcttctctcccttgcacctgtacctcttggtctttgaataaagcctgagtaggaaggctagcaaaaaaaaaaaaaaaaaaaaaaaaaaaaaaaaaaaaaaaaaaaaaaaaaaaaaaaaaaaaaaaaaaaaaaaaaaaaaaaagcccagccggctccccaacctctaccgaggagggcacctctgagtccgccacccccgagagcggccctggcacctccaccgagcccagcgagggcagcgcacccggcagccctgccggcagccccacctccacagaggagggaaccagcaccgagcccagcgaaggcagcgccccaggcaccagcaccgagcctagtgagcaggagattaaacggatcaacaagatcagaagaagacttgtgaaagacagcaacaccaagaaggccggcaagacaggccccatgaaaaccctgctggttagagtgatgacacccgatctgagagagcggctggaaaacctgagaaagaagcctgaaaatatcccccagcccatcagcaatacatctagagccaacctgaataagctgctgaccgattacaccgaaatgaagaaggcgatcctgcatgtgtactgggaagagttccagaaggaccctgtgggcctgatgagccgggtggcccagcctgccagcaagaagatcgatcagaacaagctgaaacctgagatggacgagaagggcaacctgaccaccgccggctttgcctgctctcagtgtggccagcccctgttcgtgtacaagctggagcaggtgtctgagaagggcaaggcttacaccaactacttcggacggtgcaatgtggccgagcacgaaaagctgatcctgctggcccagctgaagcccgagaaggatagcgacgaagccgtgacatatagcctgggaaagtttgggcagagggccctggatttctacagcattcatgtgaccaaggagtccacccaccccgtgaagcccctggcccagatcgccggaaacagatacgcctccggacctgtgggaaaggccctgagcgacgcatgtatgggcacaatcgcctccttcctgtctaagtaccaggacatcatcatcgaacaccagaaggtggtgaagggcaaccagaagagactggagagcctgcgggagctggccggcaaggaaaacctggaataccctagcgtgaccctgccacctcagcctcacaccaaggagggcgttgatgcctacaacgaagtgatcgcccgggtgcgaatgtgggtgaacctgaacctgtggcagaagctgaagctaagcagagatgatgccaagcctctgctgagactgaagggattcccttcctttcctctggtcgagagacaggccaacgaagtggactggtgggacatggtgtgtaacgtgaagaagctgatcaacgagaaaaaggaggatggcaaggtgttttggcagaatctggctggctacaagagacaggaagccctgagaccatacctgagcagcgaggaagatcggaagaagggaaagaaattcgctcggtaccagctgggcgacctgctgctgcacctggaaaagaagcacggcgaggactggggaaaggtgtacgacgaggcctgggagcggattgacaagaaagtggaaggcctgagcaagcacatcaagctggaagaggaacggagaagcgaggacgcccagagcaaggccgccctgaccgactggctgcgggctaaggccagcttcgtgatcgagggcctgaaggaggccgacaaggacgagttctgcagatgcgagctgaagctgcagaagtggtacggggacctgcggggaaagcccttcgccatcgaagccgagaacagcatcctggacatcagcggcttcagcaagcagtacaactgtgccttcatctggcagaaggacggcgtgaagaagctgaacctgtacctgatcatcaactacttcaagggcggcaagctgcggttcaagaagatcaaacctgaagccttcgaagccaacagattctacaccgtgatcaacaaaaagagcggcgagatcgtgcccatggaggtgaacttcaacttcgacgaccccaacctgatcatcctgcctctggcctttggcaagagacagggcagagaattcatctggaacgacctgctgtccctggaaaccggcagcctgaagctggccaacggaagagtgatcgagaagacactgtacaacagaagaacccggcaggatgagcctgccctgttcgtggccctgaccttcgagcggcgggaggtcctggactcctccaatatcaaaccaatgaacctgatcggcgtggcaagaggcgaaaacatccccgccgtgatcgccctgaccgaccccgagggctgcccactgagccggtttaaggatagcctgggaaacccaacccacatcctgagaatcggcgagagctataaggagaagcagcggaccatccaggccaagaaggaggtggagcagcggagagccggcggctacagccggaagtacgccagcaaagccaagaatctggcagacgatatggtgagaaacaccgctagagatctgctgtactacgccgtgacccaggatgccatgctgatcttcgccaacctgagccggggcttcggccggcagggcaagcggaccttcatggccgagagacagtacacacggatggaggactggctgaccgccaagctggcctacgagggcctgagcaagacctacctgtccaagacactggcccagtacacctccaagacatgcagcaactgtgggtttaccatcaccagcgccgactacgacagggtgctggagaagctgaagaagacagcaacaggctggatgaccacaattaacggcaaggagctgaaggtggagggccagattacctactacaacagatacaagagacagaacgtagtcaaggacctgtccgtcgagctggatagactgagcgaagaatctgtgaacaacgacatctcctcctggacaaagggcagaagcggagaagctctgagcctcctgaagaaaagattctcccatagacccgtgcaggagaagttcgtgtgcctgaactgcggcttcgagacacacgcagccgagcaagccgccctgaacatcgccagatcctggctgttcctgcggagccaggagtacaagaaataccagacaaacaagacaaccggcaacaccgataagagagccttcgtcgagacctggcagtccttttaccggaagaagcttaaggaggtgtggaaacctgccgtgcggtctggcggatctggcggaggctccaccagccccaagaaaaagagaaaagtctaagctgccttctgcggggcttgccttctggccatgcccttcttctctcccttgcacctgtacctcttggtctttgaataaagcctgagtaggaaggctagcaaaaaaaaaaaaaaaaaaaaaaaaaaaaaaaaaaaaaaaaaaaaaaaaaaaaaaaaaaaaaaaaaaaaaaaaaaaaaaaa

SEQ ID NO: 9001 - RNA, 8787 nt, synthetic construct
  source 1..8787: mol_type = other RNA
aggaaataagagagaaaagaagagtaagaagaaatataagagccaccatggcccctaagaagaagcgtaaagtgagccggatgaaccacgaccaggagttcgacccccctaaggtgtaccctcccgtccccgccgagaagagaaagcccatccgggtcctgagcctgttcgatggcatcgccaccggtctgctggtgctgaaggacctgggcatccaggtggataggtacattgcctccgaggtgtgcgaggactccatcaccgtgggaatggtgcgtcatcagggcaagatcatgtacgtgggcgacgtgcggagcgtgacacagaagcatatccaggagtggggccctttcgacctggtgatcggcggcagcccttgcaatgacctgagcatcgtgaacccagcccggaagggcctgtacgagggaaccggcagactgttcttcgagttttacagactgctgcacgacgcccggcctaaggaaggcgacgaccggcccttcttttggctgttcgagaatgtggtggccatgggagtcagcgacaagcgggatattagccggttcctggagagcaaccccgtgatgatcgatgccaaggaagtgagcgccgcccaccgggccagatacttctggggcaatctgcctggcatgaacagacccctggccagcaccgtgaacgacaagctggagctgcaggagtgcctggagcacggccggatcgccaagttcagcaaggtgagaaccatcaccacccgaagcaacagcatcaaacaaggcaaggaccagcactttcctgtgttcatgaacgagaaggaggacatcctgtggtgtaccgagatggagagagtgttcgggttcccagtccactacacagatgtcagcaacatgtctagactggccagacagagactgctgggaagaagctggtccgtccctgtgatcagacacctgttcgcccctctgaaggagtacttcgcctgcgtgagcagcggcaacagcaacgccaacagccggggccccagcttctctagcggcctggtgccactgtccctgagagggagccacatgggccccatggagatctacaaaaccgtgagcgcctggaagcggcagcctgtgcgcgtgctgagcctgtttcggaatatcgataaagtcctgaaaagcctgggattcctggagagcggctctggctccggcggtggcaccctgaagtacgtggaggatgtgacaaacgtggtcagacgggatgtggagaagtggggccccttcgatctggtgtacggcagcacccaacccctgggcagctcttgtgaccggtgccctggctggtacatgtttcagttccaccggatcctgcagtacgccctgccgagacaggagtcccagcggccattcttttggattttcatggacaacttgctgctgaccgaggatgaccaggaaactaccactcggttcctgcagaccgaagccgtgaccctgcaggacgtgagaggccgggactaccagaacgccatgcgggtgtggtccaacatccctggactgaaaagcaagcacgcacctctgacccctaaagaagaggagtacctgcaggcccaggtgcggagcagaagcaagctggacgcccctaaggtggatctgctggtgaagaattgcctcctgcccctgagagagtacttcaagtatttcagccagaatagtctgcccctgggaggcagcggcggcggcgtgcaggagcccgtgaccttcaaggacgtggccgtggacttcacccaggaggagtggggccagctggacctggtgcagaggaccctgtacagggacgtgatgctggagacctacggccacctgctgagcgtgggcaaccagatcgccaagcccgaggtgatcagcctgctggagcagggcgaggagccctggagcgtggagcaggcctgcccccagcacacctgccccgagtggatgaggaacggcggcccaagcagcggcgcccctcctcccagcggcggcaggcggcccaagcagcggcgcccctcctcccagcggcggcagcccagccggctccccaacctctaccgaggagggcacctctgagtccgccacccccgagagcggccctggcacctccaccgagcccagcgagggcagcgcacccggcagccctgccggcagccccacctccacagaggagggaaccagcaccgagcccagcgaaggcagcgccccaggcaccagcaccgagcctagtgagcaggagattaaacggatcaacaagatcagaagaagacttgtgaaagacagcaacaccaagaaggccggcaagacaggccccatgaaaaccctgctggttagagtgatgacacccgatctgagagagcggctggaaaacctgagaaagaagcctgaaaatatcccccagcccatcagcaatacatctagagccaacctgaataagctgctgaccgattacaccgaaatgaagaaggcgatcctgcatgtgtactgggaagagttccagaaggaccctgtgggcctgatgagccgggtggcccagcctgccagcaagaagatcgatcagaacaagctgaaacctgagatggacgagaagggcaacctgaccaccgccggctttgcctgctctcagtgtggccagcccctgttcgtgtacaagctggagcaggtgtctgagaagggcaaggcttacaccaactacttcggacggtgcaatgtggccgagcacgaaaagctgatcctgctggcccagctgaagcccgagaaggatagcgacgaagccgtgacatatagcctgggaaagtttgggcagagggccctggatttctacagcattcatgtgaccaaggagtccacccaccccgtgaagcccctggcccagatcgccggaaacagatacgcctccggacctgtgggaaaggccctgagcgacgcatgtatgggcacaatcgcctccttcctgtctaagtaccaggacatcatcatcgaacaccagaaggtggtgaagggcaaccagaagagactggagagcctgcgggagctggccggcaaggaaaacctggaataccctagcgtgaccctgccacctcagcctcacaccaaggagggcgttgatgcctacaacgaagtgatcgcccgggtgcgaatgtgggtgaacctgaacctgtggcagaagctgaagctaagcagagatgatgccaagcctctgctgagactgaagggattcccttcctttcctctggtcgagagacaggccaacgaagtggactggtgggacatggtgtgtaacgtgaagaagctgatcaacgagaaaaaggaggatggcaaggtgttttggcagaatctggctggctacaagagacaggaagccctgagaccatacctgagcagcgaggaagatcggaagaagggaaagaaattcgctcggtaccagctgggcgacctgctgctgcacctggaaaagaagcacggcgaggactggggaaaggtgtacgacgaggcctgggagcggattgacaagaaagtggaaggcctgagcaagcacatcaagctggaagaggaacggagaagcgaggacgcccagagcaaggccgccctgaccgactggctgcgggctaaggccagcttcgtgatcgagggcctgaaggaggccgacaaggacgagttctgcagatgcgagctgaagctgcagaagtggtacggggacctgcggggaaagcccttcgccatcgaagccgagaacagcatcctggacatcagcggcttcagcaagcagtacaactgtgccttcatctggcagaaggacggcgtgaagaagctgaacctgtacctgatcatcaactacttcaagggcggcaagctgcggttcaagaagatcaaacctgaagccttcgaagccaacagattctacaccgtgatcaacaaaaagagcggcgagatcgtgcccatggaggtgaacttcaacttcgacgaccccaacctgatcatcctgcctctggcctttggcaagagacagggcagagaattcatctggaacgacctgctgtccctggaaaccggcagcctgaagctggccaacggaagagtgatcgagaagacactgtacaacagaagaacccggcaggatgagcctgccctgttcgtggccctgaccttcgagcggcgggaggtcctggactcctccaatatcaaaccaatgaacctgatcggcgtggcaagaggcgaaaacatccccgccgtgatcgccctgaccgaccccgagggctgcccactgagccggtttaaggatagcctgggaaacccaacccacatcctgagaatcggcgagagctataaggagaagcagcggaccatccaggccaagaaggaggtggagcagcggagagccggcggctacagccggaagtacgccagcaaagccaagaatctggcagacgatatggtgagaaacaccgctagagatctgctgtactacgccgtgacccaggatgccatgctgatcttcgccaacctgagccggggcttcggccggcagggcaagcggaccttcatggccgagagacagtacacacggatggaggactggctgaccgccaagctggcctacgagggcctgagcaagacctacctgtccaagacactggcccagtacacctccaagacatgcagcaactgtgggtttaccatcaccagcgccgactacgacagggtgctggagaagctgaagaagacagcaacaggctggatgaccacaattaacggcaaggagctgaaggtggagggccagattacctactacaacagatacaagagacagaacgtagtcaaggacctgtccgtcgagctggatagactgagcgaagaatctgtgaacaacgacatctcctcctggacaaagggcagaagcggagaagctctgagcctcctgaagaaaagattctcccatagacccgtgcaggagaagttcgtgtgcctgaactgcggcttcgagacacacgcagccgagcaagccgccctgaacatcgccagatcctggctgttcctgcggagccaggagtacaagaaataccagacaaacaagacaaccggcaacaccgataagagagccttcgtcgagacctggcagtccttttaccggaagaagcttaaggaggtgtggaaacctgccgtgcggtctggcggatctggcggaggctccaccagccccaagaaaaagagaaaagtctaagctgccttctgcggggcttgccttctggccatgcccttcttctctcccttgcacctgtacctcttggtctttgaataaagcctgagtaggaaggctagcaaaaaaaaaaaaaaaaaaaaaaaaaaaaaaaaaaaaaaaaaaaaaaaaaaaaaaaaaaaaaaaaaaaaaaaaaaaaaaaagcccagccggctccccaacctctaccgaggagggcacctctgagtccgccacccccgagagcggccctggcacctccaccgagcccagcgagggcagcgcacccggcagccctgccggcagccccacctccacagaggagggaaccagcaccgagcccagcgaaggcagcgccccaggcaccagcaccgagcctagtgagcaggagattaaacggatcaacaagatcagaagaagacttgtgaaagacagcaacaccaagaaggccggcaagacaggccccatgaaaaccctgctggttagagtgatgacacccgatctgagagagcggctggaaaacctgagaaagaagcctgaaaatatcccccagcccatcagcaatacatctagagccaacctgaataagctgctgaccgattacaccgaaatgaagaaggcgatcctgcatgtgtactgggaagagttccagaaggaccctgtgggcctgatgagccgggtggcccagcctgccagcaagaagatcgatcagaacaagctgaaacctgagatggacgagaagggcaacctgaccaccgccggctttgcctgctctcagtgtggccagcccctgttcgtgtacaagctggagcaggtgtctgagaagggcaaggcttacaccaactacttcggacggtgcaatgtggccgagcacgaaaagctgatcctgctggcccagctgaagcccgagaaggatagcgacgaagccgtgacatatagcctgggaaagtttgggcagagggccctggatttctacagcattcatgtgaccaaggagtccacccaccccgtgaagcccctggcccagatcgccggaaacagatacgcctccggacctgtgggaaaggccctgagcgacgcatgtatgggcacaatcgcctccttcctgtctaagtaccaggacatcatcatcgaacaccagaaggtggtgaagggcaaccagaagagactggagagcctgcgggagctggccggcaaggaaaacctggaataccctagcgtgaccctgccacctcagcctcacaccaaggagggcgttgatgcctacaacgaagtgatcgcccgggtgcgaatgtgggtgaacctgaacctgtggcagaagctgaagctaagcagagatgatgccaagcctctgctgagactgaagggattcccttcctttcctctggtcgagagacaggccaacgaagtggactggtgggacatggtgtgtaacgtgaagaagctgatcaacgagaaaaaggaggatggcaaggtgttttggcagaatctggctggctacaagagacaggaagccctgagaccatacctgagcagcgaggaagatcggaagaagggaaagaaattcgctcggtaccagctgggcgacctgctgctgcacctggaaaagaagcacggcgaggactggggaaaggtgtacgacgaggcctgggagcggattgacaagaaagtggaaggcctgagcaagcacatcaagctggaagaggaacggagaagcgaggacgcccagagcaaggccgccctgaccgactggctgcgggctaaggccagcttcgtgatcgagggcctgaaggaggccgacaaggacgagttctgcagatgcgagctgaagctgcagaagtggtacggggacctgcggggaaagcccttcgccatcgaagccgagaacagcatcctggacatcagcggcttcagcaagcagtacaactgtgccttcatctggcagaaggacggcgtgaagaagctgaacctgtacctgatcatcaactacttcaagggcggcaagctgcggttcaagaagatcaaacctgaagccttcgaagccaacagattctacaccgtgatcaacaaaaagagcggcgagatcgtgcccatggaggtgaacttcaacttcgacgaccccaacctgatcatcctgcctctggcctttggcaagagacagggcagagaattcatctggaacgacctgctgtccctggaaaccggcagcctgaagctggccaacggaagagtgatcgagaagacactgtacaacagaagaacccggcaggatgagcctgccctgttcgtggccctgaccttcgagcggcgggaggtcctggactcctccaatatcaaaccaatgaacctgatcggcgtggcaagaggcgaaaacatccccgccgtgatcgccctgaccgaccccgagggctgcccactgagccggtttaaggatagcctgggaaacccaacccacatcctgagaatcggcgagagctataaggagaagcagcggaccatccaggccaagaaggaggtggagcagcggagagccggcggctacagccggaagtacgccagcaaagccaagaatctggcagacgatatggtgagaaacaccgctagagatctgctgtactacgccgtgacccaggatgccatgctgatcttcgccaacctgagccggggcttcggccggcagggcaagcggaccttcatggccgagagacagtacacacggatggaggactggctgaccgccaagctggcctacgagggcctgagcaagacctacctgtccaagacactggcccagtacacctccaagacatgcagcaactgtgggtttaccatcaccagcgccgactacgacagggtgctggagaagctgaagaagacagcaacaggctggatgaccacaattaacggcaaggagctgaaggtggagggccagattacctactacaacagatacaagagacagaacgtagtcaaggacctgtccgtcgagctggatagactgagcgaagaatctgtgaacaacgacatctcctcctggacaaagggcagaagcggagaagctctgagcctcctgaagaaaagattctcccatagacccgtgcaggagaagttcgtgtgcctgaactgcggcttcgagacacacgcagccgagcaagccgccctgaacatcgccagatcctggctgttcctgcggagccaggagtacaagaaataccagacaaacaagacaaccggcaacaccgataagagagccttcgtcgagacctggcagtccttttaccggaagaagcttaaggaggtgtggaaacctgccgtgcggtctggcggatctggcggaggctccaccagccccaagaaaaagagaaaagtctaagctgccttctgcggggcttgccttctggccatgcccttcttctctcccttgcacctgtacctcttggtctttgaataaagcctgagtaggaaggctagcaaaaaaaaaaaaaaaaaaaaaaaaaaaaaaaaaaaaaaaaaaaaaaaaaaaaaaaaaaaaaaaaaaaaaaaaaaaaaaaa

SEQ ID NO: 9002 - RNA, 8787 nt, synthetic construct
  source 1..8787: mol_type = other RNA
aggaaataagagagaaaagaagagtaagaagaaatataagagccaccatggcccctaagaagaagcgtaaagtgagccggatgaaccacgaccaggagttcgacccccctaaggtgtaccctcccgtccccgccgagaagagaaagcccatccgggtcctgagcctgttcgatggcatcgccaccggtctgctggtgctgaaggacctgggcatccaggtggataggtacattgcctccgaggtgtgcgaggactccatcaccgtgggaatggtgcgtcatcagggcaagatcatgtacgtgggcgacgtgcggagcgtgacacagaagcatatccaggagtggggccctttcgacctggtgatcggcggcagcccttgcaatgacctgagcatcgtgaacccagcccggaagggcctgtacgagggaaccggcagactgttcttcgagttttacagactgctgcacgacgcccggcctaaggaaggcgacgaccggcccttcttttggctgttcgagaatgtggtggccatgggagtcagcgacaagcgggatattagccggttcctggagagcaaccccgtgatgatcgatgccaaggaagtgagcgccgcccaccgggccagatacttctggggcaatctgcctggcatgaacagacccctggccagcaccgtgaacgacaagctggagctgcaggagtgcctggagcacggccggatcgccaagttcagcaaggtgagaaccatcaccacccgaagcaacagcatcaaacaaggcaaggaccagcactttcctgtgttcatgaacgagaaggaggacatcctgtggtgtaccgagatggagagagtgttcgggttcccagtccactacacagatgtcagcaacatgtctagactggccagacagagactgctgggaagaagctggtccgtccctgtgatcagacacctgttcgcccctctgaaggagtacttcgcctgcgtgagcagcggcaacagcaacgccaacagccggggccccagcttctctagcggcctggtgccactgtccctgagagggagccacatgggccccatggagatctacaaaaccgtgagcgcctggaagcggcagcctgtgcgcgtgctgagcctgtttcggaatatcgataaagtcctgaaaagcctgggattcctggagagcggctctggctccggcggtggcaccctgaagtacgtggaggatgtgacaaacgtggtcagacgggatgtggagaagtggggccccttcgatctggtgtacggcagcacccaacccctgggcagctcttgtgaccggtgccctggctggtacatgtttcagttccaccggatcctgcagtacgccctgccgagacaggagtcccagcggccattcttttggattttcatggacaacttgctgctgaccgaggatgaccaggaaactaccactcggttcctgcagaccgaagccgtgaccctgcaggacgtgagaggccgggactaccagaacgccatgcgggtgtggtccaacatccctggactgaaaagcaagcacgcacctctgacccctaaagaagaggagtacctgcaggcccaggtgcggagcagaagcaagctggacgcccctaaggtggatctgctggtgaagaattgcctcctgcccctgagagagtacttcaagtatttcagccagaatagtctgcccctgggaggcagcggcggcggcttccaggccagcgtggtgttcgaggacgtggccgtgaacttcacccccgaggagtgggccctgctgaacaggggccagaggaagctgtacagggacgtgatgctggagacctgcaggaacctgagcgccgtgggcaaggacggcagcatccccagcctggtgttcagcgagaagcagaagttccacagcagcggcgacctgaccaggatgcaggagggcctgctgaggagccccctggtggagggcggcccaagcagcggcgcccctcctcccagcggcggcaggcggcccaagcagcggcgcccctcctcccagcggcggcagcccagccggctccccaacctctaccgaggagggcacctctgagtccgccacccccgagagcggccctggcacctccaccgagcccagcgagggcagcgcacccggcagccctgccggcagccccacctccacagaggagggaaccagcaccgagcccagcgaaggcagcgccccaggcaccagcaccgagcctagtgagcaggagattaaacggatcaacaagatcagaagaagacttgtgaaagacagcaacaccaagaaggccggcaagacaggccccatgaaaaccctgctggttagagtgatgacacccgatctgagagagcggctggaaaacctgagaaagaagcctgaaaatatcccccagcccatcagcaatacatctagagccaacctgaataagctgctgaccgattacaccgaaatgaagaaggcgatcctgcatgtgtactgggaagagttccagaaggaccctgtgggcctgatgagccgggtggcccagcctgccagcaagaagatcgatcagaacaagctgaaacctgagatggacgagaagggcaacctgaccaccgccggctttgcctgctctcagtgtggccagcccctgttcgtgtacaagctggagcaggtgtctgagaagggcaaggcttacaccaactacttcggacggtgcaatgtggccgagcacgaaaagctgatcctgctggcccagctgaagcccgagaaggatagcgacgaagccgtgacatatagcctgggaaagtttgggcagagggccctggatttctacagcattcatgtgaccaaggagtccacccaccccgtgaagcccctggcccagatcgccggaaacagatacgcctccggacctgtgggaaaggccctgagcgacgcatgtatgggcacaatcgcctccttcctgtctaagtaccaggacatcatcatcgaacaccagaaggtggtgaagggcaaccagaagagactggagagcctgcgggagctggccggcaaggaaaacctggaataccctagcgtgaccctgccacctcagcctcacaccaaggagggcgttgatgcctacaacgaagtgatcgcccgggtgcgaatgtgggtgaacctgaacctgtggcagaagctgaagctaagcagagatgatgccaagcctctgctgagactgaagggattcccttcctttcctctggtcgagagacaggccaacgaagtggactggtgggacatggtgtgtaacgtgaagaagctgatcaacgagaaaaaggaggatggcaaggtgttttggcagaatctggctggctacaagagacaggaagccctgagaccatacctgagcagcgaggaagatcggaagaagggaaagaaattcgctcggtaccagctgggcgacctgctgctgcacctggaaaagaagcacggcgaggactggggaaaggtgtacgacgaggcctgggagcggattgacaagaaagtggaaggcctgagcaagcacatcaagctggaagaggaacggagaagcgaggacgcccagagcaaggccgccctgaccgactggctgcgggctaaggccagcttcgtgatcgagggcctgaaggaggccgacaaggacgagttctgcagatgcgagctgaagctgcagaagtggtacggggacctgcggggaaagcccttcgccatcgaagccgagaacagcatcctggacatcagcggcttcagcaagcagtacaactgtgccttcatctggcagaaggacggcgtgaagaagctgaacctgtacctgatcatcaactacttcaagggcggcaagctgcggttcaagaagatcaaacctgaagccttcgaagccaacagattctacaccgtgatcaacaaaaagagcggcgagatcgtgcccatggaggtgaacttcaacttcgacgaccccaacctgatcatcctgcctctggcctttggcaagagacagggcagagaattcatctggaacgacctgctgtccctggaaaccggcagcctgaagctggccaacggaagagtgatcgagaagacactgtacaacagaagaacccggcaggatgagcctgccctgttcgtggccctgaccttcgagcggcgggaggtcctggactcctccaatatcaaaccaatgaacctgatcggcgtggcaagaggcgaaaacatccccgccgtgatcgccctgaccgaccccgagggctgcccactgagccggtttaaggatagcctgggaaacccaacccacatcctgagaatcggcgagagctataaggagaagcagcggaccatccaggccaagaaggaggtggagcagcggagagccggcggctacagccggaagtacgccagcaaagccaagaatctggcagacgatatggtgagaaacaccgctagagatctgctgtactacgccgtgacccaggatgccatgctgatcttcgccaacctgagccggggcttcggccggcagggcaagcggaccttcatggccgagagacagtacacacggatggaggactggctgaccgccaagctggcctacgagggcctgagcaagacctacctgtccaagacactggcccagtacacctccaagacatgcagcaactgtgggtttaccatcaccagcgccgactacgacagggtgctggagaagctgaagaagacagcaacaggctggatgaccacaattaacggcaaggagctgaaggtggagggccagattacctactacaacagatacaagagacagaacgtagtcaaggacctgtccgtcgagctggatagactgagcgaagaatctgtgaacaacgacatctcctcctggacaaagggcagaagcggagaagctctgagcctcctgaagaaaagattctcccatagacccgtgcaggagaagttcgtgtgcctgaactgcggcttcgagacacacgcagccgagcaagccgccctgaacatcgccagatcctggctgttcctgcggagccaggagtacaagaaataccagacaaacaagacaaccggcaacaccgataagagagccttcgtcgagacctggcagtccttttaccggaagaagcttaaggaggtgtggaaacctgccgtgcggtctggcggatctggcggaggctccaccagccccaagaaaaagagaaaagtctaagctgccttctgcggggcttgccttctggccatgcccttcttctctcccttgcacctgtacctcttggtctttgaataaagcctgagtaggaaggctagcaaaaaaaaaaaaaaaaaaaaaaaaaaaaaaaaaaaaaaaaaaaaaaaaaaaaaaaaaaaaaaaaaaaaaaaaaaaaaaaagcccagccggctccccaacctctaccgaggagggcacctctgagtccgccacccccgagagcggccctggcacctccaccgagcccagcgagggcagcgcacccggcagccctgccggcagccccacctccacagaggagggaaccagcaccgagcccagcgaaggcagcgccccaggcaccagcaccgagcctagtgagcaggagattaaacggatcaacaagatcagaagaagacttgtgaaagacagcaacaccaagaaggccggcaagacaggccccatgaaaaccctgctggttagagtgatgacacccgatctgagagagcggctggaaaacctgagaaagaagcctgaaaatatcccccagcccatcagcaatacatctagagccaacctgaataagctgctgaccgattacaccgaaatgaagaaggcgatcctgcatgtgtactgggaagagttccagaaggaccctgtgggcctgatgagccgggtggcccagcctgccagcaagaagatcgatcagaacaagctgaaacctgagatggacgagaagggcaacctgaccaccgccggctttgcctgctctcagtgtggccagcccctgttcgtgtacaagctggagcaggtgtctgagaagggcaaggcttacaccaactacttcggacggtgcaatgtggccgagcacgaaaagctgatcctgctggcccagctgaagcccgagaaggatagcgacgaagccgtgacatatagcctgggaaagtttgggcagagggccctggatttctacagcattcatgtgaccaaggagtccacccaccccgtgaagcccctggcccagatcgccggaaacagatacgcctccggacctgtgggaaaggccctgagcgacgcatgtatgggcacaatcgcctccttcctgtctaagtaccaggacatcatcatcgaacaccagaaggtggtgaagggcaaccagaagagactggagagcctgcgggagctggccggcaaggaaaacctggaataccctagcgtgaccctgccacctcagcctcacaccaaggagggcgttgatgcctacaacgaagtgatcgcccgggtgcgaatgtgggtgaacctgaacctgtggcagaagctgaagctaagcagagatgatgccaagcctctgctgagactgaagggattcccttcctttcctctggtcgagagacaggccaacgaagtggactggtgggacatggtgtgtaacgtgaagaagctgatcaacgagaaaaaggaggatggcaaggtgttttggcagaatctggctggctacaagagacaggaagccctgagaccatacctgagcagcgaggaagatcggaagaagggaaagaaattcgctcggtaccagctgggcgacctgctgctgcacctggaaaagaagcacggcgaggactggggaaaggtgtacgacgaggcctgggagcggattgacaagaaagtggaaggcctgagcaagcacatcaagctggaagaggaacggagaagcgaggacgcccagagcaaggccgccctgaccgactggctgcgggctaaggccagcttcgtgatcgagggcctgaaggaggccgacaaggacgagttctgcagatgcgagctgaagctgcagaagtggtacggggacctgcggggaaagcccttcgccatcgaagccgagaacagcatcctggacatcagcggcttcagcaagcagtacaactgtgccttcatctggcagaaggacggcgtgaagaagctgaacctgtacctgatcatcaactacttcaagggcggcaagctgcggttcaagaagatcaaacctgaagccttcgaagccaacagattctacaccgtgatcaacaaaaagagcggcgagatcgtgcccatggaggtgaacttcaacttcgacgaccccaacctgatcatcctgcctctggcctttggcaagagacagggcagagaattcatctggaacgacctgctgtccctggaaaccggcagcctgaagctggccaacggaagagtgatcgagaagacactgtacaacagaagaacccggcaggatgagcctgccctgttcgtggccctgaccttcgagcggcgggaggtcctggactcctccaatatcaaaccaatgaacctgatcggcgtggcaagaggcgaaaacatccccgccgtgatcgccctgaccgaccccgagggctgcccactgagccggtttaaggatagcctgggaaacccaacccacatcctgagaatcggcgagagctataaggagaagcagcggaccatccaggccaagaaggaggtggagcagcggagagccggcggctacagccggaagtacgccagcaaagccaagaatctggcagacgatatggtgagaaacaccgctagagatctgctgtactacgccgtgacccaggatgccatgctgatcttcgccaacctgagccggggcttcggccggcagggcaagcggaccttcatggccgagagacagtacacacggatggaggactggctgaccgccaagctggcctacgagggcctgagcaagacctacctgtccaagacactggcccagtacacctccaagacatgcagcaactgtgggtttaccatcaccagcgccgactacgacagggtgctggagaagctgaagaagacagcaacaggctggatgaccacaattaacggcaaggagctgaaggtggagggccagattacctactacaacagatacaagagacagaacgtagtcaaggacctgtccgtcgagctggatagactgagcgaagaatctgtgaacaacgacatctcctcctggacaaagggcagaagcggagaagctctgagcctcctgaagaaaagattctcccatagacccgtgcaggagaagttcgtgtgcctgaactgcggcttcgagacacacgcagccgagcaagccgccctgaacatcgccagatcctggctgttcctgcggagccaggagtacaagaaataccagacaaacaagacaaccggcaacaccgataagagagccttcgtcgagacctggcagtccttttaccggaagaagcttaaggaggtgtggaaacctgccgtgcggtctggcggatctggcggaggctccaccagccccaagaaaaagagaaaagtctaagctgccttctgcggggcttgccttctggccatgcccttcttctctcccttgcacctgtacctcttggtctttgaataaagcctgagtaggaaggctagcaaaaaaaaaaaaaaaaaaaaaaaaaaaaaaaaaaaaaaaaaaaaaaaaaaaaaaaaaaaaaaaaaaaaaaaaaaaaaaaa

SEQ ID NO: 9003 - RNA, 8787 nt, synthetic construct
  source 1..8787: mol_type = other RNA
aggaaataagagagaaaagaagagtaagaagaaatataagagccaccatggcccctaagaagaagcgtaaagtgagccggatgaaccacgaccaggagttcgacccccctaaggtgtaccctcccgtccccgccgagaagagaaagcccatccgggtcctgagcctgttcgatggcatcgccaccggtctgctggtgctgaaggacctgggcatccaggtggataggtacattgcctccgaggtgtgcgaggactccatcaccgtgggaatggtgcgtcatcagggcaagatcatgtacgtgggcgacgtgcggagcgtgacacagaagcatatccaggagtggggccctttcgacctggtgatcggcggcagcccttgcaatgacctgagcatcgtgaacccagcccggaagggcctgtacgagggaaccggcagactgttcttcgagttttacagactgctgcacgacgcccggcctaaggaaggcgacgaccggcccttcttttggctgttcgagaatgtggtggccatgggagtcagcgacaagcgggatattagccggttcctggagagcaaccccgtgatgatcgatgccaaggaagtgagcgccgcccaccgggccagatacttctggggcaatctgcctggcatgaacagacccctggccagcaccgtgaacgacaagctggagctgcaggagtgcctggagcacggccggatcgccaagttcagcaaggtgagaaccatcaccacccgaagcaacagcatcaaacaaggcaaggaccagcactttcctgtgttcatgaacgagaaggaggacatcctgtggtgtaccgagatggagagagtgttcgggttcccagtccactacacagatgtcagcaacatgtctagactggccagacagagactgctgggaagaagctggtccgtccctgtgatcagacacctgttcgcccctctgaaggagtacttcgcctgcgtgagcagcggcaacagcaacgccaacagccggggccccagcttctctagcggcctggtgccactgtccctgagagggagccacatgggccccatggagatctacaaaaccgtgagcgcctggaagcggcagcctgtgcgcgtgctgagcctgtttcggaatatcgataaagtcctgaaaagcctgggattcctggagagcggctctggctccggcggtggcaccctgaagtacgtggaggatgtgacaaacgtggtcagacgggatgtggagaagtggggccccttcgatctggtgtacggcagcacccaacccctgggcagctcttgtgaccggtgccctggctggtacatgtttcagttccaccggatcctgcagtacgccctgccgagacaggagtcccagcggccattcttttggattttcatggacaacttgctgctgaccgaggatgaccaggaaactaccactcggttcctgcagaccgaagccgtgaccctgcaggacgtgagaggccgggactaccagaacgccatgcgggtgtggtccaacatccctggactgaaaagcaagcacgcacctctgacccctaaagaagaggagtacctgcaggcccaggtgcggagcagaagcaagctggacgcccctaaggtggatctgctggtgaagaattgcctcctgcccctgagagagtacttcaagtatttcagccagaatagtctgcccctgggaggcagcggcggcggcagcctgggcagcgagctgttcagggacgtggccatcgtgttcagccaggaggagtggcagtggctggcccccgcccagagggacctgtacagggacgtgatgctggagacctacagcaacctggtgagcctgggcctggccatcagcaagcccgacgtgatcagcttcctggagcagggcaaggagccctggatggtggagagggtggccaccggcgacctgtgccccgtgctggagagcggcggcggcccaagcagcggcgcccctcctcccagcggcggcaggcggcccaagcagcggcgcccctcctcccagcggcggcagcccagccggctccccaacctctaccgaggagggcacctctgagtccgccacccccgagagcggccctggcacctccaccgagcccagcgagggcagcgcacccggcagccctgccggcagccccacctccacagaggagggaaccagcaccgagcccagcgaaggcagcgccccaggcaccagcaccgagcctagtgagcaggagattaaacggatcaacaagatcagaagaagacttgtgaaagacagcaacaccaagaaggccggcaagacaggccccatgaaaaccctgctggttagagtgatgacacccgatctgagagagcggctggaaaacctgagaaagaagcctgaaaatatcccccagcccatcagcaatacatctagagccaacctgaataagctgctgaccgattacaccgaaatgaagaaggcgatcctgcatgtgtactgggaagagttccagaaggaccctgtgggcctgatgagccgggtggcccagcctgccagcaagaagatcgatcagaacaagctgaaacctgagatggacgagaagggcaacctgaccaccgccggctttgcctgctctcagtgtggccagcccctgttcgtgtacaagctggagcaggtgtctgagaagggcaaggcttacaccaactacttcggacggtgcaatgtggccgagcacgaaaagctgatcctgctggcccagctgaagcccgagaaggatagcgacgaagccgtgacatatagcctgggaaagtttgggcagagggccctggatttctacagcattcatgtgaccaaggagtccacccaccccgtgaagcccctggcccagatcgccggaaacagatacgcctccggacctgtgggaaaggccctgagcgacgcatgtatgggcacaatcgcctccttcctgtctaagtaccaggacatcatcatcgaacaccagaaggtggtgaagggcaaccagaagagactggagagcctgcgggagctggccggcaaggaaaacctggaataccctagcgtgaccctgccacctcagcctcacaccaaggagggcgttgatgcctacaacgaagtgatcgcccgggtgcgaatgtgggtgaacctgaacctgtggcagaagctgaagctaagcagagatgatgccaagcctctgctgagactgaagggattcccttcctttcctctggtcgagagacaggccaacgaagtggactggtgggacatggtgtgtaacgtgaagaagctgatcaacgagaaaaaggaggatggcaaggtgttttggcagaatctggctggctacaagagacaggaagccctgagaccatacctgagcagcgaggaagatcggaagaagggaaagaaattcgctcggtaccagctgggcgacctgctgctgcacctggaaaagaagcacggcgaggactggggaaaggtgtacgacgaggcctgggagcggattgacaagaaagtggaaggcctgagcaagcacatcaagctggaagaggaacggagaagcgaggacgcccagagcaaggccgccctgaccgactggctgcgggctaaggccagcttcgtgatcgagggcctgaaggaggccgacaaggacgagttctgcagatgcgagctgaagctgcagaagtggtacggggacctgcggggaaagcccttcgccatcgaagccgagaacagcatcctggacatcagcggcttcagcaagcagtacaactgtgccttcatctggcagaaggacggcgtgaagaagctgaacctgtacctgatcatcaactacttcaagggcggcaagctgcggttcaagaagatcaaacctgaagccttcgaagccaacagattctacaccgtgatcaacaaaaagagcggcgagatcgtgcccatggaggtgaacttcaacttcgacgaccccaacctgatcatcctgcctctggcctttggcaagagacagggcagagaattcatctggaacgacctgctgtccctggaaaccggcagcctgaagctggccaacggaagagtgatcgagaagacactgtacaacagaagaacccggcaggatgagcctgccctgttcgtggccctgaccttcgagcggcgggaggtcctggactcctccaatatcaaaccaatgaacctgatcggcgtggcaagaggcgaaaacatccccgccgtgatcgccctgaccgaccccgagggctgcccactgagccggtttaaggatagcctgggaaacccaacccacatcctgagaatcggcgagagctataaggagaagcagcggaccatccaggccaagaaggaggtggagcagcggagagccggcggctacagccggaagtacgccagcaaagccaagaatctggcagacgatatggtgagaaacaccgctagagatctgctgtactacgccgtgacccaggatgccatgctgatcttcgccaacctgagccggggcttcggccggcagggcaagcggaccttcatggccgagagacagtacacacggatggaggactggctgaccgccaagctggcctacgagggcctgagcaagacctacctgtccaagacactggcccagtacacctccaagacatgcagcaactgtgggtttaccatcaccagcgccgactacgacagggtgctggagaagctgaagaagacagcaacaggctggatgaccacaattaacggcaaggagctgaaggtggagggccagattacctactacaacagatacaagagacagaacgtagtcaaggacctgtccgtcgagctggatagactgagcgaagaatctgtgaacaacgacatctcctcctggacaaagggcagaagcggagaagctctgagcctcctgaagaaaagattctcccatagacccgtgcaggagaagttcgtgtgcctgaactgcggcttcgagacacacgcagccgagcaagccgccctgaacatcgccagatcctggctgttcctgcggagccaggagtacaagaaataccagacaaacaagacaaccggcaacaccgataagagagccttcgtcgagacctggcagtccttttaccggaagaagcttaaggaggtgtggaaacctgccgtgcggtctggcggatctggcggaggctccaccagccccaagaaaaagagaaaagtctaagctgccttctgcggggcttgccttctggccatgcccttcttctctcccttgcacctgtacctcttggtctttgaataaagcctgagtaggaaggctagcaaaaaaaaaaaaaaaaaaaaaaaaaaaaaaaaaaaaaaaaaaaaaaaaaaaaaaaaaaaaaaaaaaaaaaaaaaaaaaaagcccagccggctccccaacctctaccgaggagggcacctctgagtccgccacccccgagagcggccctggcacctccaccgagcccagcgagggcagcgcacccggcagccctgccggcagccccacctccacagaggagggaaccagcaccgagcccagcgaaggcagcgccccaggcaccagcaccgagcctagtgagcaggagattaaacggatcaacaagatcagaagaagacttgtgaaagacagcaacaccaagaaggccggcaagacaggccccatgaaaaccctgctggttagagtgatgacacccgatctgagagagcggctggaaaacctgagaaagaagcctgaaaatatcccccagcccatcagcaatacatctagagccaacctgaataagctgctgaccgattacaccgaaatgaagaaggcgatcctgcatgtgtactgggaagagttccagaaggaccctgtgggcctgatgagccgggtggcccagcctgccagcaagaagatcgatcagaacaagctgaaacctgagatggacgagaagggcaacctgaccaccgccggctttgcctgctctcagtgtggccagcccctgttcgtgtacaagctggagcaggtgtctgagaagggcaaggcttacaccaactacttcggacggtgcaatgtggccgagcacgaaaagctgatcctgctggcccagctgaagcccgagaaggatagcgacgaagccgtgacatatagcctgggaaagtttgggcagagggccctggatttctacagcattcatgtgaccaaggagtccacccaccccgtgaagcccctggcccagatcgccggaaacagatacgcctccggacctgtgggaaaggccctgagcgacgcatgtatgggcacaatcgcctccttcctgtctaagtaccaggacatcatcatcgaacaccagaaggtggtgaagggcaaccagaagagactggagagcctgcgggagctggccggcaaggaaaacctggaataccctagcgtgaccctgccacctcagcctcacaccaaggagggcgttgatgcctacaacgaagtgatcgcccgggtgcgaatgtgggtgaacctgaacctgtggcagaagctgaagctaagcagagatgatgccaagcctctgctgagactgaagggattcccttcctttcctctggtcgagagacaggccaacgaagtggactggtgggacatggtgtgtaacgtgaagaagctgatcaacgagaaaaaggaggatggcaaggtgttttggcagaatctggctggctacaagagacaggaagccctgagaccatacctgagcagcgaggaagatcggaagaagggaaagaaattcgctcggtaccagctgggcgacctgctgctgcacctggaaaagaagcacggcgaggactggggaaaggtgtacgacgaggcctgggagcggattgacaagaaagtggaaggcctgagcaagcacatcaagctggaagaggaacggagaagcgaggacgcccagagcaaggccgccctgaccgactggctgcgggctaaggccagcttcgtgatcgagggcctgaaggaggccgacaaggacgagttctgcagatgcgagctgaagctgcagaagtggtacggggacctgcggggaaagcccttcgccatcgaagccgagaacagcatcctggacatcagcggcttcagcaagcagtacaactgtgccttcatctggcagaaggacggcgtgaagaagctgaacctgtacctgatcatcaactacttcaagggcggcaagctgcggttcaagaagatcaaacctgaagccttcgaagccaacagattctacaccgtgatcaacaaaaagagcggcgagatcgtgcccatggaggtgaacttcaacttcgacgaccccaacctgatcatcctgcctctggcctttggcaagagacagggcagagaattcatctggaacgacctgctgtccctggaaaccggcagcctgaagctggccaacggaagagtgatcgagaagacactgtacaacagaagaacccggcaggatgagcctgccctgttcgtggccctgaccttcgagcggcgggaggtcctggactcctccaatatcaaaccaatgaacctgatcggcgtggcaagaggcgaaaacatccccgccgtgatcgccctgaccgaccccgagggctgcccactgagccggtttaaggatagcctgggaaacccaacccacatcctgagaatcggcgagagctataaggagaagcagcggaccatccaggccaagaaggaggtggagcagcggagagccggcggctacagccggaagtacgccagcaaagccaagaatctggcagacgatatggtgagaaacaccgctagagatctgctgtactacgccgtgacccaggatgccatgctgatcttcgccaacctgagccggggcttcggccggcagggcaagcggaccttcatggccgagagacagtacacacggatggaggactggctgaccgccaagctggcctacgagggcctgagcaagacctacctgtccaagacactggcccagtacacctccaagacatgcagcaactgtgggtttaccatcaccagcgccgactacgacagggtgctggagaagctgaagaagacagcaacaggctggatgaccacaattaacggcaaggagctgaaggtggagggccagattacctactacaacagatacaagagacagaacgtagtcaaggacctgtccgtcgagctggatagactgagcgaagaatctgtgaacaacgacatctcctcctggacaaagggcagaagcggagaagctctgagcctcctgaagaaaagattctcccatagacccgtgcaggagaagttcgtgtgcctgaactgcggcttcgagacacacgcagccgagcaagccgccctgaacatcgccagatcctggctgttcctgcggagccaggagtacaagaaataccagacaaacaagacaaccggcaacaccgataagagagccttcgtcgagacctggcagtccttttaccggaagaagcttaaggaggtgtggaaacctgccgtgcggtctggcggatctggcggaggctccaccagccccaagaaaaagagaaaagtctaagctgccttctgcggggcttgccttctggccatgcccttcttctctcccttgcacctgtacctcttggtctttgaataaagcctgagtaggaaggctagcaaaaaaaaaaaaaaaaaaaaaaaaaaaaaaaaaaaaaaaaaaaaaaaaaaaaaaaaaaaaaaaaaaaaaaaaaaaaaaaa

SEQ ID NO: 9004 - RNA, 8787 nt, synthetic construct
  source 1..8787: mol_type = other RNA
aggaaataagagagaaaagaagagtaagaagaaatataagagccaccatggcccctaagaagaagcgtaaagtgagccggatgaaccacgaccaggagttcgacccccctaaggtgtaccctcccgtccccgccgagaagagaaagcccatccgggtcctgagcctgttcgatggcatcgccaccggtctgctggtgctgaaggacctgggcatccaggtggataggtacattgcctccgaggtgtgcgaggactccatcaccgtgggaatggtgcgtcatcagggcaagatcatgtacgtgggcgacgtgcggagcgtgacacagaagcatatccaggagtggggccctttcgacctggtgatcggcggcagcccttgcaatgacctgagcatcgtgaacccagcccggaagggcctgtacgagggaaccggcagactgttcttcgagttttacagactgctgcacgacgcccggcctaaggaaggcgacgaccggcccttcttttggctgttcgagaatgtggtggccatgggagtcagcgacaagcgggatattagccggttcctggagagcaaccccgtgatgatcgatgccaaggaagtgagcgccgcccaccgggccagatacttctggggcaatctgcctggcatgaacagacccctggccagcaccgtgaacgacaagctggagctgcaggagtgcctggagcacggccggatcgccaagttcagcaaggtgagaaccatcaccacccgaagcaacagcatcaaacaaggcaaggaccagcactttcctgtgttcatgaacgagaaggaggacatcctgtggtgtaccgagatggagagagtgttcgggttcccagtccactacacagatgtcagcaacatgtctagactggccagacagagactgctgggaagaagctggtccgtccctgtgatcagacacctgttcgcccctctgaaggagtacttcgcctgcgtgagcagcggcaacagcaacgccaacagccggggccccagcttctctagcggcctggtgccactgtccctgagagggagccacatgggccccatggagatctacaaaaccgtgagcgcctggaagcggcagcctgtgcgcgtgctgagcctgtttcggaatatcgataaagtcctgaaaagcctgggattcctggagagcggctctggctccggcggtggcaccctgaagtacgtggaggatgtgacaaacgtggtcagacgggatgtggagaagtggggccccttcgatctggtgtacggcagcacccaacccctgggcagctcttgtgaccggtgccctggctggtacatgtttcagttccaccggatcctgcagtacgccctgccgagacaggagtcccagcggccattcttttggattttcatggacaacttgctgctgaccgaggatgaccaggaaactaccactcggttcctgcagaccgaagccgtgaccctgcaggacgtgagaggccgggactaccagaacgccatgcgggtgtggtccaacatccctggactgaaaagcaagcacgcacctctgacccctaaagaagaggagtacctgcaggcccaggtgcggagcagaagcaagctggacgcccctaaggtggatctgctggtgaagaattgcctcctgcccctgagagagtacttcaagtatttcagccagaatagtctgcccctgggaggcagcggcggcggcccccaggagagcgtggccttcgacgacgtggccgtgtacttcaccaagaaggagtgggccatcatggtgcccgaccagagggccctgtacagggacgtgatgctggagaactacgaggccgtggccttcgtggccgtgccccccaccagcaagcccgccctgatcagccacctggagcagggcaaggagccctgcttcacccagccccagggcgtgctgagcaggagggactggagggccggcggcggcccaagcagcggcgcccctcctcccagcggcggcaggcggcccaagcagcggcgcccctcctcccagcggcggcagcccagccggctccccaacctctaccgaggagggcacctctgagtccgccacccccgagagcggccctggcacctccaccgagcccagcgagggcagcgcacccggcagccctgccggcagccccacctccacagaggagggaaccagcaccgagcccagcgaaggcagcgccccaggcaccagcaccgagcctagtgagcaggagattaaacggatcaacaagatcagaagaagacttgtgaaagacagcaacaccaagaaggccggcaagacaggccccatgaaaaccctgctggttagagtgatgacacccgatctgagagagcggctggaaaacctgagaaagaagcctgaaaatatcccccagcccatcagcaatacatctagagccaacctgaataagctgctgaccgattacaccgaaatgaagaaggcgatcctgcatgtgtactgggaagagttccagaaggaccctgtgggcctgatgagccgggtggcccagcctgccagcaagaagatcgatcagaacaagctgaaacctgagatggacgagaagggcaacctgaccaccgccggctttgcctgctctcagtgtggccagcccctgttcgtgtacaagctggagcaggtgtctgagaagggcaaggcttacaccaactacttcggacggtgcaatgtggccgagcacgaaaagctgatcctgctggcccagctgaagcccgagaaggatagcgacgaagccgtgacatatagcctgggaaagtttgggcagagggccctggatttctacagcattcatgtgaccaaggagtccacccaccccgtgaagcccctggcccagatcgccggaaacagatacgcctccggacctgtgggaaaggccctgagcgacgcatgtatgggcacaatcgcctccttcctgtctaagtaccaggacatcatcatcgaacaccagaaggtggtgaagggcaaccagaagagactggagagcctgcgggagctggccggcaaggaaaacctggaataccctagcgtgaccctgccacctcagcctcacaccaaggagggcgttgatgcctacaacgaagtgatcgcccgggtgcgaatgtgggtgaacctgaacctgtggcagaagctgaagctaagcagagatgatgccaagcctctgctgagactgaagggattcccttcctttcctctggtcgagagacaggccaacgaagtggactggtgggacatggtgtgtaacgtgaagaagctgatcaacgagaaaaaggaggatggcaaggtgttttggcagaatctggctggctacaagagacaggaagccctgagaccatacctgagcagcgaggaagatcggaagaagggaaagaaattcgctcggtaccagctgggcgacctgctgctgcacctggaaaagaagcacggcgaggactggggaaaggtgtacgacgaggcctgggagcggattgacaagaaagtggaaggcctgagcaagcacatcaagctggaagaggaacggagaagcgaggacgcccagagcaaggccgccctgaccgactggctgcgggctaaggccagcttcgtgatcgagggcctgaaggaggccgacaaggacgagttctgcagatgcgagctgaagctgcagaagtggtacggggacctgcggggaaagcccttcgccatcgaagccgagaacagcatcctggacatcagcggcttcagcaagcagtacaactgtgccttcatctggcagaaggacggcgtgaagaagctgaacctgtacctgatcatcaactacttcaagggcggcaagctgcggttcaagaagatcaaacctgaagccttcgaagccaacagattctacaccgtgatcaacaaaaagagcggcgagatcgtgcccatggaggtgaacttcaacttcgacgaccccaacctgatcatcctgcctctggcctttggcaagagacagggcagagaattcatctggaacgacctgctgtccctggaaaccggcagcctgaagctggccaacggaagagtgatcgagaagacactgtacaacagaagaacccggcaggatgagcctgccctgttcgtggccctgaccttcgagcggcgggaggtcctggactcctccaatatcaaaccaatgaacctgatcggcgtggcaagaggcgaaaacatccccgccgtgatcgccctgaccgaccccgagggctgcccactgagccggtttaaggatagcctgggaaacccaacccacatcctgagaatcggcgagagctataaggagaagcagcggaccatccaggccaagaaggaggtggagcagcggagagccggcggctacagccggaagtacgccagcaaagccaagaatctggcagacgatatggtgagaaacaccgctagagatctgctgtactacgccgtgacccaggatgccatgctgatcttcgccaacctgagccggggcttcggccggcagggcaagcggaccttcatggccgagagacagtacacacggatggaggactggctgaccgccaagctggcctacgagggcctgagcaagacctacctgtccaagacactggcccagtacacctccaagacatgcagcaactgtgggtttaccatcaccagcgccgactacgacagggtgctggagaagctgaagaagacagcaacaggctggatgaccacaattaacggcaaggagctgaaggtggagggccagattacctactacaacagatacaagagacagaacgtagtcaaggacctgtccgtcgagctggatagactgagcgaagaatctgtgaacaacgacatctcctcctggacaaagggcagaagcggagaagctctgagcctcctgaagaaaagattctcccatagacccgtgcaggagaagttcgtgtgcctgaactgcggcttcgagacacacgcagccgagcaagccgccctgaacatcgccagatcctggctgttcctgcggagccaggagtacaagaaataccagacaaacaagacaaccggcaacaccgataagagagccttcgtcgagacctggcagtccttttaccggaagaagcttaaggaggtgtggaaacctgccgtgcggtctggcggatctggcggaggctccaccagccccaagaaaaagagaaaagtctaagctgccttctgcggggcttgccttctggccatgcccttcttctctcccttgcacctgtacctcttggtctttgaataaagcctgagtaggaaggctagcaaaaaaaaaaaaaaaaaaaaaaaaaaaaaaaaaaaaaaaaaaaaaaaaaaaaaaaaaaaaaaaaaaaaaaaaaaaaaaaagcccagccggctccccaacctctaccgaggagggcacctctgagtccgccacccccgagagcggccctggcacctccaccgagcccagcgagggcagcgcacccggcagccctgccggcagccccacctccacagaggagggaaccagcaccgagcccagcgaaggcagcgccccaggcaccagcaccgagcctagtgagcaggagattaaacggatcaacaagatcagaagaagacttgtgaaagacagcaacaccaagaaggccggcaagacaggccccatgaaaaccctgctggttagagtgatgacacccgatctgagagagcggctggaaaacctgagaaagaagcctgaaaatatcccccagcccatcagcaatacatctagagccaacctgaataagctgctgaccgattacaccgaaatgaagaaggcgatcctgcatgtgtactgggaagagttccagaaggaccctgtgggcctgatgagccgggtggcccagcctgccagcaagaagatcgatcagaacaagctgaaacctgagatggacgagaagggcaacctgaccaccgccggctttgcctgctctcagtgtggccagcccctgttcgtgtacaagctggagcaggtgtctgagaagggcaaggcttacaccaactacttcggacggtgcaatgtggccgagcacgaaaagctgatcctgctggcccagctgaagcccgagaaggatagcgacgaagccgtgacatatagcctgggaaagtttgggcagagggccctggatttctacagcattcatgtgaccaaggagtccacccaccccgtgaagcccctggcccagatcgccggaaacagatacgcctccggacctgtgggaaaggccctgagcgacgcatgtatgggcacaatcgcctccttcctgtctaagtaccaggacatcatcatcgaacaccagaaggtggtgaagggcaaccagaagagactggagagcctgcgggagctggccggcaaggaaaacctggaataccctagcgtgaccctgccacctcagcctcacaccaaggagggcgttgatgcctacaacgaagtgatcgcccgggtgcgaatgtgggtgaacctgaacctgtggcagaagctgaagctaagcagagatgatgccaagcctctgctgagactgaagggattcccttcctttcctctggtcgagagacaggccaacgaagtggactggtgggacatggtgtgtaacgtgaagaagctgatcaacgagaaaaaggaggatggcaaggtgttttggcagaatctggctggctacaagagacaggaagccctgagaccatacctgagcagcgaggaagatcggaagaagggaaagaaattcgctcggtaccagctgggcgacctgctgctgcacctggaaaagaagcacggcgaggactggggaaaggtgtacgacgaggcctgggagcggattgacaagaaagtggaaggcctgagcaagcacatcaagctggaagaggaacggagaagcgaggacgcccagagcaaggccgccctgaccgactggctgcgggctaaggccagcttcgtgatcgagggcctgaaggaggccgacaaggacgagttctgcagatgcgagctgaagctgcagaagtggtacggggacctgcggggaaagcccttcgccatcgaagccgagaacagcatcctggacatcagcggcttcagcaagcagtacaactgtgccttcatctggcagaaggacggcgtgaagaagctgaacctgtacctgatcatcaactacttcaagggcggcaagctgcggttcaagaagatcaaacctgaagccttcgaagccaacagattctacaccgtgatcaacaaaaagagcggcgagatcgtgcccatggaggtgaacttcaacttcgacgaccccaacctgatcatcctgcctctggcctttggcaagagacagggcagagaattcatctggaacgacctgctgtccctggaaaccggcagcctgaagctggccaacggaagagtgatcgagaagacactgtacaacagaagaacccggcaggatgagcctgccctgttcgtggccctgaccttcgagcggcgggaggtcctggactcctccaatatcaaaccaatgaacctgatcggcgtggcaagaggcgaaaacatccccgccgtgatcgccctgaccgaccccgagggctgcccactgagccggtttaaggatagcctgggaaacccaacccacatcctgagaatcggcgagagctataaggagaagcagcggaccatccaggccaagaaggaggtggagcagcggagagccggcggctacagccggaagtacgccagcaaagccaagaatctggcagacgatatggtgagaaacaccgctagagatctgctgtactacgccgtgacccaggatgccatgctgatcttcgccaacctgagccggggcttcggccggcagggcaagcggaccttcatggccgagagacagtacacacggatggaggactggctgaccgccaagctggcctacgagggcctgagcaagacctacctgtccaagacactggcccagtacacctccaagacatgcagcaactgtgggtttaccatcaccagcgccgactacgacagggtgctggagaagctgaagaagacagcaacaggctggatgaccacaattaacggcaaggagctgaaggtggagggccagattacctactacaacagatacaagagacagaacgtagtcaaggacctgtccgtcgagctggatagactgagcgaagaatctgtgaacaacgacatctcctcctggacaaagggcagaagcggagaagctctgagcctcctgaagaaaagattctcccatagacccgtgcaggagaagttcgtgtgcctgaactgcggcttcgagacacacgcagccgagcaagccgccctgaacatcgccagatcctggctgttcctgcggagccaggagtacaagaaataccagacaaacaagacaaccggcaacaccgataagagagccttcgtcgagacctggcagtccttttaccggaagaagcttaaggaggtgtggaaacctgccgtgcggtctggcggatctggcggaggctccaccagccccaagaaaaagagaaaagtctaagctgccttctgcggggcttgccttctggccatgcccttcttctctcccttgcacctgtacctcttggtctttgaataaagcctgagtaggaaggctagcaaaaaaaaaaaaaaaaaaaaaaaaaaaaaaaaaaaaaaaaaaaaaaaaaaaaaaaaaaaaaaaaaaaaaaaaaaaaaaaa

SEQ ID NO: 9005 - RNA, 8787 nt, synthetic construct
  source 1..8787: mol_type = other RNA
aggaaataagagagaaaagaagagtaagaagaaatataagagccaccatggcccctaagaagaagcgtaaagtgagccggatgaaccacgaccaggagttcgacccccctaaggtgtaccctcccgtccccgccgagaagagaaagcccatccgggtcctgagcctgttcgatggcatcgccaccggtctgctggtgctgaaggacctgggcatccaggtggataggtacattgcctccgaggtgtgcgaggactccatcaccgtgggaatggtgcgtcatcagggcaagatcatgtacgtgggcgacgtgcggagcgtgacacagaagcatatccaggagtggggccctttcgacctggtgatcggcggcagcccttgcaatgacctgagcatcgtgaacccagcccggaagggcctgtacgagggaaccggcagactgttcttcgagttttacagactgctgcacgacgcccggcctaaggaaggcgacgaccggcccttcttttggctgttcgagaatgtggtggccatgggagtcagcgacaagcgggatattagccggttcctggagagcaaccccgtgatgatcgatgccaaggaagtgagcgccgcccaccgggccagatacttctggggcaatctgcctggcatgaacagacccctggccagcaccgtgaacgacaagctggagctgcaggagtgcctggagcacggccggatcgccaagttcagcaaggtgagaaccatcaccacccgaagcaacagcatcaaacaaggcaaggaccagcactttcctgtgttcatgaacgagaaggaggacatcctgtggtgtaccgagatggagagagtgttcgggttcccagtccactacacagatgtcagcaacatgtctagactggccagacagagactgctgggaagaagctggtccgtccctgtgatcagacacctgttcgcccctctgaaggagtacttcgcctgcgtgagcagcggcaacagcaacgccaacagccggggccccagcttctctagcggcctggtgccactgtccctgagagggagccacatgggccccatggagatctacaaaaccgtgagcgcctggaagcggcagcctgtgcgcgtgctgagcctgtttcggaatatcgataaagtcctgaaaagcctgggattcctggagagcggctctggctccggcggtggcaccctgaagtacgtggaggatgtgacaaacgtggtcagacgggatgtggagaagtggggccccttcgatctggtgtacggcagcacccaacccctgggcagctcttgtgaccggtgccctggctggtacatgtttcagttccaccggatcctgcagtacgccctgccgagacaggagtcccagcggccattcttttggattttcatggacaacttgctgctgaccgaggatgaccaggaaactaccactcggttcctgcagaccgaagccgtgaccctgcaggacgtgagaggccgggactaccagaacgccatgcgggtgtggtccaacatccctggactgaaaagcaagcacgcacctctgacccctaaagaagaggagtacctgcaggcccaggtgcggagcagaagcaagctggacgcccctaaggtggatctgctggtgaagaattgcctcctgcccctgagagagtacttcaagtatttcagccagaatagtctgcccctgggaggcagcggcggcggcgagcccggccccgtgaccttcggcgacgtggccgtgtacttcagcagggaggagtggggctgcctgaggcccgcccagagggccctgtacagggacgtgatgagggagacctacagccacctgggcgccctgggcgtggagggcagcaagcccgccctgatcagctgggtggaggaggaggccgagctgtggggccccgccgcccaggaccccgaggtggccaagaggcccaccgaggccgacggcggcccaagcagcggcgcccctcctcccagcggcggcaggcggcccaagcagcggcgcccctcctcccagcggcggcagcccagccggctccccaacctctaccgaggagggcacctctgagtccgccacccccgagagcggccctggcacctccaccgagcccagcgagggcagcgcacccggcagccctgccggcagccccacctccacagaggagggaaccagcaccgagcccagcgaaggcagcgccccaggcaccagcaccgagcctagtgagcaggagattaaacggatcaacaagatcagaagaagacttgtgaaagacagcaacaccaagaaggccggcaagacaggccccatgaaaaccctgctggttagagtgatgacacccgatctgagagagcggctggaaaacctgagaaagaagcctgaaaatatcccccagcccatcagcaatacatctagagccaacctgaataagctgctgaccgattacaccgaaatgaagaaggcgatcctgcatgtgtactgggaagagttccagaaggaccctgtgggcctgatgagccgggtggcccagcctgccagcaagaagatcgatcagaacaagctgaaacctgagatggacgagaagggcaacctgaccaccgccggctttgcctgctctcagtgtggccagcccctgttcgtgtacaagctggagcaggtgtctgagaagggcaaggcttacaccaactacttcggacggtgcaatgtggccgagcacgaaaagctgatcctgctggcccagctgaagcccgagaaggatagcgacgaagccgtgacatatagcctgggaaagtttgggcagagggccctggatttctacagcattcatgtgaccaaggagtccacccaccccgtgaagcccctggcccagatcgccggaaacagatacgcctccggacctgtgggaaaggccctgagcgacgcatgtatgggcacaatcgcctccttcctgtctaagtaccaggacatcatcatcgaacaccagaaggtggtgaagggcaaccagaagagactggagagcctgcgggagctggccggcaaggaaaacctggaataccctagcgtgaccctgccacctcagcctcacaccaaggagggcgttgatgcctacaacgaagtgatcgcccgggtgcgaatgtgggtgaacctgaacctgtggcagaagctgaagctaagcagagatgatgccaagcctctgctgagactgaagggattcccttcctttcctctggtcgagagacaggccaacgaagtggactggtgggacatggtgtgtaacgtgaagaagctgatcaacgagaaaaaggaggatggcaaggtgttttggcagaatctggctggctacaagagacaggaagccctgagaccatacctgagcagcgaggaagatcggaagaagggaaagaaattcgctcggtaccagctgggcgacctgctgctgcacctggaaaagaagcacggcgaggactggggaaaggtgtacgacgaggcctgggagcggattgacaagaaagtggaaggcctgagcaagcacatcaagctggaagaggaacggagaagcgaggacgcccagagcaaggccgccctgaccgactggctgcgggctaaggccagcttcgtgatcgagggcctgaaggaggccgacaaggacgagttctgcagatgcgagctgaagctgcagaagtggtacggggacctgcggggaaagcccttcgccatcgaagccgagaacagcatcctggacatcagcggcttcagcaagcagtacaactgtgccttcatctggcagaaggacggcgtgaagaagctgaacctgtacctgatcatcaactacttcaagggcggcaagctgcggttcaagaagatcaaacctgaagccttcgaagccaacagattctacaccgtgatcaacaaaaagagcggcgagatcgtgcccatggaggtgaacttcaacttcgacgaccccaacctgatcatcctgcctctggcctttggcaagagacagggcagagaattcatctggaacgacctgctgtccctggaaaccggcagcctgaagctggccaacggaagagtgatcgagaagacactgtacaacagaagaacccggcaggatgagcctgccctgttcgtggccctgaccttcgagcggcgggaggtcctggactcctccaatatcaaaccaatgaacctgatcggcgtggcaagaggcgaaaacatccccgccgtgatcgccctgaccgaccccgagggctgcccactgagccggtttaaggatagcctgggaaacccaacccacatcctgagaatcggcgagagctataaggagaagcagcggaccatccaggccaagaaggaggtggagcagcggagagccggcggctacagccggaagtacgccagcaaagccaagaatctggcagacgatatggtgagaaacaccgctagagatctgctgtactacgccgtgacccaggatgccatgctgatcttcgccaacctgagccggggcttcggccggcagggcaagcggaccttcatggccgagagacagtacacacggatggaggactggctgaccgccaagctggcctacgagggcctgagcaagacctacctgtccaagacactggcccagtacacctccaagacatgcagcaactgtgggtttaccatcaccagcgccgactacgacagggtgctggagaagctgaagaagacagcaacaggctggatgaccacaattaacggcaaggagctgaaggtggagggccagattacctactacaacagatacaagagacagaacgtagtcaaggacctgtccgtcgagctggatagactgagcgaagaatctgtgaacaacgacatctcctcctggacaaagggcagaagcggagaagctctgagcctcctgaagaaaagattctcccatagacccgtgcaggagaagttcgtgtgcctgaactgcggcttcgagacacacgcagccgagcaagccgccctgaacatcgccagatcctggctgttcctgcggagccaggagtacaagaaataccagacaaacaagacaaccggcaacaccgataagagagccttcgtcgagacctggcagtccttttaccggaagaagcttaaggaggtgtggaaacctgccgtgcggtctggcggatctggcggaggctccaccagccccaagaaaaagagaaaagtctaagctgccttctgcggggcttgccttctggccatgcccttcttctctcccttgcacctgtacctcttggtctttgaataaagcctgagtaggaaggctagcaaaaaaaaaaaaaaaaaaaaaaaaaaaaaaaaaaaaaaaaaaaaaaaaaaaaaaaaaaaaaaaaaaaaaaaaaaaaaaaagcccagccggctccccaacctctaccgaggagggcacctctgagtccgccacccccgagagcggccctggcacctccaccgagcccagcgagggcagcgcacccggcagccctgccggcagccccacctccacagaggagggaaccagcaccgagcccagcgaaggcagcgccccaggcaccagcaccgagcctagtgagcaggagattaaacggatcaacaagatcagaagaagacttgtgaaagacagcaacaccaagaaggccggcaagacaggccccatgaaaaccctgctggttagagtgatgacacccgatctgagagagcggctggaaaacctgagaaagaagcctgaaaatatcccccagcccatcagcaatacatctagagccaacctgaataagctgctgaccgattacaccgaaatgaagaaggcgatcctgcatgtgtactgggaagagttccagaaggaccctgtgggcctgatgagccgggtggcccagcctgccagcaagaagatcgatcagaacaagctgaaacctgagatggacgagaagggcaacctgaccaccgccggctttgcctgctctcagtgtggccagcccctgttcgtgtacaagctggagcaggtgtctgagaagggcaaggcttacaccaactacttcggacggtgcaatgtggccgagcacgaaaagctgatcctgctggcccagctgaagcccgagaaggatagcgacgaagccgtgacatatagcctgggaaagtttgggcagagggccctggatttctacagcattcatgtgaccaaggagtccacccaccccgtgaagcccctggcccagatcgccggaaacagatacgcctccggacctgtgggaaaggccctgagcgacgcatgtatgggcacaatcgcctccttcctgtctaagtaccaggacatcatcatcgaacaccagaaggtggtgaagggcaaccagaagagactggagagcctgcgggagctggccggcaaggaaaacctggaataccctagcgtgaccctgccacctcagcctcacaccaaggagggcgttgatgcctacaacgaagtgatcgcccgggtgcgaatgtgggtgaacctgaacctgtggcagaagctgaagctaagcagagatgatgccaagcctctgctgagactgaagggattcccttcctttcctctggtcgagagacaggccaacgaagtggactggtgggacatggtgtgtaacgtgaagaagctgatcaacgagaaaaaggaggatggcaaggtgttttggcagaatctggctggctacaagagacaggaagccctgagaccatacctgagcagcgaggaagatcggaagaagggaaagaaattcgctcggtaccagctgggcgacctgctgctgcacctggaaaagaagcacggcgaggactggggaaaggtgtacgacgaggcctgggagcggattgacaagaaagtggaaggcctgagcaagcacatcaagctggaagaggaacggagaagcgaggacgcccagagcaaggccgccctgaccgactggctgcgggctaaggccagcttcgtgatcgagggcctgaaggaggccgacaaggacgagttctgcagatgcgagctgaagctgcagaagtggtacggggacctgcggggaaagcccttcgccatcgaagccgagaacagcatcctggacatcagcggcttcagcaagcagtacaactgtgccttcatctggcagaaggacggcgtgaagaagctgaacctgtacctgatcatcaactacttcaagggcggcaagctgcggttcaagaagatcaaacctgaagccttcgaagccaacagattctacaccgtgatcaacaaaaagagcggcgagatcgtgcccatggaggtgaacttcaacttcgacgaccccaacctgatcatcctgcctctggcctttggcaagagacagggcagagaattcatctggaacgacctgctgtccctggaaaccggcagcctgaagctggccaacggaagagtgatcgagaagacactgtacaacagaagaacccggcaggatgagcctgccctgttcgtggccctgaccttcgagcggcgggaggtcctggactcctccaatatcaaaccaatgaacctgatcggcgtggcaagaggcgaaaacatccccgccgtgatcgccctgaccgaccccgagggctgcccactgagccggtttaaggatagcctgggaaacccaacccacatcctgagaatcggcgagagctataaggagaagcagcggaccatccaggccaagaaggaggtggagcagcggagagccggcggctacagccggaagtacgccagcaaagccaagaatctggcagacgatatggtgagaaacaccgctagagatctgctgtactacgccgtgacccaggatgccatgctgatcttcgccaacctgagccggggcttcggccggcagggcaagcggaccttcatggccgagagacagtacacacggatggaggactggctgaccgccaagctggcctacgagggcctgagcaagacctacctgtccaagacactggcccagtacacctccaagacatgcagcaactgtgggtttaccatcaccagcgccgactacgacagggtgctggagaagctgaagaagacagcaacaggctggatgaccacaattaacggcaaggagctgaaggtggagggccagattacctactacaacagatacaagagacagaacgtagtcaaggacctgtccgtcgagctggatagactgagcgaagaatctgtgaacaacgacatctcctcctggacaaagggcagaagcggagaagctctgagcctcctgaagaaaagattctcccatagacccgtgcaggagaagttcgtgtgcctgaactgcggcttcgagacacacgcagccgagcaagccgccctgaacatcgccagatcctggctgttcctgcggagccaggagtacaagaaataccagacaaacaagacaaccggcaacaccgataagagagccttcgtcgagacctggcagtccttttaccggaagaagcttaaggaggtgtggaaacctgccgtgcggtctggcggatctggcggaggctccaccagccccaagaaaaagagaaaagtctaagctgccttctgcggggcttgccttctggccatgcccttcttctctcccttgcacctgtacctcttggtctttgaataaagcctgagtaggaaggctagcaaaaaaaaaaaaaaaaaaaaaaaaaaaaaaaaaaaaaaaaaaaaaaaaaaaaaaaaaaaaaaaaaaaaaaaaaaaaaaaa

SEQ ID NO: 9006 - RNA, 8787 nt, synthetic construct
  source 1..8787: mol_type = other RNA
aggaaataagagagaaaagaagagtaagaagaaatataagagccaccatggcccctaagaagaagcgtaaagtgagccggatgaaccacgaccaggagttcgacccccctaaggtgtaccctcccgtccccgccgagaagagaaagcccatccgggtcctgagcctgttcgatggcatcgccaccggtctgctggtgctgaaggacctgggcatccaggtggataggtacattgcctccgaggtgtgcgaggactccatcaccgtgggaatggtgcgtcatcagggcaagatcatgtacgtgggcgacgtgcggagcgtgacacagaagcatatccaggagtggggccctttcgacctggtgatcggcggcagcccttgcaatgacctgagcatcgtgaacccagcccggaagggcctgtacgagggaaccggcagactgttcttcgagttttacagactgctgcacgacgcccggcctaaggaaggcgacgaccggcccttcttttggctgttcgagaatgtggtggccatgggagtcagcgacaagcgggatattagccggttcctggagagcaaccccgtgatgatcgatgccaaggaagtgagcgccgcccaccgggccagatacttctggggcaatctgcctggcatgaacagacccctggccagcaccgtgaacgacaagctggagctgcaggagtgcctggagcacggccggatcgccaagttcagcaaggtgagaaccatcaccacccgaagcaacagcatcaaacaaggcaaggaccagcactttcctgtgttcatgaacgagaaggaggacatcctgtggtgtaccgagatggagagagtgttcgggttcccagtccactacacagatgtcagcaacatgtctagactggccagacagagactgctgggaagaagctggtccgtccctgtgatcagacacctgttcgcccctctgaaggagtacttcgcctgcgtgagcagcggcaacagcaacgccaacagccggggccccagcttctctagcggcctggtgccactgtccctgagagggagccacatgggccccatggagatctacaaaaccgtgagcgcctggaagcggcagcctgtgcgcgtgctgagcctgtttcggaatatcgataaagtcctgaaaagcctgggattcctggagagcggctctggctccggcggtggcaccctgaagtacgtggaggatgtgacaaacgtggtcagacgggatgtggagaagtggggccccttcgatctggtgtacggcagcacccaacccctgggcagctcttgtgaccggtgccctggctggtacatgtttcagttccaccggatcctgcagtacgccctgccgagacaggagtcccagcggccattcttttggattttcatggacaacttgctgctgaccgaggatgaccaggaaactaccactcggttcctgcagaccgaagccgtgaccctgcaggacgtgagaggccgggactaccagaacgccatgcgggtgtggtccaacatccctggactgaaaagcaagcacgcacctctgacccctaaagaagaggagtacctgcaggcccaggtgcggagcagaagcaagctggacgcccctaaggtggatctgctggtgaagaattgcctcctgcccctgagagagtacttcaagtatttcagccagaatagtctgcccctgggaggcagcggcggcggcttccaggagagcgtgaccttccaggacgtggccgtggacttcacctgggaggagtggggccacctgggccccgcccagaaggagctgtacagggaggtgatgctggagaactacaggaacctggtgtgcctgggcctggaggtgagcaagcccgacgtggtgtgccagctggagaggggcgaggccccctggatgcccgagggcgccgtgcccaggagctgcagccagaactggggcgccaggggcggcccaagcagcggcgcccctcctcccagcggcggcaggcggcccaagcagcggcgcccctcctcccagcggcggcagcccagccggctccccaacctctaccgaggagggcacctctgagtccgccacccccgagagcggccctggcacctccaccgagcccagcgagggcagcgcacccggcagccctgccggcagccccacctccacagaggagggaaccagcaccgagcccagcgaaggcagcgccccaggcaccagcaccgagcctagtgagcaggagattaaacggatcaacaagatcagaagaagacttgtgaaagacagcaacaccaagaaggccggcaagacaggccccatgaaaaccctgctggttagagtgatgacacccgatctgagagagcggctggaaaacctgagaaagaagcctgaaaatatcccccagcccatcagcaatacatctagagccaacctgaataagctgctgaccgattacaccgaaatgaagaaggcgatcctgcatgtgtactgggaagagttccagaaggaccctgtgggcctgatgagccgggtggcccagcctgccagcaagaagatcgatcagaacaagctgaaacctgagatggacgagaagggcaacctgaccaccgccggctttgcctgctctcagtgtggccagcccctgttcgtgtacaagctggagcaggtgtctgagaagggcaaggcttacaccaactacttcggacggtgcaatgtggccgagcacgaaaagctgatcctgctggcccagctgaagcccgagaaggatagcgacgaagccgtgacatatagcctgggaaagtttgggcagagggccctggatttctacagcattcatgtgaccaaggagtccacccaccccgtgaagcccctggcccagatcgccggaaacagatacgcctccggacctgtgggaaaggccctgagcgacgcatgtatgggcacaatcgcctccttcctgtctaagtaccaggacatcatcatcgaacaccagaaggtggtgaagggcaaccagaagagactggagagcctgcgggagctggccggcaaggaaaacctggaataccctagcgtgaccctgccacctcagcctcacaccaaggagggcgttgatgcctacaacgaagtgatcgcccgggtgcgaatgtgggtgaacctgaacctgtggcagaagctgaagctaagcagagatgatgccaagcctctgctgagactgaagggattcccttcctttcctctggtcgagagacaggccaacgaagtggactggtgggacatggtgtgtaacgtgaagaagctgatcaacgagaaaaaggaggatggcaaggtgttttggcagaatctggctggctacaagagacaggaagccctgagaccatacctgagcagcgaggaagatcggaagaagggaaagaaattcgctcggtaccagctgggcgacctgctgctgcacctggaaaagaagcacggcgaggactggggaaaggtgtacgacgaggcctgggagcggattgacaagaaagtggaaggcctgagcaagcacatcaagctggaagaggaacggagaagcgaggacgcccagagcaaggccgccctgaccgactggctgcgggctaaggccagcttcgtgatcgagggcctgaaggaggccgacaaggacgagttctgcagatgcgagctgaagctgcagaagtggtacggggacctgcggggaaagcccttcgccatcgaagccgagaacagcatcctggacatcagcggcttcagcaagcagtacaactgtgccttcatctggcagaaggacggcgtgaagaagctgaacctgtacctgatcatcaactacttcaagggcggcaagctgcggttcaagaagatcaaacctgaagccttcgaagccaacagattctacaccgtgatcaacaaaaagagcggcgagatcgtgcccatggaggtgaacttcaacttcgacgaccccaacctgatcatcctgcctctggcctttggcaagagacagggcagagaattcatctggaacgacctgctgtccctggaaaccggcagcctgaagctggccaacggaagagtgatcgagaagacactgtacaacagaagaacccggcaggatgagcctgccctgttcgtggccctgaccttcgagcggcgggaggtcctggactcctccaatatcaaaccaatgaacctgatcggcgtggcaagaggcgaaaacatccccgccgtgatcgccctgaccgaccccgagggctgcccactgagccggtttaaggatagcctgggaaacccaacccacatcctgagaatcggcgagagctataaggagaagcagcggaccatccaggccaagaaggaggtggagcagcggagagccggcggctacagccggaagtacgccagcaaagccaagaatctggcagacgatatggtgagaaacaccgctagagatctgctgtactacgccgtgacccaggatgccatgctgatcttcgccaacctgagccggggcttcggccggcagggcaagcggaccttcatggccgagagacagtacacacggatggaggactggctgaccgccaagctggcctacgagggcctgagcaagacctacctgtccaagacactggcccagtacacctccaagacatgcagcaactgtgggtttaccatcaccagcgccgactacgacagggtgctggagaagctgaagaagacagcaacaggctggatgaccacaattaacggcaaggagctgaaggtggagggccagattacctactacaacagatacaagagacagaacgtagtcaaggacctgtccgtcgagctggatagactgagcgaagaatctgtgaacaacgacatctcctcctggacaaagggcagaagcggagaagctctgagcctcctgaagaaaagattctcccatagacccgtgcaggagaagttcgtgtgcctgaactgcggcttcgagacacacgcagccgagcaagccgccctgaacatcgccagatcctggctgttcctgcggagccaggagtacaagaaataccagacaaacaagacaaccggcaacaccgataagagagccttcgtcgagacctggcagtccttttaccggaagaagcttaaggaggtgtggaaacctgccgtgcggtctggcggatctggcggaggctccaccagccccaagaaaaagagaaaagtctaagctgccttctgcggggcttgccttctggccatgcccttcttctctcccttgcacctgtacctcttggtctttgaataaagcctgagtaggaaggctagcaaaaaaaaaaaaaaaaaaaaaaaaaaaaaaaaaaaaaaaaaaaaaaaaaaaaaaaaaaaaaaaaaaaaaaaaaaaaaaaagcccagccggctccccaacctctaccgaggagggcacctctgagtccgccacccccgagagcggccctggcacctccaccgagcccagcgagggcagcgcacccggcagccctgccggcagccccacctccacagaggagggaaccagcaccgagcccagcgaaggcagcgccccaggcaccagcaccgagcctagtgagcaggagattaaacggatcaacaagatcagaagaagacttgtgaaagacagcaacaccaagaaggccggcaagacaggccccatgaaaaccctgctggttagagtgatgacacccgatctgagagagcggctggaaaacctgagaaagaagcctgaaaatatcccccagcccatcagcaatacatctagagccaacctgaataagctgctgaccgattacaccgaaatgaagaaggcgatcctgcatgtgtactgggaagagttccagaaggaccctgtgggcctgatgagccgggtggcccagcctgccagcaagaagatcgatcagaacaagctgaaacctgagatggacgagaagggcaacctgaccaccgccggctttgcctgctctcagtgtggccagcccctgttcgtgtacaagctggagcaggtgtctgagaagggcaaggcttacaccaactacttcggacggtgcaatgtggccgagcacgaaaagctgatcctgctggcccagctgaagcccgagaaggatagcgacgaagccgtgacatatagcctgggaaagtttgggcagagggccctggatttctacagcattcatgtgaccaaggagtccacccaccccgtgaagcccctggcccagatcgccggaaacagatacgcctccggacctgtgggaaaggccctgagcgacgcatgtatgggcacaatcgcctccttcctgtctaagtaccaggacatcatcatcgaacaccagaaggtggtgaagggcaaccagaagagactggagagcctgcgggagctggccggcaaggaaaacctggaataccctagcgtgaccctgccacctcagcctcacaccaaggagggcgttgatgcctacaacgaagtgatcgcccgggtgcgaatgtgggtgaacctgaacctgtggcagaagctgaagctaagcagagatgatgccaagcctctgctgagactgaagggattcccttcctttcctctggtcgagagacaggccaacgaagtggactggtgggacatggtgtgtaacgtgaagaagctgatcaacgagaaaaaggaggatggcaaggtgttttggcagaatctggctggctacaagagacaggaagccctgagaccatacctgagcagcgaggaagatcggaagaagggaaagaaattcgctcggtaccagctgggcgacctgctgctgcacctggaaaagaagcacggcgaggactggggaaaggtgtacgacgaggcctgggagcggattgacaagaaagtggaaggcctgagcaagcacatcaagctggaagaggaacggagaagcgaggacgcccagagcaaggccgccctgaccgactggctgcgggctaaggccagcttcgtgatcgagggcctgaaggaggccgacaaggacgagttctgcagatgcgagctgaagctgcagaagtggtacggggacctgcggggaaagcccttcgccatcgaagccgagaacagcatcctggacatcagcggcttcagcaagcagtacaactgtgccttcatctggcagaaggacggcgtgaagaagctgaacctgtacctgatcatcaactacttcaagggcggcaagctgcggttcaagaagatcaaacctgaagccttcgaagccaacagattctacaccgtgatcaacaaaaagagcggcgagatcgtgcccatggaggtgaacttcaacttcgacgaccccaacctgatcatcctgcctctggcctttggcaagagacagggcagagaattcatctggaacgacctgctgtccctggaaaccggcagcctgaagctggccaacggaagagtgatcgagaagacactgtacaacagaagaacccggcaggatgagcctgccctgttcgtggccctgaccttcgagcggcgggaggtcctggactcctccaatatcaaaccaatgaacctgatcggcgtggcaagaggcgaaaacatccccgccgtgatcgccctgaccgaccccgagggctgcccactgagccggtttaaggatagcctgggaaacccaacccacatcctgagaatcggcgagagctataaggagaagcagcggaccatccaggccaagaaggaggtggagcagcggagagccggcggctacagccggaagtacgccagcaaagccaagaatctggcagacgatatggtgagaaacaccgctagagatctgctgtactacgccgtgacccaggatgccatgctgatcttcgccaacctgagccggggcttcggccggcagggcaagcggaccttcatggccgagagacagtacacacggatggaggactggctgaccgccaagctggcctacgagggcctgagcaagacctacctgtccaagacactggcccagtacacctccaagacatgcagcaactgtgggtttaccatcaccagcgccgactacgacagggtgctggagaagctgaagaagacagcaacaggctggatgaccacaattaacggcaaggagctgaaggtggagggccagattacctactacaacagatacaagagacagaacgtagtcaaggacctgtccgtcgagctggatagactgagcgaagaatctgtgaacaacgacatctcctcctggacaaagggcagaagcggagaagctctgagcctcctgaagaaaagattctcccatagacccgtgcaggagaagttcgtgtgcctgaactgcggcttcgagacacacgcagccgagcaagccgccctgaacatcgccagatcctggctgttcctgcggagccaggagtacaagaaataccagacaaacaagacaaccggcaacaccgataagagagccttcgtcgagacctggcagtccttttaccggaagaagcttaaggaggtgtggaaacctgccgtgcggtctggcggatctggcggaggctccaccagccccaagaaaaagagaaaagtctaagctgccttctgcggggcttgccttctggccatgcccttcttctctcccttgcacctgtacctcttggtctttgaataaagcctgagtaggaaggctagcaaaaaaaaaaaaaaaaaaaaaaaaaaaaaaaaaaaaaaaaaaaaaaaaaaaaaaaaaaaaaaaaaaaaaaaaaaaaaaaa

SEQ ID NO: 9007 - RNA, 8787 nt, synthetic construct
  source 1..8787: mol_type = other RNA
aggaaataagagagaaaagaagagtaagaagaaatataagagccaccatggcccctaagaagaagcgtaaagtgagccggatgaaccacgaccaggagttcgacccccctaaggtgtaccctcccgtccccgccgagaagagaaagcccatccgggtcctgagcctgttcgatggcatcgccaccggtctgctggtgctgaaggacctgggcatccaggtggataggtacattgcctccgaggtgtgcgaggactccatcaccgtgggaatggtgcgtcatcagggcaagatcatgtacgtgggcgacgtgcggagcgtgacacagaagcatatccaggagtggggccctttcgacctggtgatcggcggcagcccttgcaatgacctgagcatcgtgaacccagcccggaagggcctgtacgagggaaccggcagactgttcttcgagttttacagactgctgcacgacgcccggcctaaggaaggcgacgaccggcccttcttttggctgttcgagaatgtggtggccatgggagtcagcgacaagcgggatattagccggttcctggagagcaaccccgtgatgatcgatgccaaggaagtgagcgccgcccaccgggccagatacttctggggcaatctgcctggcatgaacagacccctggccagcaccgtgaacgacaagctggagctgcaggagtgcctggagcacggccggatcgccaagttcagcaaggtgagaaccatcaccacccgaagcaacagcatcaaacaaggcaaggaccagcactttcctgtgttcatgaacgagaaggaggacatcctgtggtgtaccgagatggagagagtgttcgggttcccagtccactacacagatgtcagcaacatgtctagactggccagacagagactgctgggaagaagctggtccgtccctgtgatcagacacctgttcgcccctctgaaggagtacttcgcctgcgtgagcagcggcaacagcaacgccaacagccggggccccagcttctctagcggcctggtgccactgtccctgagagggagccacatgggccccatggagatctacaaaaccgtgagcgcctggaagcggcagcctgtgcgcgtgctgagcctgtttcggaatatcgataaagtcctgaaaagcctgggattcctggagagcggctctggctccggcggtggcaccctgaagtacgtggaggatgtgacaaacgtggtcagacgggatgtggagaagtggggccccttcgatctggtgtacggcagcacccaacccctgggcagctcttgtgaccggtgccctggctggtacatgtttcagttccaccggatcctgcagtacgccctgccgagacaggagtcccagcggccattcttttggattttcatggacaacttgctgctgaccgaggatgaccaggaaactaccactcggttcctgcagaccgaagccgtgaccctgcaggacgtgagaggccgggactaccagaacgccatgcgggtgtggtccaacatccctggactgaaaagcaagcacgcacctctgacccctaaagaagaggagtacctgcaggcccaggtgcggagcagaagcaagctggacgcccctaaggtggatctgctggtgaagaattgcctcctgcccctgagagagtacttcaagtatttcagccagaatagtctgcccctgggaggcagcggcggcggcagccaggagagcgtggccttcgaggacgtggccgtgtacttcaccaccaaggagtgggccatcatggtgcccgccgagagggccctgtacagggacgtgatgctggagaactacgaggccgtggccttcgtggccgtgccccccaccagcaagcccgccctggtgagccacctggagcagggcaaggagagctgcttcatcaggccccccggcgtgctgagcaggagcgactggagggccggcggcggcccaagcagcggcgcccctcctcccagcggcggcaggcggcccaagcagcggcgcccctcctcccagcggcggcagcccagccggctccccaacctctaccgaggagggcacctctgagtccgccacccccgagagcggccctggcacctccaccgagcccagcgagggcagcgcacccggcagccctgccggcagccccacctccacagaggagggaaccagcaccgagcccagcgaaggcagcgccccaggcaccagcaccgagcctagtgagcaggagattaaacggatcaacaagatcagaagaagacttgtgaaagacagcaacaccaagaaggccggcaagacaggccccatgaaaaccctgctggttagagtgatgacacccgatctgagagagcggctggaaaacctgagaaagaagcctgaaaatatcccccagcccatcagcaatacatctagagccaacctgaataagctgctgaccgattacaccgaaatgaagaaggcgatcctgcatgtgtactgggaagagttccagaaggaccctgtgggcctgatgagccgggtggcccagcctgccagcaagaagatcgatcagaacaagctgaaacctgagatggacgagaagggcaacctgaccaccgccggctttgcctgctctcagtgtggccagcccctgttcgtgtacaagctggagcaggtgtctgagaagggcaaggcttacaccaactacttcggacggtgcaatgtggccgagcacgaaaagctgatcctgctggcccagctgaagcccgagaaggatagcgacgaagccgtgacatatagcctgggaaagtttgggcagagggccctggatttctacagcattcatgtgaccaaggagtccacccaccccgtgaagcccctggcccagatcgccggaaacagatacgcctccggacctgtgggaaaggccctgagcgacgcatgtatgggcacaatcgcctccttcctgtctaagtaccaggacatcatcatcgaacaccagaaggtggtgaagggcaaccagaagagactggagagcctgcgggagctggccggcaaggaaaacctggaataccctagcgtgaccctgccacctcagcctcacaccaaggagggcgttgatgcctacaacgaagtgatcgcccgggtgcgaatgtgggtgaacctgaacctgtggcagaagctgaagctaagcagagatgatgccaagcctctgctgagactgaagggattcccttcctttcctctggtcgagagacaggccaacgaagtggactggtgggacatggtgtgtaacgtgaagaagctgatcaacgagaaaaaggaggatggcaaggtgttttggcagaatctggctggctacaagagacaggaagccctgagaccatacctgagcagcgaggaagatcggaagaagggaaagaaattcgctcggtaccagctgggcgacctgctgctgcacctggaaaagaagcacggcgaggactggggaaaggtgtacgacgaggcctgggagcggattgacaagaaagtggaaggcctgagcaagcacatcaagctggaagaggaacggagaagcgaggacgcccagagcaaggccgccctgaccgactggctgcgggctaaggccagcttcgtgatcgagggcctgaaggaggccgacaaggacgagttctgcagatgcgagctgaagctgcagaagtggtacggggacctgcggggaaagcccttcgccatcgaagccgagaacagcatcctggacatcagcggcttcagcaagcagtacaactgtgccttcatctggcagaaggacggcgtgaagaagctgaacctgtacctgatcatcaactacttcaagggcggcaagctgcggttcaagaagatcaaacctgaagccttcgaagccaacagattctacaccgtgatcaacaaaaagagcggcgagatcgtgcccatggaggtgaacttcaacttcgacgaccccaacctgatcatcctgcctctggcctttggcaagagacagggcagagaattcatctggaacgacctgctgtccctggaaaccggcagcctgaagctggccaacggaagagtgatcgagaagacactgtacaacagaagaacccggcaggatgagcctgccctgttcgtggccctgaccttcgagcggcgggaggtcctggactcctccaatatcaaaccaatgaacctgatcggcgtggcaagaggcgaaaacatccccgccgtgatcgccctgaccgaccccgagggctgcccactgagccggtttaaggatagcctgggaaacccaacccacatcctgagaatcggcgagagctataaggagaagcagcggaccatccaggccaagaaggaggtggagcagcggagagccggcggctacagccggaagtacgccagcaaagccaagaatctggcagacgatatggtgagaaacaccgctagagatctgctgtactacgccgtgacccaggatgccatgctgatcttcgccaacctgagccggggcttcggccggcagggcaagcggaccttcatggccgagagacagtacacacggatggaggactggctgaccgccaagctggcctacgagggcctgagcaagacctacctgtccaagacactggcccagtacacctccaagacatgcagcaactgtgggtttaccatcaccagcgccgactacgacagggtgctggagaagctgaagaagacagcaacaggctggatgaccacaattaacggcaaggagctgaaggtggagggccagattacctactacaacagatacaagagacagaacgtagtcaaggacctgtccgtcgagctggatagactgagcgaagaatctgtgaacaacgacatctcctcctggacaaagggcagaagcggagaagctctgagcctcctgaagaaaagattctcccatagacccgtgcaggagaagttcgtgtgcctgaactgcggcttcgagacacacgcagccgagcaagccgccctgaacatcgccagatcctggctgttcctgcggagccaggagtacaagaaataccagacaaacaagacaaccggcaacaccgataagagagccttcgtcgagacctggcagtccttttaccggaagaagcttaaggaggtgtggaaacctgccgtgcggtctggcggatctggcggaggctccaccagccccaagaaaaagagaaaagtctaagctgccttctgcggggcttgccttctggccatgcccttcttctctcccttgcacctgtacctcttggtctttgaataaagcctgagtaggaaggctagcaaaaaaaaaaaaaaaaaaaaaaaaaaaaaaaaaaaaaaaaaaaaaaaaaaaaaaaaaaaaaaaaaaaaaaaaaaaaaaaagcccagccggctccccaacctctaccgaggagggcacctctgagtccgccacccccgagagcggccctggcacctccaccgagcccagcgagggcagcgcacccggcagccctgccggcagccccacctccacagaggagggaaccagcaccgagcccagcgaaggcagcgccccaggcaccagcaccgagcctagtgagcaggagattaaacggatcaacaagatcagaagaagacttgtgaaagacagcaacaccaagaaggccggcaagacaggccccatgaaaaccctgctggttagagtgatgacacccgatctgagagagcggctggaaaacctgagaaagaagcctgaaaatatcccccagcccatcagcaatacatctagagccaacctgaataagctgctgaccgattacaccgaaatgaagaaggcgatcctgcatgtgtactgggaagagttccagaaggaccctgtgggcctgatgagccgggtggcccagcctgccagcaagaagatcgatcagaacaagctgaaacctgagatggacgagaagggcaacctgaccaccgccggctttgcctgctctcagtgtggccagcccctgttcgtgtacaagctggagcaggtgtctgagaagggcaaggcttacaccaactacttcggacggtgcaatgtggccgagcacgaaaagctgatcctgctggcccagctgaagcccgagaaggatagcgacgaagccgtgacatatagcctgggaaagtttgggcagagggccctggatttctacagcattcatgtgaccaaggagtccacccaccccgtgaagcccctggcccagatcgccggaaacagatacgcctccggacctgtgggaaaggccctgagcgacgcatgtatgggcacaatcgcctccttcctgtctaagtaccaggacatcatcatcgaacaccagaaggtggtgaagggcaaccagaagagactggagagcctgcgggagctggccggcaaggaaaacctggaataccctagcgtgaccctgccacctcagcctcacaccaaggagggcgttgatgcctacaacgaagtgatcgcccgggtgcgaatgtgggtgaacctgaacctgtggcagaagctgaagctaagcagagatgatgccaagcctctgctgagactgaagggattcccttcctttcctctggtcgagagacaggccaacgaagtggactggtgggacatggtgtgtaacgtgaagaagctgatcaacgagaaaaaggaggatggcaaggtgttttggcagaatctggctggctacaagagacaggaagccctgagaccatacctgagcagcgaggaagatcggaagaagggaaagaaattcgctcggtaccagctgggcgacctgctgctgcacctggaaaagaagcacggcgaggactggggaaaggtgtacgacgaggcctgggagcggattgacaagaaagtggaaggcctgagcaagcacatcaagctggaagaggaacggagaagcgaggacgcccagagcaaggccgccctgaccgactggctgcgggctaaggccagcttcgtgatcgagggcctgaaggaggccgacaaggacgagttctgcagatgcgagctgaagctgcagaagtggtacggggacctgcggggaaagcccttcgccatcgaagccgagaacagcatcctggacatcagcggcttcagcaagcagtacaactgtgccttcatctggcagaaggacggcgtgaagaagctgaacctgtacctgatcatcaactacttcaagggcggcaagctgcggttcaagaagatcaaacctgaagccttcgaagccaacagattctacaccgtgatcaacaaaaagagcggcgagatcgtgcccatggaggtgaacttcaacttcgacgaccccaacctgatcatcctgcctctggcctttggcaagagacagggcagagaattcatctggaacgacctgctgtccctggaaaccggcagcctgaagctggccaacggaagagtgatcgagaagacactgtacaacagaagaacccggcaggatgagcctgccctgttcgtggccctgaccttcgagcggcgggaggtcctggactcctccaatatcaaaccaatgaacctgatcggcgtggcaagaggcgaaaacatccccgccgtgatcgccctgaccgaccccgagggctgcccactgagccggtttaaggatagcctgggaaacccaacccacatcctgagaatcggcgagagctataaggagaagcagcggaccatccaggccaagaaggaggtggagcagcggagagccggcggctacagccggaagtacgccagcaaagccaagaatctggcagacgatatggtgagaaacaccgctagagatctgctgtactacgccgtgacccaggatgccatgctgatcttcgccaacctgagccggggcttcggccggcagggcaagcggaccttcatggccgagagacagtacacacggatggaggactggctgaccgccaagctggcctacgagggcctgagcaagacctacctgtccaagacactggcccagtacacctccaagacatgcagcaactgtgggtttaccatcaccagcgccgactacgacagggtgctggagaagctgaagaagacagcaacaggctggatgaccacaattaacggcaaggagctgaaggtggagggccagattacctactacaacagatacaagagacagaacgtagtcaaggacctgtccgtcgagctggatagactgagcgaagaatctgtgaacaacgacatctcctcctggacaaagggcagaagcggagaagctctgagcctcctgaagaaaagattctcccatagacccgtgcaggagaagttcgtgtgcctgaactgcggcttcgagacacacgcagccgagcaagccgccctgaacatcgccagatcctggctgttcctgcggagccaggagtacaagaaataccagacaaacaagacaaccggcaacaccgataagagagccttcgtcgagacctggcagtccttttaccggaagaagcttaaggaggtgtggaaacctgccgtgcggtctggcggatctggcggaggctccaccagccccaagaaaaagagaaaagtctaagctgccttctgcggggcttgccttctggccatgcccttcttctctcccttgcacctgtacctcttggtctttgaataaagcctgagtaggaaggctagcaaaaaaaaaaaaaaaaaaaaaaaaaaaaaaaaaaaaaaaaaaaaaaaaaaaaaaaaaaaaaaaaaaaaaaaaaaaaaaaa

SEQ ID NO: 9008 - RNA, 8787 nt, synthetic construct
  source 1..8787: mol_type = other RNA
aggaaataagagagaaaagaagagtaagaagaaatataagagccaccatggcccctaagaagaagcgtaaagtgagccggatgaaccacgaccaggagttcgacccccctaaggtgtaccctcccgtccccgccgagaagagaaagcccatccgggtcctgagcctgttcgatggcatcgccaccggtctgctggtgctgaaggacctgggcatccaggtggataggtacattgcctccgaggtgtgcgaggactccatcaccgtgggaatggtgcgtcatcagggcaagatcatgtacgtgggcgacgtgcggagcgtgacacagaagcatatccaggagtggggccctttcgacctggtgatcggcggcagcccttgcaatgacctgagcatcgtgaacccagcccggaagggcctgtacgagggaaccggcagactgttcttcgagttttacagactgctgcacgacgcccggcctaaggaaggcgacgaccggcccttcttttggctgttcgagaatgtggtggccatgggagtcagcgacaagcgggatattagccggttcctggagagcaaccccgtgatgatcgatgccaaggaagtgagcgccgcccaccgggccagatacttctggggcaatctgcctggcatgaacagacccctggccagcaccgtgaacgacaagctggagctgcaggagtgcctggagcacggccggatcgccaagttcagcaaggtgagaaccatcaccacccgaagcaacagcatcaaacaaggcaaggaccagcactttcctgtgttcatgaacgagaaggaggacatcctgtggtgtaccgagatggagagagtgttcgggttcccagtccactacacagatgtcagcaacatgtctagactggccagacagagactgctgggaagaagctggtccgtccctgtgatcagacacctgttcgcccctctgaaggagtacttcgcctgcgtgagcagcggcaacagcaacgccaacagccggggccccagcttctctagcggcctggtgccactgtccctgagagggagccacatgggccccatggagatctacaaaaccgtgagcgcctggaagcggcagcctgtgcgcgtgctgagcctgtttcggaatatcgataaagtcctgaaaagcctgggattcctggagagcggctctggctccggcggtggcaccctgaagtacgtggaggatgtgacaaacgtggtcagacgggatgtggagaagtggggccccttcgatctggtgtacggcagcacccaacccctgggcagctcttgtgaccggtgccctggctggtacatgtttcagttccaccggatcctgcagtacgccctgccgagacaggagtcccagcggccattcttttggattttcatggacaacttgctgctgaccgaggatgaccaggaaactaccactcggttcctgcagaccgaagccgtgaccctgcaggacgtgagaggccgggactaccagaacgccatgcgggtgtggtccaacatccctggactgaaaagcaagcacgcacctctgacccctaaagaagaggagtacctgcaggcccaggtgcggagcagaagcaagctggacgcccctaaggtggatctgctggtgaagaattgcctcctgcccctgagagagtacttcaagtatttcagccagaatagtctgcccctgggaggcagcggcggcggcaggcccggcgccgtgagcttcgccgacgtggccgtgtacttcagccccgaggagtggggctgcctgaggcccgcccagagggccctgtacagggacgtgatgagggagacctacggccacctgggcgccctgggcttcgccggccccaagcccgccctgatcagctggctggagaggaagaaggaggtgtggagccccgaggccgaggaccccgaggccggcgccaggcaccccggcagcggcggcggcccaagcagcggcgcccctcctcccagcggcggcaggcggcccaagcagcggcgcccctcctcccagcggcggcagcccagccggctccccaacctctaccgaggagggcacctctgagtccgccacccccgagagcggccctggcacctccaccgagcccagcgagggcagcgcacccggcagccctgccggcagccccacctccacagaggagggaaccagcaccgagcccagcgaaggcagcgccccaggcaccagcaccgagcctagtgagcaggagattaaacggatcaacaagatcagaagaagacttgtgaaagacagcaacaccaagaaggccggcaagacaggccccatgaaaaccctgctggttagagtgatgacacccgatctgagagagcggctggaaaacctgagaaagaagcctgaaaatatcccccagcccatcagcaatacatctagagccaacctgaataagctgctgaccgattacaccgaaatgaagaaggcgatcctgcatgtgtactgggaagagttccagaaggaccctgtgggcctgatgagccgggtggcccagcctgccagcaagaagatcgatcagaacaagctgaaacctgagatggacgagaagggcaacctgaccaccgccggctttgcctgctctcagtgtggccagcccctgttcgtgtacaagctggagcaggtgtctgagaagggcaaggcttacaccaactacttcggacggtgcaatgtggccgagcacgaaaagctgatcctgctggcccagctgaagcccgagaaggatagcgacgaagccgtgacatatagcctgggaaagtttgggcagagggccctggatttctacagcattcatgtgaccaaggagtccacccaccccgtgaagcccctggcccagatcgccggaaacagatacgcctccggacctgtgggaaaggccctgagcgacgcatgtatgggcacaatcgcctccttcctgtctaagtaccaggacatcatcatcgaacaccagaaggtggtgaagggcaaccagaagagactggagagcctgcgggagctggccggcaaggaaaacctggaataccctagcgtgaccctgccacctcagcctcacaccaaggagggcgttgatgcctacaacgaagtgatcgcccgggtgcgaatgtgggtgaacctgaacctgtggcagaagctgaagctaagcagagatgatgccaagcctctgctgagactgaagggattcccttcctttcctctggtcgagagacaggccaacgaagtggactggtgggacatggtgtgtaacgtgaagaagctgatcaacgagaaaaaggaggatggcaaggtgttttggcagaatctggctggctacaagagacaggaagccctgagaccatacctgagcagcgaggaagatcggaagaagggaaagaaattcgctcggtaccagctgggcgacctgctgctgcacctggaaaagaagcacggcgaggactggggaaaggtgtacgacgaggcctgggagcggattgacaagaaagtggaaggcctgagcaagcacatcaagctggaagaggaacggagaagcgaggacgcccagagcaaggccgccctgaccgactggctgcgggctaaggccagcttcgtgatcgagggcctgaaggaggccgacaaggacgagttctgcagatgcgagctgaagctgcagaagtggtacggggacctgcggggaaagcccttcgccatcgaagccgagaacagcatcctggacatcagcggcttcagcaagcagtacaactgtgccttcatctggcagaaggacggcgtgaagaagctgaacctgtacctgatcatcaactacttcaagggcggcaagctgcggttcaagaagatcaaacctgaagccttcgaagccaacagattctacaccgtgatcaacaaaaagagcggcgagatcgtgcccatggaggtgaacttcaacttcgacgaccccaacctgatcatcctgcctctggcctttggcaagagacagggcagagaattcatctggaacgacctgctgtccctggaaaccggcagcctgaagctggccaacggaagagtgatcgagaagacactgtacaacagaagaacccggcaggatgagcctgccctgttcgtggccctgaccttcgagcggcgggaggtcctggactcctccaatatcaaaccaatgaacctgatcggcgtggcaagaggcgaaaacatccccgccgtgatcgccctgaccgaccccgagggctgcccactgagccggtttaaggatagcctgggaaacccaacccacatcctgagaatcggcgagagctataaggagaagcagcggaccatccaggccaagaaggaggtggagcagcggagagccggcggctacagccggaagtacgccagcaaagccaagaatctggcagacgatatggtgagaaacaccgctagagatctgctgtactacgccgtgacccaggatgccatgctgatcttcgccaacctgagccggggcttcggccggcagggcaagcggaccttcatggccgagagacagtacacacggatggaggactggctgaccgccaagctggcctacgagggcctgagcaagacctacctgtccaagacactggcccagtacacctccaagacatgcagcaactgtgggtttaccatcaccagcgccgactacgacagggtgctggagaagctgaagaagacagcaacaggctggatgaccacaattaacggcaaggagctgaaggtggagggccagattacctactacaacagatacaagagacagaacgtagtcaaggacctgtccgtcgagctggatagactgagcgaagaatctgtgaacaacgacatctcctcctggacaaagggcagaagcggagaagctctgagcctcctgaagaaaagattctcccatagacccgtgcaggagaagttcgtgtgcctgaactgcggcttcgagacacacgcagccgagcaagccgccctgaacatcgccagatcctggctgttcctgcggagccaggagtacaagaaataccagacaaacaagacaaccggcaacaccgataagagagccttcgtcgagacctggcagtccttttaccggaagaagcttaaggaggtgtggaaacctgccgtgcggtctggcggatctggcggaggctccaccagccccaagaaaaagagaaaagtctaagctgccttctgcggggcttgccttctggccatgcccttcttctctcccttgcacctgtacctcttggtctttgaataaagcctgagtaggaaggctagcaaaaaaaaaaaaaaaaaaaaaaaaaaaaaaaaaaaaaaaaaaaaaaaaaaaaaaaaaaaaaaaaaaaaaaaaaaaaaaaagcccagccggctccccaacctctaccgaggagggcacctctgagtccgccacccccgagagcggccctggcacctccaccgagcccagcgagggcagcgcacccggcagccctgccggcagccccacctccacagaggagggaaccagcaccgagcccagcgaaggcagcgccccaggcaccagcaccgagcctagtgagcaggagattaaacggatcaacaagatcagaagaagacttgtgaaagacagcaacaccaagaaggccggcaagacaggccccatgaaaaccctgctggttagagtgatgacacccgatctgagagagcggctggaaaacctgagaaagaagcctgaaaatatcccccagcccatcagcaatacatctagagccaacctgaataagctgctgaccgattacaccgaaatgaagaaggcgatcctgcatgtgtactgggaagagttccagaaggaccctgtgggcctgatgagccgggtggcccagcctgccagcaagaagatcgatcagaacaagctgaaacctgagatggacgagaagggcaacctgaccaccgccggctttgcctgctctcagtgtggccagcccctgttcgtgtacaagctggagcaggtgtctgagaagggcaaggcttacaccaactacttcggacggtgcaatgtggccgagcacgaaaagctgatcctgctggcccagctgaagcccgagaaggatagcgacgaagccgtgacatatagcctgggaaagtttgggcagagggccctggatttctacagcattcatgtgaccaaggagtccacccaccccgtgaagcccctggcccagatcgccggaaacagatacgcctccggacctgtgggaaaggccctgagcgacgcatgtatgggcacaatcgcctccttcctgtctaagtaccaggacatcatcatcgaacaccagaaggtggtgaagggcaaccagaagagactggagagcctgcgggagctggccggcaaggaaaacctggaataccctagcgtgaccctgccacctcagcctcacaccaaggagggcgttgatgcctacaacgaagtgatcgcccgggtgcgaatgtgggtgaacctgaacctgtggcagaagctgaagctaagcagagatgatgccaagcctctgctgagactgaagggattcccttcctttcctctggtcgagagacaggccaacgaagtggactggtgggacatggtgtgtaacgtgaagaagctgatcaacgagaaaaaggaggatggcaaggtgttttggcagaatctggctggctacaagagacaggaagccctgagaccatacctgagcagcgaggaagatcggaagaagggaaagaaattcgctcggtaccagctgggcgacctgctgctgcacctggaaaagaagcacggcgaggactggggaaaggtgtacgacgaggcctgggagcggattgacaagaaagtggaaggcctgagcaagcacatcaagctggaagaggaacggagaagcgaggacgcccagagcaaggccgccctgaccgactggctgcgggctaaggccagcttcgtgatcgagggcctgaaggaggccgacaaggacgagttctgcagatgcgagctgaagctgcagaagtggtacggggacctgcggggaaagcccttcgccatcgaagccgagaacagcatcctggacatcagcggcttcagcaagcagtacaactgtgccttcatctggcagaaggacggcgtgaagaagctgaacctgtacctgatcatcaactacttcaagggcggcaagctgcggttcaagaagatcaaacctgaagccttcgaagccaacagattctacaccgtgatcaacaaaaagagcggcgagatcgtgcccatggaggtgaacttcaacttcgacgaccccaacctgatcatcctgcctctggcctttggcaagagacagggcagagaattcatctggaacgacctgctgtccctggaaaccggcagcctgaagctggccaacggaagagtgatcgagaagacactgtacaacagaagaacccggcaggatgagcctgccctgttcgtggccctgaccttcgagcggcgggaggtcctggactcctccaatatcaaaccaatgaacctgatcggcgtggcaagaggcgaaaacatccccgccgtgatcgccctgaccgaccccgagggctgcccactgagccggtttaaggatagcctgggaaacccaacccacatcctgagaatcggcgagagctataaggagaagcagcggaccatccaggccaagaaggaggtggagcagcggagagccggcggctacagccggaagtacgccagcaaagccaagaatctggcagacgatatggtgagaaacaccgctagagatctgctgtactacgccgtgacccaggatgccatgctgatcttcgccaacctgagccggggcttcggccggcagggcaagcggaccttcatggccgagagacagtacacacggatggaggactggctgaccgccaagctggcctacgagggcctgagcaagacctacctgtccaagacactggcccagtacacctccaagacatgcagcaactgtgggtttaccatcaccagcgccgactacgacagggtgctggagaagctgaagaagacagcaacaggctggatgaccacaattaacggcaaggagctgaaggtggagggccagattacctactacaacagatacaagagacagaacgtagtcaaggacctgtccgtcgagctggatagactgagcgaagaatctgtgaacaacgacatctcctcctggacaaagggcagaagcggagaagctctgagcctcctgaagaaaagattctcccatagacccgtgcaggagaagttcgtgtgcctgaactgcggcttcgagacacacgcagccgagcaagccgccctgaacatcgccagatcctggctgttcctgcggagccaggagtacaagaaataccagacaaacaagacaaccggcaacaccgataagagagccttcgtcgagacctggcagtccttttaccggaagaagcttaaggaggtgtggaaacctgccgtgcggtctggcggatctggcggaggctccaccagccccaagaaaaagagaaaagtctaagctgccttctgcggggcttgccttctggccatgcccttcttctctcccttgcacctgtacctcttggtctttgaataaagcctgagtaggaaggctagcaaaaaaaaaaaaaaaaaaaaaaaaaaaaaaaaaaaaaaaaaaaaaaaaaaaaaaaaaaaaaaaaaaaaaaaaaaaaaaaa
